United States Patent Application Publication US 2025/0297208 A1 - sequence listing, part 6

SEQ ID NO: 906 - DNA, 58098 bp, Xanthophyllomyces dendrorhous
ggtcctctttctttcttctttctgctcgctacaaccagaccttgctaaaagaactatctatgaatctaagaccctaaccctaaaatgagacaatcatcaaggggcttctataacctttctacaagtttgtgaaacttccttcttggactgtggcttgcttaaacccagacgactggagtgggtgcctcttacagcctttgacttatatcacctaagcgactgatgcgcagattgttgcctgcaaaaccaaggcaacggatgtcagtgtagcggacatatcgtttagttcccttttatttgtggcctgtaatcagtggcggaaacgcccactgatcgaccaaccgaaaacactaagttcacaccgcctgatgatgtaagcttctggatcaaaaggtgtgaaatcttaatccgaaacgcaagttccggtggatggaaagacaaatgattccccatgttttcctcgtcctcgccgtcttcctaacttgtctctcattgttttttttgtctattgtccaagggacaaccatctccactacttctatccctgcttcttttctctcttgtcaaactgacagctatcatgtctggtcatcacatacgccgtggcgcgatgacctacgtttcctgggttcttgtcaccgtgttcaccatccagatcttcttcttcgcctttgccaagccttcagaaaagatcaagtcgttcatcttctctgattcctattcctcttcctcctcctcttcctcctcttcctcctcctcttcctcctcttcctccccaagctcttcccacagcccaactgtgaagcagagactacaaacaaaccaaaaatcctcgtcatcggttcaggccatcccaccctggatcgacaaaatccttgtgccggactcggagtcaagcctggagcgcgttaatgatgggacatgtagaattggggattatgagtgggaagagtgcggagtgaatgaccggttctgcgcaacttacgggtaagtgcccggtgctctttcttttcgtttctctttatccatttttggttgacatctgttgactgagctctataaattaatttctttcgaacactgacgcctctcctcttgttcgtctctatatcgttcgagtacaatagatacgatgccattggcgcgtcgcaaatctacaaaggccgaaccagacgactccgacgggtcttgcgtaaggctgctcagggcaagccgatcactatgggtatcatgggagggtgcgggccatcgttgattctccttccccaagcttgtcctgcgactcaaaccctgtcctcggtctttctacctctcctgtccttgtttctgttatagatccgtctcaacaggtcaagctttaaacgagaaatcacacagaaattataaatgtttgttcaattcggttccgttcttgttcactctgcggcgtgcataactgactggataccttcttgttatttctccttttttttgcttttttctcttggttctggctttcattgttatggatagaccaaattgctgagtggtgggagtacgcgtttcctcattcaaacttgacctttgttgatggcgccgttcgtggttcgttatcgccccgtctcttccaggtcctcgtctcgccttcatccgactaaccggatcatatggctgcatacttacaatgcacaacattccaacagctcaaggaagctctttcttttcgatttgctatggagcttacattccagttgatgtcgatattgtcttcatcgagtctgccatcaacgatgaatagtatgtcctgttcatctctcgttccacgacccactgaacaatttttctggataccaataatagaagaatagaataacctgacgtcgtctgactgtgattggtgtatttttctatccttgttctcctaacagcttagaaaagtatgcggtatatatggaaaatatgatgcgaggactcatgagcctccccaatcaaccagctatcatgctgcttcagacattcggtttggcatttggcaaaatcgccaccggtggtgcattccacatcgatgttgcagcttactacgatcacccagtcctgtcgtaaatccttgttttatatctcttacttcacaaagaaatctcatgcttagtgtgctctttcttccctcttctgtggatctctatcacgtcatttctgtgaagtgctcgtcagataatcctacctcgaatcttagatgatccaacagtagccagagactattttggaacgactgagagcgggggcattgatttccggcatatcaacgtaggggggcatactgttttggcaggtatgtttcctcctctatcatttttgtccactcctacggattatctttgctgatcttgtgtctgaacctcaaaagatatcacgattcagcttcttagttcagagctttgtaaagttcagtatgaacagttccttcacggcgtccagcctgaaccacccctactcgacccaccaacggatattcctaaggtccatctcctctgtttgactttgttcgcatctgcttgagtcgatatcaaggctgacgcaagaattgtatcatattctttcaatgccgaaaaatactcgtaatgtagcaacggctgatggatccctatgaccctgagaagatggctcctgtttatgcccctacttgcaattcgacgacttcgaaacttcgcccaattattccttcgaaatctacggcttggacgacggatattatcaatggaaagacttttttggcaggacatcgccctggagagaaggtcacattcaagatcgatctgataaccaaagggtccgtgatattttctcttctcgttttcattcactctcactttgttctgactgtcgttttgattgggatcgggcgaccgcgcagaactatacaaatcagctacttccgttcctcgacctacaatctcggtatcgccaaatgctatatcgaatcttttggtcctgaatcagccatcacattagatggattttgggatcagaatattagtattggtgatttagccacaattagagagaacgttccagcaggggagcacgagatcgtttgttcagtccaggaaaatacgaacagtccattgggcggaaagaaagtgttgattgtgtccatccaatctttctaaacctcttgtcgagtcagctatcttgtcctcgtcttttcctcgcatatatttcgtcatataaacatcatttgggcatccctcattctctcatctcattgtatagtcattcttgatagatacaaatgaaggaggaactggagctactcattgtgtaatctctgtcaacattacttcgacatgaggatgaaacgctaagtttaaaatcagcacgcggccgagggcaaatgtgacagcaatataaagttaaatgctaactctcagagtctaaaggctatgtctcgcactctaggccgtcgtccttccagatgagatagatggatggatgaataggagagaacaagatatagggtatcaggactctaattagttcacaagaagcacgaagctcattctcaatctctaattactgggtgagaacagacgagacacaaataacgaagccgacatcagccagatcgaatctcctttgccacgcatcccggccccgctcgctacatcagcggagagagtggagtgaccgattgtcaggatggacatccctgcgatcagctttgcgcggcccatccaaacagatgatctctatcttgaagacaacaactgcatctctctatctgtctgcctctttgtgtaatgattccttcgcctaaacatgactgtcataggacagtgtgccgggtgttcgctgatttccctactctctctgcttgcttccaggcttgccgaaacatgggatgttgatgctgcctcatcgacgtaggcagactggctctatggccgatgggatctcggtggtctgatgtctgatgtctggtgtctgatgtctgatgtctgaggacgtccaagtccagaaggggcatgtgtcgatcaccatcgattgcgatcactttctagtagccatatgtagaaatttcaagcagtcttagtatcattttggtagtaatttgatgtttctccttaatgcagctccctcgaatctccttttgcgcaaagttccgaggcttctctccgaagagctataggctttatagctcgtcctcctctgttttcctggtttcacaatccatcttcactgagacagctgggtggtatgtatatgattgtaggaaagcagtttggggaagcagtgaggacatgactaggaacaagtgccagagcatgatgtccgtttttcctgttggatgtaacaaaaagctgcggagggccagacttgtttagtgatatgtcgaaataattattcaactgtcgtaacgggtgaagtggccgagtggtctaaggcgctgtgttcaggttcgtaagaactggtatcgcagtcattcgtggcgcgagttcgaatctcgtcttcatcaatttttttttccgactgatagatatagtatgtcgaggacacctttttatgtatcttgaaccttatgcttgccattctttgctttgaggttgatcgaaataaacgttgcgacgatagaatctacatgagttcgtcaggtaatctttaagagtctaagtgcgaacaagtatattccatatccattgtccgcaataagatgatgatcagctactagaaaagacacttatcatagtaatataaataagaagcgcgaaagaataggatttttaagtgcccttggtaacatgcgagtcggactccgaggccgatcattggagtcacactctattcaacatatttcgtccctttcccttttttcacctttcgcttcttaccatttctgtctctctttattcccattccagtgttttcatggctcatattctcaagtcctttcgaactcttcctcggaacgttccgtctgctctcagcactcggttcgtctccaaagccgagggaggcaagcccgtttcagactttatgggcgatgtaccggacacatctgtagagatcaattcgcactccatggctcggaacgctgctaatggaagggcagatcatctgcacgactctaccagtgctctggattgtatgttcatcctttcttatcagatgtagctatttcttttcacctgtttctgcctcagtcattctcttgcctgcatcattggagttgttcttctttcccatgctacgtgcatgttcagaagaatttgcaaagtccagatagcgtcccgttactgatgaatcatttctacttctttttcctctgccttgtgtttcacaatcgtcagataagttgcacactcacaaccgacctcctcctctccccgtgttcactagggctcagaagtccgctgaagatcatgtcctcagcatcctctataacacccctcccccttctaccgagccgatcaagaggtattttctctcactctcattttcatgcgacttaatgggtgtgatatttaagatcttcaagtttgacagcctgtcgccgataatttcttaaccatatagacacttcctcaactgtcttgtacaagacgagccaggagttctctctagggtctctggtattctcgctggaagagggttcaacattggtctgtacaatccatatagtctcgggaactttgttgatgtggtttctgacatttcgctgtggtaatcttagactccttggtggtttgcaagactggagtgaaagatctttcaaggatgtgcatcgttcttaagggccaagatggtgtgattgaacaagctcggagacagctggaagatctcgttcgttcggtatctgtagatatcaatttttctgagcaagtcctgataatatttgccgttttttctttttctttcgttgctctccgctaggtcccagtttgggccgtgctggattacacgaacacgccggtcatccagcgagagcttcttttggtcaagatctctacccttgggtcagtctcgcattcatacttctgtataacctcatcctgatgagcctttatactaacaaaatgacttactaaaccataatccgcaccctcattctgatgtcgctaccattcttttccatatacagacccgagtatttcgattctcagctatctgccggcccatcgttccatcctagctccgaggttacacctttgcccacccaagggggtgaagagacccctgcgcagtcccaggaagcatacgcacacgatacccatgcgcacaacccaacgccggcagctcactcgatgctcaaccaatctgaggcgctcatcaggcagtctcagcatttggcggcaatccaggcgcttgctacccagtttggtggtaaggtcgtcgacgtaagttccgccagtgccatcatcgaactcagcggaaagacggagaggatcgaagccttcttgggtctcgtgaagccctggggaattttggaagccgctcgatcaggtctgtatcttgcgtcttttgtcctgaaacgctgcatctggcttccatatagtatactgactgctgctccgaattcaatcatctacctctattcgacaccaggtgccatggtcatgccgcgaactcctcttccaaaggaggagggtgaggaagagttccgagacgagtctgttgccatggatgcttctctccttccccctggttaaacagcaggacgagctctgtatcttagataagagatagaaagaaaggatgcttataaacggccttgcgctcagttgttgtcgatgttattttctctgttcctgtctatcgttttgtataaagtgttgttaggatatgtgtcctattaaaaagattcttctctttgtttcgcgatgtacttgaccgtcacaaacctggttccgacaacactcgcaaacagaagcctcggtaggatgaatacaccgaagctgagccactggccgtaagtctagcctgagaagcgttcatatgaaaaggacgcctgtgtaactgctgatgacgtaacggaagctaggccgggcttacacattcccgccgttagggttaaccgtctcggctccatctctgtgctctagtgtgtcatcgccggctgattcacatcgttttggactgaattgttaaaaccctgctctcttgtttctcttgtttctctctcattctcattcttcttctctttttctcttccattcacctatctcttctgccatccccgaggcagctcgtcgttgttctcaatctcttgccttctttcagtaaacacgtacctatcaatccacactgtcatagatttttcggcttcaaatggttttcggctcatcctctagacggtcgtccttggctacatctgagtacgctcatgccgagaacgaaccgccttcacccgccctatccagatcatcctcgaacgcttcaaacttgtccagatggtcccgcaagacgacaaattcaaaggttggctccagcacgggaacaccaacgatgttgtccgatgttgcagccgacaatgtccatcgtgacccctgggccggacactcgggccatctcagttctgctcaggatgccaaacttcaggcctttaaagaagcgctggctgccaagggaatctacaatgagtcaggagagcacgagttagctggaggaaagggtaagggaaagatcgaggacgtcagtttgttgtgagtcgacctcagctcgttatgctcggctatcttgcgcggtccttcttgagatcgggtatatatcaatgacggtgacaatcagcccctacgaacgatcatcacatcaactccaatatattctcatttttttctgacgaatcctctttcacattttgtactaatcgtcatatgcttgtcttttctctccaggcgattccttcgagcgagaaagtttgacgtccagggggctgttaagcagtatgaggaatacatcgcttggcggcaagataaacacatcgatggtattttcgcctcttttcttcttcttcttctccttcatctttcctttgtaagtgcctggaattcattagcccaactcatcttgttttatatctcacttgtacagagaagtatgcagaatacgatattgaagagttcgaacgactacgggcggtttatcctatgtggacaggtagaagagataccgttcgtcccctacccctggcaagtcaagacaagccacgtagctgtactgatgcatgtggttatggccttcttttatcgttgacgctacacagcgcggaatgcctatctatgtctacaagatctcgtccttaacgacagcgaagctcaaccagctgattcccaacgacgaggcttcatcatcgtccatcgctatcgtcacttttgcgctcattcgattcctacttccgttctgttcgaccctgcctagacagaacgaggaggttcctatcgcgggaactagttccatcgttgatgtcggggatgtagggctgagtaggttctggggtttacgtagccatttacaagtcgcctcggtcagtcaatctaaggtcatatatagcaatccgtgccatcaaaattgacattatatcgtttctttgtgatgaactttgtagcaagtcgctagcgcaaatttcccagagaccgttagtcctcatcgatcgaaagatatttgagcactggcaagttaaatcataaacttttcaccttccgtcttgatgcaacagatcgatcgagtcttcgtagttggcgcaccgtcctttttccctacagtattcaattgggctaagaaatggtaagactcttcgattcatctttcatctcctgtcaacttactgatctataacaatgactgcatcttgtccaggtttgatcaaggaactgttgacaagatccatattcttggaaccagtcctttgaatgagctccttcgctggatgccccgatcatctatcccaacggagtatggaggagatcgtaagttttcgttttccattcctttctttagaacgtgtacgctaactgtgtcggatctggatttgtaacgtaaacaaagtggggtggacttacggagattcacctgttctagatgaagaagcctcccaagcctttggagtaaagggatgggtccgaggtcctatcgcctggaatagcaatggtctcgtccaccttggcacagtcaatggccaacctcgccaacaggagtcatcttctagtccctctcgggcgcagccacaacagtcggtgctggataaaggtgccatgctgtctgctgagccagtcacatatgccgatggacctacaccgaagccaacccatgccaagcttccttcgggtgcccctccggttgatttgcaaaattcatctaaatcgaactctgattttggatcgatctttggtaactcacccgtcccctctaccaacgatcaggagccagttatggcagctcacaacacgcctcaatccccatcaaacgctatgcacaataccaacgtccatccccgtttgcccaacggaacaaacccggatgcggatccagttcctaaggcatcgacctcgtatgtccctcacacccatcagcctgtcgtgggcggcgcagaacagcgagagaggagagaaagcgaggggccgattggagagggaaacattaatcacaaagcaaagcaagcgcaggatgcgatcaaggcaggatggattcctggaagcggagtaacggaggaagatttcttaaactctttcaagcaggtagttgtctaagcgtatgagtaatctagattggacatgtgtatcatatcatccttctttctggttccttctaattaaatttaaactccaatcccttttgtttgtttgtcgacgctttccaaccttgttgtcttttccgttgttacattgtggttctccttataatattcgttattatctttatgtcggcctatcatcaaacacgagctctcagggaaaaaatcaagaccgcaagaggtgtacacaattcaaatctcatcatcgtcagcttgcacagagttcgtcaaccagatctgcgaagcaattatatgttgcatctggttgcggcgaggcttttttctcatctccttccctgtactttccagttttgactttgttgaagtgttttggaaacaagtttgaccagtataaagacgatcccagtcagtgcatagtacatcgaaaataagttatcaatacggagtgtatactcacctagatatctcttcaaaccgagatctagtgctccctctccgagatcgttgaacacatcgtctccaacgatacctacgttcggccagtcctccctcttgagcccttcgtcttgaagggaatcaagagtcagcttgaagaagcttgaagagggcttccctacaatttcgggcgtgacagaagcagctgaagctaatgctcggacgaaaggtccaggtccgagagagagcgcatcagtatcctgaatgtaatttgcttggtgctgttcatgctcaaccggaagatgcccaatagagacatcagtaattctgacagaatacacgcaataaggagagtcggacacgtacggtcgctattaaggaacgaggggtggtcttggccaaaggagtggttccttgagaaacgggctctcgagcgactactcatttgcgcaacatgcatgagacaggatcatatcagggaatctctcatgattcgcagatgtgggggatacgtacgaatcctaaaagccacattcaggtctttgtaattcaacttatccggggctaatcctattactacagagtcacagtcctcgggttgaatatgggcgagatgaccaaagtcttccaaagacgaaggagagagcagcaaatacggcctgttgccagacaaaggaaccggcaagtctatcaacagtgagtccaatgtagaagtagggcaccattgagaagacacaaggaaatggaatatggaacgatattgtagtacagacttgaggttcctctgctcgaccaaagttcgacaagcgttcaggctagtaaacaactcatgctccttgacatcaagctcaagcttttcgagtcgagagagaaggctggaagaggattctttagacgtattcgagcttgagattgatatgaaaaaaatcagattgttatgtaaagtcatcacttgaggcaagaaggatgatgctatcacacgctccctgctttatctacatactcaccaaaaccgaatgggaatcttggctgagcgtagcttctggatagcctcagctgcacgaggtgttggcttatcagcgatatggagagtcccagagagatctatcaagagcgctgagagttttccggtagtctgcatgttagttccgatggatgaagatgacgatagtatatgaatgtagatcactatcaggaagggatgaaatcgcgaagaaacgtgattatgcaactttcacccggttaacttcgatctccatctcatcgaccgtcacaacactcgtgctctgctctcagcattctttccaatcatgtgggaaagaacacttcaagaccttatcagagtgagttcgtatgtacaaagcgatcgtccgtgcaaccattgttctaaatgtactcttccttgtttgggtcacatcccgtagggcataagagcaaactcttctaaaccgcaagcccagtttgatgttttcctccaagaagctatcgaagagatccggaaggagctcaaaggcggagatatggagctcaaagccaaagcagtcctcaagatggtttatgttggtcgactccctctgtattggaccaagactttcatcttaaagcgaccctaactcctgaaacttcttcttggttggcgacagttgatgatgctctatccggtcacccctcccccatcatttccatttcatgtagtagaggtcatgtcttcttcaaagtatgccatcaaggaagttggatatctagctgccgagggagcgtttcctgaaggtaccgaagagattgtgctgactgtgaacggactgaagaaagtacgtgagacgcagtctctaggcccattcatcgaaatcgaacagaacgcttaccaggtcttgcttttaccacaggatctcctatcgccccatgccgctttacctcaacttgcactccacgggctggctactcttctcaacccgacattggctcgtgatgtgtcccatgatatctcttcgctactcacccattctaaacctcaagttcgcaaacgggccgtactatgtctctacaaggtattcgaaatgtatccggactctcttcaggacaattttcaacgtctcagagatcgactgtcggacgaagaccagagtgtagttagcgctaccgtgaatgtattgactgagcttgctagaaagaatgcgaagaattatcttcctctggctccggagttgtttgaggtgctttccaagagcgaaaacaactggatgttgattaaagtggttaagttggtgagtcgttgcccgtttacctgtctatcattgaaactttatgagtttcgacctagaactaactcagaactaactccttccattgaagttcgcgcttttgacacctcacgagcctcgtttggttcgcaaacttcttccacccttgacaaatcttatcaccaccacatctgccatctccttgctatatgaatgtgtgttgacttgcatcactggaggaatgctagatgattccgaggctggtgaagctctagcacgtgtgtgtgttggaaaactgagcggattcttgaaaaataaggatcaaaactgtaagtgattttctgtttaagatacgatgttcatcattaacccagacgtcctttcaacatgtataaagtgaaatacatagcgctcctagctctagtacatatcgttccaactcatccccacttgatagaggattaccaggaaatcattctgagtagtgttgatgacgctgatctcagcatcaggctccgggccttggatcttgtttgcgctatggtttgtggaatttccttgttcgcaaaagagatgatgtaaactcaaagctgatatctcttgacctgtattatgtatcaaaaggctactcgacgaaacgcgcaaccaatcatcgatcagcttctctctgccttgctcccatctaccaaatcaaccccagaccttccttcagcctcatccgccttactctctaatctttcctccacttcgacgggtccttctctacaaccctcatcgcaaactaatcttctcatgccttcttaccgcttggagctcacgaaccgaattcttctcgttgggtccaaggacacatattcttccattcctgacttttcatggtacctctcggttctcatagaccttggatatatctctcgagtggatgtagggaaggaaatccgaaggcagctagtagatattgtaggtagagtgagagactctagaaggaaagctgtcgagctgttggaaggggttctatccgacccaaaattcttgaaaggtgcaggtgatggtctagagagcggattccacgaaggaggcgaagcaggctgggaagaaatcgtggcggcaggcgcttggatatgcggagagtataatgagtaagtctctacaaccagtcgaacagttactgacgaatacacgctgaaccggtgtgtcttgttcggttcagatacctgagctctcctcctcagctatgcctggttctcctctcccctcttattgcccgtctgtcacctgaaaccatatcagtttgcatccatgcatctgccaagatctttgcatcttgggcagcagagaaggcagaaatgtgggacgtgagcgaaagtagcacagatctcaaacaagtcaaagagattgtaacgaaattggtgaatggtttgaataggttcaaacaatcagaagaggccgaagttcaggaaagagtgcgtatgttctacatggcttgtttacttatccacaccatgagctaaccttcactcctcacaattttcgatgcattatcttctctcaactttttgaagactgtcaatatcataaatctgtttgcgttcgtccaagccaatctagacagctacgaaccacctgcatccgtgacgtcgattcagtcatccatcgcgcccgaagaagaaggctttacggcccacgattcttctttggttccgacactctcatctccggccaatgcccctatcactcctgcctaccctaaatctctccttcttctttcgccccttttcactgcctacgctcttcctcctgtctcgacaagagctcaaagttcaatcattcctccagctggactcgacctagacactccgttatacgaaagggtaccggaaagcactgtggaacacagcagtgacgatgaaggggacgacgacagtcacctcgacattggaaaacccagaaacttgttgtcagaaggcagatctttgagtgatacaggaagatttagaacggaggaggaggaaaaactgaggagagttgtagccgctaccgtatctactggtcgaaagaagaaagtgaagggaaagagtaagctgatcggagagaaagatgagtcaaaggaagaacgaaaaaaagtatgtgttgttgtcgtcttcattcacgttgctacgttgtaacagtcatcgattgaaactgatataaagtattaatcatgttctacactcgcagcgcaaagcagctcgattggctcgccagggtactgactcgtatcgtcttaaagagaatcatgattctgatgatatagactctatccctgttgtcaagttagatctaggagatgtttccagtgagtgctctttcgaagtcatttcttatactcctggatgcctttgctcaaaaaacatattcgccccaaccagaaccgacaaccggaaggaagaagcctgagcgtccagtttcgccaccagtcccagaaatcgatcgagatggagagatgcccgaaggattcgagccaacatctacgtcttcttccttggctttatccgcgctgccggtcaagataagcgagagggatgaatctgtacagaaggacagcctgaaagacgtcgtcttgaatctggactcctctgaagcatcttcgtcagctctgccaaaagtcaagacaaggggaggagcatatgaggaatacgtcgaaggagacaaagacttgcccaatgttaaatctatagcgacagttgatcaggatgttcagaaacagcccgttcctctatctgggccagcagttgaagtggttaaggtggtcaagaagaagaaggctaaacaagatggaacggttagtactctcttatcgataccaaaggcctatcagacttgtctactggtctaaacaatgttctgttgtcatgggaacactcaggcaacgccttcattacaagatagcagtcagcttctggcttcttcgccagcagaacctggattgaaaaagtcgtcgaaaccaaagaagaagaagtcttcgtcggccgtttgaactcatgagttgtgatatctacacgctatcactagtgatgatgttctgattgtatgaaacgaattcaataattggacgagatgcgagaaccctaaagacgatagattgataagatgagaaagaatagacaaaccgtcgactacaagatcgaaattttcatagcaacattattaccatctcgctgacgtccgaatgattatcgatacagaagagatcttgagtgctactcttcaatgggtccagtcaagctctgcctatgcctttcctcttgtcttggtgttcctcggctacttattcactcgacgttaccttgttagacctgtagcatcctttgacgtgcagttcccaccggtgagaattctctattgcgcccatattccatgtttcttctaacccgtactcgagtacgggtgagaatctgatatagttctctatttaaaacttcgtacgattcgcgatttacctaaacactttgagataggagtcagatccatcttggaagggtaccaggatcgccaaccccagcttacaatcgcatctatcggatcccactctgcatccagaagaagtattttcgacttgtgatcaggctacaaaatatgttacctgcttcgatccttctactaactatcatttggccagtgagttcatacaccttgatctttaccatcaaaagcacttttccatatggttccccgagactgatgtcttcttcaatcgacagccatctcatcagacacatctgcttctatcgatgctaaagttagagctgcagacaatgctcagaaagcttgggcgcagactacgttggatgacaggagagtcgttatgagaagtcttcttgcttggttagtggacgagaagaacatggagagaattgtcagagttggagttcgtgacacgggaaagacctgtacgtgctttgaatatgctatcactccagttcatctgcttcttcgtcctgtgaattaattcgtgaatgaatacggaataacatgatgaacgcatataattcttcccgatgtagtactggacgctgctttcggagagatcttgactacgtgctcaaagctcgaggtatgttcagttttgatgaaagcttatcagggatatatgtgaaagcttccaccgaactgatggcctacacaaagtaaactttagtggatgatcaagcatggcgaaacgtatatcaaacccgaacaacgacctggaaacatgcttttgatgcacaaagtatcacgagtatactacgagcctcttggaaccgttgctgcttgtgtttcctggaactatcgtacgcgtttcgatgaccaactcgtctgtctttgttctagaaaacagcaaaacgagcttaccgatccattcatttatccatcagcgttccataatgctttgtctcctatcatttcttctctattcactggtgagtccgtacagatttgaggaagtcgctcgttcgaagagctgatcgacttgtcaacatcttagggaattctgtgataataaagtgctcggagcaggttgcttggtcttcgacattttatatcaacagtgttaagaagtgcttagaagcttgtggacattctccagacctcgtccaggtttgtatcaagaatggacatttgaactttgctgtctttgtatttgactgattgggactgtgttctcctattttgtatgctagcttgtcgtctgttacccagaagaggccagcgccctgacagagcatgcgcttatccggcatataacttgtgagtatttgacttatgctcgtgtccacatgtttaggatactgagaaggaacctgttgaaaatcagtcatcggtagcgagcaagttggccggatagtaagtagatagctcgcgcatccttcctcaagaatcttcatcatcaaaggttaataaatatcgttttctccgagttcttctaggtcgcttcatcagcagccaaaaacttgactccctgtatcatggaactaggtggaaaagaccctgcgatccttcttccctcggccgatgtttcgttcttttcttcaaccttccttcggtctgtattccaaggctctggccagggatgtattgcatcagaaagattcatcgtccatcggtctcttctaccaaaattaatacccgatatggagagaaggatccaggcgttagtacagggcagctcattaggcgacaacagtgaatcagcgaccgttgactttgggagcatgatctctgatgcccggttcgatcagctggagcggatgattagagaggctgtagaagacggagcaaaactgctcatcggagggaagaggtcggaaggcttgagcggtaacgggttcttccagcctacgctgcttgtcgatgttaagcctggtatggctgtggccaaggaagaaggtgagtgctaatctagcttctccgcatctctctgtctgaccaatcttgatttctatagtgtttgcgccgatcatgacaatcatcccgtacgatgatgtggccgaggcggttgaaatagctaattcatctagatacgggtttgttcagtggttttgtctgattttttctacgtttcgtcctgatgtctctatttcctttcccactatctctaaatggaatttagtctcggagcatctgtttatggtcgatcgaaacggatggcgagggatgtagctcgacagcttgagtgtggaatggtcgcactaaatgattttgggacgttttatatcaaccaggttagtttgtcccttttcttgtcaatttatcttggaccatgaagctgacagtttactatgatcttcatttggtctatagtcccaaccgtttgggggctgcaaggcatcgggctacggtcgattcggcggacctgaaggactccgaggattatgtaacatcaaggccgtcgttcgtaatcaatcttatatgtctgttccaagtagagttccctcaacatggtcaaactcatgttttgttgtcgctgtcattcttttcccgttgtacctagatcgaggataggtttttcgggattatccagacgcctatccctggtcctgtcggtgagtttctttgtatctatcgacgttttttttcgtcttgcgctacgcgcttttgtgttctgcttcctgcttcgtttatgtatactgaacgaggctttgactattatcaatctttggcgccgaaagactacccggccaattctgtcaagagctggacgtttgtgagtggacttgtccggctgttctacgcgccttcttggagaggacttttgggtggtgtgcgagatattattcgagggagcatctagttagaaccaaaaacaaggtatttgagaggaaaaaaaaaacaaaaagggagaagaaggaaagacagagaaaaggttttgtaaggatcaatcagtttgaagagatcagacaatagccgctcagatgaaatggatatacgcgtgctatttgagaaaaacaaaactacagggaagcgagtgcgagagcagcatcagcagcaggatctgcgatgtgtgtgcatccataagcaaattcgatccctacgagatacaagatagatcagagagtgggtctgtccaggtcagaaaggagaatacatgagaaggcaaatgagcacattgcacataccatgatcagcctttagagattctagaacgagctgtctatatgtttcctgaccaaccagacttccgcctagacagaggatggactgattcgggtctataccgttcggaaacggtctgatcaaacgggcaatatctgtgcagagtcgagggtgttcatacgaacacagtgagcgttgaaagcgccgagtgtaccaagaaaaaagagggagaagagtattaccatgagcaaaatgaccggcggcaagcttgacggccgagagcgccaggtctgatgacttctttatcccaaactctggtcggggaatggcatgtttgaggactagacgggcagctgttcaggtacaagagattcgagactccgtttagtcaggtgattgcgtgtccttcgttcagccaagaacggttaaatcgacacttaacgcacactctgcgattttaaacttgacagcagtacctgccgaaccggatgataaagtttgatactggataagcaagaggaaaatagaaattgaggttgaatctcagtgtcgacagttggttgagacagcaaagagacacagcctacgaaccactatgcctggaaagaggtacaggtgattgcgtcaacgactcaatgtaagaatgagtcaaagaaaagggagacctaccaagcaggctatcgacgctacggacattccagtagatcagaagttcgtcaatgaattcttgttcggtatgtaagctttcgttgagcgtgccagcgtcgaacgcgtagaggactgagcgcaaggccatcttgccgacatagaaggctggggttgtttgtggtgtgtgtctctgtgtgagcatcaggtctaatctgagacagacgattgaaacgaagagacctcaccgcttccttcgtcccccaagagccaaccgaggccacctcttctggccacctggctaatggtcttttctcggccgggatatctgtcgacggtgactgagagacagacggtgcctgttcctgacacggcgagcacgcccgagattgcgtccgagatgaccaacggagaagacagcaggagcgcgtcgttggtgatcctaaccgagcatgcgcccgagctgttcgcagagacgcatcatcagaagacgtctggctgatgtgaatgcgcagacggaaacgagactcacaaatacggtcccagatgggcggatagtaactctacatctggtgcgttgtccactccagaaaccttcatatggagataaaaaggaatgagcgtatcgacggatggcggaagcaacagaacaaagagaataaacgtactccgatccagactttgtgaaatagtgatcgaacttgagcctcattgaaatctgaaggtagtagggatgatggaagtgatcgaatggcccgtatagttgcctgtttgattctagcaacacagacttctaggccctcctgaaatgagcaggtgaagggaaatacaaaaggggatgtgagataaggccacgtgcagaggcatagacacggtgaaccccaaagggcaaagagtgcaacgaacggtggccagattgctgccgagagcgatcccttgagagacgaccagtggcagacagtctgtctgtctttctctcaggctgattaccgccctggactttgttccgccgccgtcgacggccagacagaggagcgccgtcatgacgtctatgttgtatgctgaatgttgtatgttgtatgctgcgtgtgatttatgtctgcgtctgcgtctgcgtctatgcctgtgcctgtgggtccaagtgcctgtacatctggtgacgtggtaggttacgggtgtgatctcgtctgtatggctttggttgtgccctggaccatcggtcggcggtgaccgatgatcaacacgtgatctacccgatccctccaggctgtacacaaagacgccatcgtcgcgttccttaatctattcggaaaaaaaagacggtccgtgcgcgtgaagcacgcaaaaagaggaggtctgtgcttctttatattagtggcaatcccattcggtttttttttttcgttctcttctcgtctctccttcatctctgatccctcagtgtctctattccgagtgtgtctttgagtgtcgtcgtccttgttccctctctctgtccctctccctctctcgttcctgtttctcttcggaccatctctctccttcgagcaatcgttatcggaatccctctttcctcaaagaaccgcgcgtaatcttcaatcaccttacccaaccaggtattttggaattcagagcgaacgttgaacgcatacataaacacatatctatatttcttcaagttaactaaataaaaaagtaagagcttcctgctcttcagcttacgttcatatccatatcggtttctcataatcttttcctccttcacttccaagcagaacatgacatcgactgctccctcaccctcttcgaccgtccacccgagcccatcggcgactccccggcctgctcctcctgccgccgtcatcggatcgaccacgaccccgttgacagagatcactcaccaggccgccgctcactctgctatcttcgctctgttcgatactggaaagcttgctgggttcccacttcccaagccgacgacccatgccaaggcaaccgcggtggtgtgggagcttcagtcccgactcggagccggaaactctctcgtcggctacctcaatgctgccccggtcaacgctgttgtcactgcgcttctctccggatcgaccctaccactgcttatcccctcgctcgggcacctcggcaagaacccggccgatggcaaacgactcatcatccacctctccttgggtgtcccctctgaggctgatgcgttggcgaagccttctaactcgctcgcccagattgaaaagtggttgagcattctgccatccgacttcacggtcgtcttttccggctcgccagaggaaatcattcagaacactgcagagattcataacggtctcctcggtaacgtccttcacgtcttcgatggcgtctttgccagcagggagaccgtccgaactctccctgccacaaagttggccgagccgatcgagccttttgtctacaccggctcgccgtccgcccaaaaggtcgtcgtctctaccgcatcctacgtctcgaccgtgcttgcctctggtgaccttcccgcctcggtcggccgtcttcagatcaatctgttgaaccagaccgagcctgcgcttattcaggcagttctccctccctcagtcaacgaactcatcgtgtttgaccaggtcgaatctgcatcggagggaacccccttccttaaggaagccgttctcggcaacctctttggccaggccggttcctctagaaacagagcgctcaaagtcaccggcatcaccgtcgccagcgaagagccctccttcaaaggcttgctcttcgccgccggtctcgtcgctccacccgcgtcttcggctggacccctgacgaagcagaccctcctgttcactagccagcactcgctcctgccgaatgtcttggcaaagaccttccttgaggcctccccagccctgcagacaaaaatctcaaccctgacgtccactgcgcccgctcttgcacagaccaccctgctcgtcacgccctcctccaagcggctccctccgcttacctcggttcccaaagacgatactactgactttgtcctcgtcaactccctcgtcgcactcactcagactaaatcagccctccgatcgcttaagcagaacgcgaccgttctagtatccctccctggatgggacaaggcctcggccgagacgaactttactccggccgacaaggcgcttctcagagcaaagaatgtccggctctttgtccttcccgccccgctcactgcgctcaagttgactaaagaggaggctgaaattcaggaggtcggcctcgggctcgtcggcttcctccttctttacgctggcataggtgagaacggagtgctacctgatggtctccgagctgttgttgagggagcgttgggagaggacgtcgcccgagacctcattcgaatcggcgaacagaacctgaaggaaagtgtcgtgtcccgatgggagcctgcctccgaggaggagaatgccgctgaagagaagcgagccgagctcattctcgatggccttacgtccttcccagatctcacacctaccggatcgtccggaggacaccccatccaaggaacctggcatattcctgcgcttcacctgctcttcaaggagtcctaccttgctcctccttccaccgatgagatcgtttcccccgagatcaacaagctcactccctctctcgaggagaagacctacctggccacggtgaccgagaacagacggttgactccggacacgtacgaccgaaacgtcttccatctggagctctctactgctggcaccgggctcaagtacgacgttggtgaggccctcggtgtccacggttggaacgatgctgacgaggtccttgagttcctcgaatggttcggtatccacccggacactgtgctctccctgcccttgccatccaacccggccaaggccgaatcaaggacagctttccaattgttccagcagcacattgacatctttggtcgaccgcctaagagcttctacgccggtctggtctcaaagacagacgttcgagaggatgctaggcagctcagattcatcagctcgccagaggggggaagcttattcaaaaagttgggcgagtttgagaccgtcacgttctttgacgtcttgaaaaggttcgagtctgtcaagaaaggccttaccttggttgatctgattcatcttatcggagaggtctgtcttatctgtctcattttgacttgttcctcttgcatcttgggaagttctcccagactgatcagttggctcttaccaccatttgccttccaacaatttagatcaaacctcgacactactctatttcgtccgctcagaagttcgtcggtgattccgtccatctgttggttgtgacggtcgagtgggactcttctctcggcaagccccgattcggacaatgcacccggtacctttctgggctgaagatcggacaaaaggtcacggtctctatcaagccctccgtgatgaagcttcctcctctcgacagccagccggtcatcatggccggtctcggtacgggtgctgcccccttccgtgctttcatccagcaccgagcttggcaaaagtctcagggaatcgaggtcggaccactgatctactacttcggagccagatactcttcccaagagtatctctacggagaagagatcgaggcctatctggccggtggcttactgacccatgctgggttggccttctctagagacaccaaggcgaaggtgtacattcagcacaagatgggagaagacggcgagctcttgtcatctatcctgaccgccaaggaagagaaggacaaggcctacttctacctgtgtggaccgacctggcccgtgccagacgtgtacgaggccttggtcagcagtttgactgtcaacaagggttacggcagagatcaggccgaggcggccgtggaggagtggaaggaagaggagcgatatgttctcgaggtctactaagtgtgaatgctgtgtttgttctcgtcctgtcacattcctttggatgtatgatcttttctcttgctcgaagtgtgttgtattcgattccctcgtcaatgtgctctgttttctctttgtccgtaatcacaagattatgtaaggatttttaattttgaaaaacgaactggcgaaatcgaaaaggaagagtataacaacaaagagccattagagaagggaaaaaaaagataatctagatgaagaagcctctatcaatacatccgcaaggcatgggaagaactccgtttccggttccctctgaacgtcgtccccttcttccgacgccactgtttccaaccccaagagagcccgaggatggccaactggaggatcagaaagccgagaagccactttgtcaaactactcgaggtactctcgtcctcaaccggcggcagtatgggtgagtttttgatcaattgcacaggcggcgaagaagacgaagaagaggacagaggggtcgaggaaattgaacgagcggcagacaagatccgttgaaggagagaagagtgcttcgactgtgatgttatcagaattgaaacgatcgccacattcgtatgtgaggttgggagaattggatccagagcaaacatcagcaagacttggaagaaaagattgtgttaggaggcacaaagaaaggaacaggggtacaaacctcgtatgtgaagaaccgggcgttatatcctatcaagtcttccttgaatccttcgaatgtggtgcgtagttgcctcctttcggactctagattggccaatcgagtagaaagatccatcagggcggcgctgtggagagggaaaataaatcagcctgtatgaatagggagaagaagaagaagactttagagaggaagacgtacgcgaatggacctttgttcttctcttttcctatccgtttcttctctgccttcgaaggcttggtgtcgatcaaatcacctaattgttcttccagcccttgaacctctttcaggagcgccatttggtaagtcacgattgcctcggccacaccttcgtcgacttcacctgtcgataccgggggagtgtcctcggctgcttcgagtgcggcttgagctcgggcggctatcgccaagggtgagtcccggagtcgtctaggccggccatcttctcccggtccaacgacgggttcgatgcagatgactgctcgttcgttcgcgagaaaggaaaggaaaagaggtcaagatgccaaactaactaggatcctgaagaacaagaacgagacggaagaagggccgagaacagtttcaagaaagaaggacttactatgctgcacttctccattctcgaactcttcctgaaacacaccttccgaacttcctttgttaatgacgaaccctctcggatccgcgttttttggtgcctctgggcagtgagcgcccatgacgccgacgaacctagaacccttctggacgatgttgtccagcacggtgaagttcgtacaagatgcaacgacaatgccgtacccgaggtgggtgcccgagattgtattgccgataacggaaccgtggtgaacaagggactctgtatcatccgaccaagtcgccggaccgatattgagcgctactttgagataggctgaatgggcaaagatgtgattttgtgttacaagcacagaagtgtagtctccttcccacggagggacgtcgactaagttgataccttattttgagtagcgtcacgaagttgtgtcagcgatgatcaaagagaccagagagtcatctaaagacgtttcccacaggaatggattcgagagacaaacctcctagaacggttcgggttcgggagtagatgacattattctgaacagtgctcccacggctcccgaagatgacgattgcgccatccgttgtgtcgtagacgacctgtctccgttcagaaaatcatgtcctcataagtttgatccgacttggattgggatatacggtcctcgctcaagggatggagaaggtaagacgtacgttatcttcgactacactatccatacaggccagactgataccatcactcctcggattaccgaacggtggtgacttttcggataacccatcgtacgctggatcccattcctctccacaaggtccaatctcgttcccttgaatatgtgctcttgaacaagatttccagtcaccttcacggagatgaagcgcagaccaacctctgtttcaatcatgattataatgggtaggtgatgatgagcatcagatcatagagatctcagaggtaaagatcagaaagaaagaacacttgcctaggttcatagagtttacagttgacgacttgttggtcatttgcgtttcccaattcaacgagtgccccgcccatcggaactcgtaataataacgggcggtttccgtcgatgattaatgatgagacggatacaccgttgcaatctatacagtctcctctagatgatttgagagtaaacaagatataataatcaaccaacgcacatctgaccagtatcgtgagatgcggaactagagaagaaaaggacgatcgaaacacgaactggatggccatgctttgttcgggtccttcgacgatgagcatagctctattagcatcttttggatacccttcggtatataatgcctggtcttctgccgtgaagatgataggagatttcaatctaaatagagaccgttgacaaagcgcgactttggtccctttgccacctgcattaaggtagttgagcgttgttagaagatgaagaagaagaagcaacaacagggtcaatacgggccgatagacgcgatacatcccaaccgttcgctcggtttcatcgagagagggagagagggaagagaggtatgtgacagaccatggtatagaatccggttgatctcggcttcgtctccagtagaaatacattctgaagagggcaagcttgcattcgaaactgatgcgattaagaggaaatgaagtagaaatagtcggacggagagaaagtgtgaagatttcatatttgggcgtgctcagtggcttcggcacgcatagaacggggtatatgttggacacaaggaggggatatactgagaacgatatgacagtctgtaaggcgtcacctttcaagacgtatcgtatctggtctgttgatggttgatacgaagggatggtacggtgacgatgatggatacaagaacggagggtaagtcaaaaagtcgaagattgcaaatcgggttggacgcgtcgcgtattctctccgtcctcagagccgcttctcgttctgtcctcgtccattctccttcttcgttttctttcggcttttcgaaagaagagtaagaacgatgaactcaaaaatcgcacgttcatatgtgtgtgtgtgtgactccaatgtgctgatagtgcagacaaatccatataaatagtaggtagatgatgagagattatcatgtaaggtgtaattttttctgtgtttttgtatagtactatttattctaagatcaaaaagcgtagacacaccaagattgatggaaagaattaaaaatgattaaggccctcatatcaaaagagagatgtcgaagagcacagagaaaagaatagaaggatgtacatatacgagcaaagcatcgtatcaggctcaagccttcaaatcgcttccgtctccaccacaacagaacgagaacaagcctttcttcttttgctgctgcttcttaagcgctgccttctcgtccgttcccggtgtggtcttgataacagcggcctggacaggaccatctccggaggtaaccgtggtggttccctttggatcggaagtcgacggtttgtgctcgttcacgtccgagatcgtcatcggcttgacgtcgtcgacaggatttccgttcgcgccatcacccgaggtggccagtgtagtgccttcggggtggggctcggaaccgaggctgctcgtgtgagggtgagaatcgatggcggcagtggcaggcgtagcctcggtgacaacggtcgcggaagaagccagggcactatcgatcacaggaacaggcgagctctccacagcagcaaccggctcggaggtcgtcaccgtagatggtacatcgtaacctgtcagacataacgagattgtaagaacatgacgcgttaggttcacagagcagaccaggaagccgatttgatggataatatgatattgatattaccctcgacagccaaagtcttctctgcagcgggagttccgatgggagctccgaggttcaaagcggcaagatcgctgctcgcgacgacaggtccgttgacgtcggggtgagaattgttgacactggggtgagagttatgggcatcggcaagaacggcctctctaatgaacagagacacaaacattggtttgagtctttgatcagcttggtttgaagagagtagcgaaacaaatgacctacgtggcgtgctttcccttcaagtaagtgccaatgagcttttttttatcgtacagaaacagtcgtacatatgatagatcccgtcgagaggtcaacatctaccccgtcttactgtctgctagaaagaagaaagcaggcttacgttggcaaagaaaactccttggtactgtgcaaccaacttgtcctcctccagaacaggaagctgcccctgtcctccgacaacggaacctgcaccccaggcagaaccgccaacgaccttgtcagtcaagctaagctcaggtcggacgaagccgatggggacgtagatgattccgtctatatagataaacgtaagaagaacttggcgcgtgagtcccactatgatgtcaagtctgatgggtgaagatggacaaacggtgagcgaagaaagggagagtagtgagggcagtagtctcttgccctccgtgttgagatccctgagagaaggtagaattgtgaaaggaatgagtgcgtcagattagaacaagaagcgatcaagaaagtatttgaccacggaagtgagaggagccaccaaagcacttacagaggaggtcactacaccagcgaactttccgacaagagcgcctgaggcccagagaccacccgtagcatcaaagaaggcagatacttgggcaggagctcgaccctgttttgttatttgcacatcaagagtgtattcgtggatgcgaacaaatcaattatccgtcttcctcggagaagataggaagcagcaaagcgacatacgtaacgggttccaaagcaaaagatgaagccgtccaaagtagtaagatcctggggcgcgatttcaggccagtcaggcttggggccggcgtctatgaatgacagaacatcagaaataacggaggacgtgtaagcggtggattgtttaactaaggcagcgtagctaataacatagatatcggaggcggtttcgttaaggaagaagatgaagagacacgcgtacacatctttgtcagaacctctgcgggaagggtctccttgatctggtacagcaccgcctccgctccggtcttctcgataccggccacgacagattcagccagcgtgttttggtgaccccaggtagagtatctgttatgaatacacatgagccagtcgcgtcatgacaaacacacggacttgagcgatcagtaagcgcgttcatcatcataatctcggatggatgggaaagagccaaagaggcgggcagccgctcgtatagatgaatggatggatggatggctacatacacaattactagatataagttatgccaaagttgttttatccgcagagaagagaaacagatcgaagaacacgctgtctagttagtacatgaatgccatccgacggaagatataagaaggatggctctcttcacctccgattcgagcgcgagtggtagacatgatgtttttcgttttgatctttgtttgtgagagatgcgagagcggcttggtaccagcagagtactgtatggatggagtaaaggatggatagaatacgtttaactggatggatgttgactgaacaaaaacaagaaggaagtaaaattgaaaattgagacgatgaaaaatgtttcacttcgtcacctcatatgttttttcccacgctcttgctctctttcgttctaaagatgcttcatagaataacatagacgccacagatgacatgtaatgattacacatggtatgaggataggaacagaaacgtagaacgaaggctctgatgactatagaggtagggaacacaagacaaagtcgacgctaccttccagctcaaagcggtaagtgattaaagaagaggaaagttacaaacagagagaattcacttgattgccttccttatagcctttacatgacaacgtcctcctgagagcgatcccgctcctcatcttcttcatctttgccgttatcttcctcttcttctccttcgtcatcgctatcgtcgtcgctatcaccatctccggcttcctcatcactcgacccgaaagagagctgaataaagtcatcctggtcgatcaacgcattcggattcgaagcatccctcgatgagttctctaaactacgagagcccaacgatctatccccgttcactgtcgctctggcatctacgtagatcgccggatgatcctgctcaatcgatttaccgccagacgtttcctcttcggtagagttcgctgtcttcgcctctgtcgccgccaatggtggccgaccggcctcggcgcgaaggacatgcttcagtccacactttccgtccatcttacacgttcctttttctgagaactccttgcattctagcgcatgtctctccgaacaggtcaaccctcggtcacaccatccgtatttgataaagtctccacagatcggagccgtgtccgagactcgaatatgaggatacaaacagctttcgccattccggcaagatccagtcgtctggaagtgaacgcaggacggcgtgttgtttgccgttggctggtgagagagcggacacgatgtggcagagtggttgcagtttcctcgaaggaatcgaggacatatcgatagtttttcaggatcgtgaatgtaagggcacgagagtgcgttgttacagcgacctatacgaacaggactttgttcagcaagttccttacctcttcggcattgtgatcgggtcaaacagaaaagatgaatcgtagtgcaagacaaaccagtctttgaaaagtatcgacacaacgaagtcttctttttcttctttttaggtagagaacccgtgctccgtttattattcctagagatgccatgatagcagcagaggtggggacggcgatgacgacgatgataatgagaagaatagatcaagacgtgtcgtgtacgacaaaggtgaagatgaacaaacgaacctagcagtttgaacgccattgagcaccaacgtcatctggcctaatctttcccgcttcgcatcaagctccgctctcgaaggtgccacaccgatgtatgcatttgaggagccagtcgtgggcctagatagcctagctttctcactgtcagtcattacaaagaaaacgggacaaaggccgaatgtttttgaggtcccattttgtcaaacaagcgggagaaaggaaccatatacatatgaatcactcacctcttttggaaagtagcaggattcataagcgacatgtgtctatctgtcttcttgacccactgagacgacgtgggatcgacagatgaactctcagcagcaccagtcatatcagcaccagtactgcttaaggccaccaccgttgtctttgtcgacgacgacgatcctgacgacgagcccacagagctaggatcaacagacgaaacgcgtcctgccgatgaaggattcgtcagtacgagtttcttatttctagatcccccgcctgcctgtcttggcacggtagttcgataaggatgtggtttagtagacacataagctgggggaggattaggtcgacctgctggtgtggctttgtggttgtatatagcctctgttgaatacaagggacataagtgcagagaacgaacgatgcaagaagatcagtggtgggaaaaggggactattggagggagcagtacggggagatacacacatactgtcgagtttagcaatctctgctaacagagctgaatcggatgacatgctatgatgaatttggacgctatcctctgtgagtttattcgagcaataaagaaggatgtatgttagaggaacgacaacggtggcagtttgcagtcgtagtcgtctgtaaagaagacaatggtgttcggtatataacagaacacacacatatatgcatattccgatcccgatatcctatggtatccttgcttgcttccattgattacatgtgtgaataggtttatggatagatggtttaagatctaatgtaggtggttctttgctcgttcctatgcttgctaatgttgtttgactctgtactttctcattttgctctgacaaatctcttgacaaacgacaccatcctcctcatctacagtgactatgtctcagtgattgcttgtgtacatgtcttcgaacgttttttgtgtcgtcatagaagagtcccataaagcatacagattgaaccgagacacatggtctgcggtacatcgatccaacccgaccagtccgtttttgagaaagccgtttacttcttcttggcgggctgtagaagagaaaaaaaacaaagagaaatcccgatatcatcagattccagtctgctgccgagacaaccgatagaaaaagaaggaaaagaggacaaacatctccggccttggtcttcttgactcctcgaaccttcttggacctgttcttcctctcctttcggagctttcgggaagccttctcgaccttggtggcgagtccagactaaagagaaaaagatgacaaccaccaagcattcaggtcagtcgaagctcgatctaatacctagggcagaacgataaaaaaagaaggaagaaaaacttactcggacgagcctgtgtcggggctcgaacttcttctgggaagcctcgtcatcgtagatcaaagcgaacccggtagatcgtcctcctccgaagacggtcttgaagccgaagcagacgactcgggcagcctcggacttgtacatggcggcgagcttctcagagagctcagctcgggacacgttggcccgtccggggtggagaacgtcgaggacgaactgctttcgggcgagcagtcggttggtgatgaactttcgagttcggagggtgatgggggaatccgactggaggtgagagcaacaatgtacacagccgagatgggaaagaacagacaaaccaaacgttagtcttacacgttcgacgacgatctggcagcacataaaacggttgtctcgcccaggataacccttcctctgagagctgatctgtgtgcccaaaactctatccgatcgcccgattgcccaccgtatgctgatcgacttttccaaactttccccacgcccatatatgtacgcccacttatcacagatcgacccaaacccctctgcactttacacttctcgctttccagcttcttttctttctccgtgctctctctctcgcactctcttctgactgatgcttctcttgatcggaaagtaatcccaggggaagggaaaggagaggaatgtggaaagtaaaactgcgaggtgggaagcttgtttgtggaagggtgctggggtttgtcgaccgactctgtatatctagaattcgaaactaaccatgatgggcgacgacgagttctgtcaagatcaaatgaacggcgagttttgagaacaagaatcaggaagagtagatgttccagaaaacagttgtcgtggttgtggtcgaacgagttgtcaaatggagagaaggggaaaagtttcgccgagggacagaagacacaacggcaagaaatggtcggattcggtcggttcaaaatcaaaagaatctctatcagctctcaaaccaacgacggaaacgtctccttcttcatgagatacgtatatgacccatcaaacatacgaaccaacagacctatggcttcacttgaggatgtgcgaagggactcggaaggctcactctctgccgttgaatttttctccagccgttttttttcatttttcacaagggtgggtttatatatgaatctacctaagatacttagacaaatcaaccgtcctgtttttcgaccttccctcaagattcattcatacaacacgattagacaacggtgcaagtgtagatgaatacacaggggtagagaacagtgatataaatgtatgtatatgaagaagcgaaagaacacggtcatgttctatcaatcactccagaggcatgttctccagttcactctcaagctgttcccaaatccctaggatgtcccgtgcgtgggcaacctcgtgggtagccagttgttggaacgctttggtggcgagagcgtgctcccgtgggtacattaggaatgcaagctcgtaccacattctgtgagagaagcaacagacaagtgagcaaagagaagttcagcgagatgaaccatgcgcgtttgtgctaccaaaaagaaaaagaagatagtccgcacatataccgaataaccccttgtctagcattgtgcccctcgatcgcactctcgtcactctcgatgattcctcttagtcggtcgatctctgcctcgaatccaggcttccgagcttgctcggtctgggtcatctttcctttcgtttgttcgatccgctttcgaagtttgggaactgggtcttgagatagttctaggattggagggagtgaagcacactcgatggcatcagtctaggatcggagcactactcgaagcgaagaaacagagaaacgcacgatcaatccgattgaaaagctcgcggaacgagacaaataggtcgcgttggttcttgagagcctcgagcgtagtcaccgacatctctctagactatttcagttcgattggtacagagaattccttgttaagtatctcgcgaacaagtttgcaggagagagacagaagaaagaacataccctgacatccgctcgaccggctagtagaccccaagcgtcccttcccttggccaagccggttgcgacaccctcacccaataaatcaacctcccccggctcgacgctccatcgctgactgtgctcctcgcccacaggtgtcgccgactctccggtcttccaagagactccagcagcctcggatgcactcgctagagctgatgagaatcgggagagatccgaggcgagcgcttcggctcgacgggcctgtcggtcgtacagtgtcgtcagagtcgaccaggattgaatcttggccggtagatgacgtcgagtgattctatcgaattttgaaaacaagtaaatcagtcatgtctggtccttctttatatcatggtagatcttaaacagcgacccaggcagatgaaatattgagataccaacctaagtttttcttcgagatcgtgtgggatctcgatctcttctcgctcggtaagctttcggcctttgctttcttcgtcaacgttcacttgggttttctacgttatacatatccgattgtgtgagcacggctctatcgagatcgctcagactctttaggaaacataagaaagagggacaactgaccttcctccaagtatccagtttaggttctcgcatgaatacaccaacgagccagtcagaaccaaccgtcggatggttgacaacaaaattgatgtaccttgagagcgccttgcgtctctgctcaaggaatatggagtcggctagaagagaggagagagaggtttaacagatcaagtcggctatttctcggaatacaatgaggaagagagtgatgacatgatagacatacctccaattcgtttgggaggcagattgaagtgcatccggaaaggatactgtcgagtggcggtttccgtgatcaactcagcgctgcgttcaatgaataatattccaagaggaaaggtcttacctttttgatgagacattcttctaaccacagaaaatccgaatatcgccttctgacgacgataccatcaaacgagagttcaaacacattccacttccagaaaaaccctctaccttccttctcggtcgccagccgaacgtcgacttgtttgagcttgtcgaaccagtcagggatggcgaggagacctttacgttgcagagggttctgtcctctaacagagggcgtactgagaaaagaggatggataggttggtccaagagacgatggggaatcgattgtggtcgggattggcatggacgaccatgggtcaagtgaggaaggtgcaggcgtagggtactcttccggagctgggcgatcgaccgggttcgatatcgaagacgtgggctttggagtcggaggagacaaagagagagatagggtaggcggattggaccttcgggactttgcgttagacagagagagggctgttttatacgatcgaaaaggaggtcgttcggacgagaccaatttgaaaggagttcagaaggaattgggaatcggaagacgtggcaagatgagaaagaggtaaagagagacgcgtacgttctttcgcctggactagaccgacgaggacaagtgcgagaaagaactcttgtttagatattcgagacttgttggttgatataagatctgtgatctggtgtttgggtaaagacagacgcttagttgatagatcgatggactagcgggagggaaagaagacagaagactagaggcagactcaacgaagatagacagaccttctcgacatcagctcctctgaggccagcttctcggagaactctgatgaggccagtaactgtgactccttctctgcccttaccttccggatcgatccagtcgagcgcgtcgaaatactcccttccgagtcgagcctcgtcgaccaactcaccttcggcgggttcacccgacggttgaaatgacgtaggatatccgtctgaggatgaagtcaagtgattggagggcaagaacgggggttctgaaggagacggagcagtcgaccatggagacggttccggatcagagtgaaacgccaacgggttccatgtttgatagagaggaccgttcgaaggcgattggccgggtgaaggcaacacaagggatgacgacggacgctgacggggagcgttaaacctggagagaaagttgacagaacatccaaagtcaaccacagtacatctctggttcatccagtgatagtatatacgacacttgcatgttctgattcagagacaaagctatttcttgacgatggggttgaagactacgagatcaccactgttaacgcgaggaacatcgacgagatggaaaggaggtgacggagctgatggaagtgttagggttgaaatcgatgactaagccgttctcagcttagtcatctcccatcgcctccttctatcgtttggtacctccatctcttaccatcaccatcatccatcatccatcatccatccatctctatttcgatacgggctacagaaatgaacgttaatttgtcttgtgagtgatgggtcgagatctgctgcagaaaagtcgaattattctgctgatgaatcgattggatcgcctacttggtgatctagcgcgctcccttctggacgcgtacaaccaagtcgtctcgggcgatcccaacacctcatggaccattttgtttgtttccttttttctgtctatcattcttctacttgtatcaaacttatatgtaaatcatctaataaattacctacagtacctatgatcgagggacaaacgacctaaaagtgcaggatagtggctctggtggtttggaagaagtagccgatgagttcagagacggccggttcgttatccatcacatctattcctttccgttgaagtcgatcaagccaggggtgctgaccaaccgaccgtccctctttatccatctcctcaaacagaatccaatatgcctttgttagagtggtcgaccccaactcggagcttccgaaattcgttcagatcgtacgtctctttcttgagtttttctgatgattgaacgcaagcacagcatctcaattggtacctgacatccgacctgcctcatagaactggtgtggtgatggtgtaccagagggaaagaaggggctgtttcataaccactccaacacggtcgctcggttcttgaaagctgctcacattcagatcaatgctcgaaatgaagtaacttcatctatctttgctagccatctgcacgtattcgtcatcctctacgttaactaactctatctaccttcttcacttccctacacagtccgatgttgatccgagtgtcatcctcaagcggctggctgatgctggaggatctaaatactctattcaagaaaagcaagctcctcctcccaagcccgatagaatcggcgccgtcggaagtagctacgtcccaactggaaagattgacatgaaccagctcaaagcagggtccaagtcctcaggagtctcatctaccatcgttgctgctcctactaaaaccccgtattcgtacacgactcccgcgccagctccaaaaccagcttcgtcggccgctcctgtagctccgccgactaaaaccgtcagtgttagtattaacgacgatgaaacttggggtgaagagccgcctgctgctccggctcctcgatcgaacccttcatcctttgcaccatctgttggggaaggagctaagatctctagtccagcagcaactagcttttacaagcctccgccggccaaagctactccggctgttgcttcagctcctacctcggcgtctgctaaacctgaacaggaggacaagattggtccggttgtaagttctgtgctttgtgctgagtcgaaaagccgttgactgagaacaaactcgcttctttttcttcgcgaatcattttgagaaaccaataatcatagggcacagcatacaccccagtttcgctgcctgcccctaaaaagctcatcaatcgatggggagctccagctcagcaagcttcgtctgaatcttcgtcacctactatccaacgagcctccggtgctaatataggaggcgaaaagaagctcacatggagcgaacgacaagcgatagccaaggctcaggatgcggaggatgagaagaagagtcaagcggcttcggcagggtcaaccttcaagcctgttcagtcgttggccaacagcgctcctccatcgaggtttacaccgcctatccgggcctcgcaaccgagtccgcctaaagagaaggacgacgatggattcgaaaacccagagcctgttcctgcgcctgtctctagggcccttcccccccgaatggtgcctagacctacttctgatgatgacgatgatggaggattcgaagaaccggacccgacacctgcgcctgtgtctgctcctgctcttgctcctcggggccttccccctcgaaccactccggcctcctccttcacacctcccgctcctcccagaaccgccttcattgccacgtctgacgataagcaagatggtgatgatgatgatggattcgaagaccctgatccgacgccagctccttccgcccccgctcgaacaactttccagccacctcgggcaaatcaaccaccagcattcccctccgatgatgaatttgcatcagaggacgaggcagataagacgccggcggtcgttcgacccgctgtaaacgattccaaagaagtggaggaaaccagagagccagaaaaggagaaagaggagaaggaagagccaaagtctgtcttccagagcatcaaagagacactcgtgggcaagtctgagccagagtctgaacctgtgccagcaggtactggaggactcagggcaaaggcattgtttgactatgaggccacagaggacaacgagttaggctttaacgaaggcgacgtcttagttgaggtcgatcaggttgatgagggttggtggagtgccaaagggccggatggtcgagttggcctggtatgttcttttttcaagatatccagaacaaggacggtgtggattgacactgatcttacaaaacttctctattctgtgatcgatagttccctgccaactacgtcgagcttattgaagaagaggagcgtgctgccccagtcaaggctgacgcgccagcagagcgagcagttcctgctcctcctctagctcctgaacccaaatctgagcacccagttgaagatcaggctagacaggtcgctgttgcgctctacgagtgcgtgttctctctttttatcttctgaaggtaacagatgttgttgatcaaactgagttttcaaacctcctctgttgataacacagttatgacgcggctgaagagaatgagatcacgttcaaagagggcgaccggttcgtaatcttttcggctctttctctccatttcggcgcttcaacaagcaatgctaatctagctcctggtcgaatgtatatcagaattacgcacatcgatgcggtgtcggatgattggtggagcggtaccgcaccagacgggaccgaggggctttttccttgtacgttctcaacacctcttgttaataaacttatccggtcgcatgaacaacggcttatgtagggtttccctttgatggtcttgaagccaactatgtggaggtacagcagtgatcctctatttcccatgtgtatctctattcggtccctttcttcctatcttccatcttcgtccctcccaggatgatatctcacttcttttcttattgaatatactttacgtaagaacttggctgtcgtaaatagaaaaggatcgtaacagccatttcttctaaaagctctttatccttgtcataaattgaactgggtgattgaatcatttgctatcaccatgccgtgatcagaaaggacagccttacattgatgatacacacaaaccatcagactaacaagacagttgctcatctatcaacacagacgctgttatgaatacatatatatatatcgtttctcatcaatctaacaaatcgaacttgcccaacacatcatcctcctcatcttcgttctttcttgtacgatcatccgggcgaactcccccatccgacgaaggtgtctttgccatacctctgaaaggagtagacgttcgagactgtgatggtgtagtgaacgtatccgaatcatcaggtgtagctgtcagaccgagatgtccgccacctccgttgttgctgttgttgctattatggttattgttattagtaccgatattgttgccattgctaccgctgctaccaataggaggtaatctgaacgacgacggcggtggagaagcaaactgttcttgtatgaatgccggtagcggactgcgaaccgggttaggcgatctacccatcgaaggacttctaatcattctgtttgagccgatgacggtcgagaccgatgaacctgaaggtgaattaatcgagcctggccctccatttccgccgtgatgactacctacactaccactcgtacctccgccagcggtgcctccaccgaaactaccatagtttggcgctcctgggctcctggctctccccttctcttcgccctcttccgccgcatgcgagccggcgctgccgaacccacctcgcatgagaaccagacctcgtttctctttccctttgcttcgtccgaatgagtaaggttcagtactcggtctaagaggtggcgtggtaggttcttgactagttgatcgggagggcgcgttcaagataggaactgcctgactcggttgagagcgtgggaaagtttcgtttggttctgactgaatcgggtccacctggggtggtgaaggaaggcgagatgagattagaggtgagtgtcgtcggggagagaatgagttaattgtaggtggtgcaatgtgattggggggcatcgaaccaggagacatcggaacgaacagggatgtggccgacatctggcgactagtcggggagctcgagagactgatagatggacctggagacatcgcaccactattactattgttgctgtcactactgttgttattgttaagagtaagagaggtcccggtatagctatcgcccatccgtttaagcatctccgatagctgggactttgtcggcctagcttgagtgagcccaggagcggcggaacttgtgcccgagggcccaaatgtagacgatgaagatgaggaagggtatagagagggcgatcgagaaatgaacgcagatgatccgagtccgaacggagtatttaatgctggccgagaatcaatcagacggacaaaggcggttatttcgtcgtcttcttctattgaggtggcagcagccgagaggtaactgtgctgtgaaagttagatagatgagtgacagtttgttcacaaggcatgaaaaccaagaaagaatcacattagatttcattaggttcgttgactgattgcctggaacgatcgaaagctatgacgtactcctctggccaagctaccactacctgcgcttcctccagtttttacactgccaaccgagcttccggcagtggtcccaaagcttctccctgctcgatgactaaagctactcgaatacttccttccaatccccagccccgccggcttctccgcctgcgatactccggcggtgccagctccagcttttaccatcgtggggctcatcgatagtgcactgcctcctgaaaacctacctactgacgtcgaaggtgcgggggcgaaattactatgggatgatggagagttggccatgccgggcatatagccggtagagctggatgaaggggcagggacagggatcggggacatggatggatgagtgatgtctcgggagagagagctcggctgagagggttggcgctgaaagacagaagatattggagatccgaaagatgaagaggacaatcggagaggaattggagaggaagacaatgcacccgacttgaaaggcgataccgtcgacaggcggcgtgtgttcagtgatgagggtgaagagctcaactgtagagggagaaaaaaactactgtcaaacaacattcagtggataaactgattaagccaataatactgactttctcctcgtggtgaccactccatcttcgttgcttcacaccaataggcatgactccgctctgaccaccggcaaaacctgttctctgcctttccttttcagcctccagctctgtccgactggtagccaagcgggtttgcccgctctctgctccatctgtagttccagtggcaagagaatctatcatcgcccgactagtcatgcttccaaaccgtggtctgcttgaaagcggaccatggccagttgcaaacccaagacttgggcgtgacggaagggagcctggttggaggggcggagtggaagcaggatagtcggatgatctacgggcgagtgcgatcgttggagtaaagtacgcctcgtctatgtcgtccgaggtggaaaacagaaggcgagaggagacggaagcttctttggaatcgagatagaggttgacgttggatcgatactgagcggtaagcgacagagtactaattaagcgtgttgagagaacagacgttgaaggagtagaagcttcagttcagaaatcaacgggctgagatatttgtaggcgacaacatacccgtatacatgtccgacgctaccgaggttccgtgaaggttagaataagaagcaagctgtcagatttagtacgggtcacgttttcacaagtgtatcggtgctcacccgtcaaactcccatgtctccagcgcaccctccctgacaccttctgcttctattcgctcttcaagcccaaggcatccgtcctctaaaggaccactctgtttaggccctgatcgatggtccatcgagaccttgaccccaattctcagtcctgcgcccgatcgaccacttcttagccgtctggctagcctatgaagaggcatcagtcttagaaatgcgtatagcgatcggaacaatgggatcagtcgtttgtaagtggatgagagggcgaccggtgttgtacccccaccggtcatggacgacgatggtggaagcagcgcaatccgccatctctccaaaacgatgtttctcggtctcccgctcttagggcctactcctgttgtcgacgatgcggatattggtggaggaccatggggaacgacgcctcgatggccgtcggaagattcaagcacgagaacctggtcgtccggaacggcagaggtgtcaaggatgaactctacaacgagcgccggaacgttaccaagcttgacgaccgaagaagagacagaagacgagcccggaggaacaagcgaggcagcagagctgctggcagacgaccgtcttgtatgcgatgttgtatcgctttcgaacgagtcgacaagatgggtgacggatagttgacgataagcgtttagctccgctctaaagtgatcttgggtaggggtatcgaggttgaaccacctgtcctgcttggcggtggagaatgagaatgtgctctgtgatgaagaagaagaagacgaagatatccgagcgttgagcagggtctgaagagactttctgaagaactgatgggcgagctggtctggcttgttctgggcgggtagagtagatggtcggttggccatcgagagacgacgctgcagcagaaagacggacctcccagcgggtgaaatcaatgatcaacgaagagagaaacggacgtgggcgtgagtagtcgaaacgaacgagtcacagatcgaagaaagcgaagaatgagcaagcgagtgagatgtggttgatggttgatgatggttgttggtcgttggttgtcgtggaggacaagcacgagagatgggaatcaggaacgatggatggacagatagtgattagggagaggaattcaactattgggcgtattcaaatatgtcggagtacttagatagaagctgtgtctgcaaccgatcgatcctaccactcctctccagagccgtcatccgttggacatgtatacaacattcatcgaacgtccatctctttcactcttgtgtttaatataggaactctcagtcatggtgatggaaaggaaagtacgatcaggtgagagaatatgcgttgggggtttctttgtgtttctgttcttgtcgtcgttttcgcgtctgttctcggatcaaacactcacctatacccaccgccgtcgtttccatagagcacggcgaacaggttcgctctccatctgtctccctcttggctggttgctcagaagctcaatctgaccggcccttctgctgaaatcttaggcatatcaaatacagaaagatgctggaatcagggtaggatctctttcaaataagtactccttgctggctaaccctatactgaaatcgaacacaacatctcatccggatctgacctaaccagtccatgattacttggaccatcggagccactgtcgctacgatcttggcacataatacctggcccttcttccggtatgtccctgtccttgcgcttcacccttttgcgtccctcttcctcttcatgtctcgagacaccttggctgacgtcattcgcccatctcgctcgtctgactcagcaagcagaccctgccattcaaggcgttcctgatatcttcggcgaccatgtctggtttagttatcggcgcagaaggcaaccttcaggagttcgagaagaaccagaagaagacgtacaatatggaacgacgatgggccaaggttgagcttgccaaagaaggccgtatcgcgacagagtatgagatcgccaggtatgtcatcttgactgacttttgtcgcgctttggaatttttctggcctcggctgatctcgaataccctggcttgaaatcctgctgaattcgatacgtcccctcagatggatcgctgaccacccgccctcgtcatacccctcttggtcatccttgggcgaaggcaagccattcgcgtacaactctccctcgacggatcctacatcgtccacatcgactcctgcttctgcttctgttctcgcctctgcgccgactggttcggtgtcttcagtcccggtgtcagacgctagctcaccgagtgccgactcgtcgagccaggccgaacatcctactatggttgtccggatagagggtgtggaggatccattggagttgagcgccgataaataaaacatcctggatggagaacaagacggcttagaccggaaaagaaaaagaaaaagaaaaggaaaaggcagccatcgttatgtatatatgttaatctagtcaggaacgcaagtacccagagcatatagctttaaataaggtaagttgtctaaggtataattaaatatataatcagcacagctttaccaaatttcgtatggcgtccgacgatcaagtctatcaacttgcttcaccttctctgatcgtacccaccttgcctatccccacccactcacatagacactatgcctccagccaacaaacgaaagaggccaacattgccttcgataaagccttcccgggccgctcggtcccaggaggccagttccaaaaaggcaaagcccgaccacgacgacttctcggaagacccatactccaaaaaaaaaaagtttgaaaaacgttcagattggaaagcgaagaaggctcaggctgctgaagagaaagccggccgagggaaaccaggagcaaagaacggaaaggggcctgccgaaaaaccgacgattcatgacccaaggaagaagaatcgaggggctaaaaagtcgaaaacagaggaggagagtgaggactctggatacgaagaggtcggaggcgcaggttcagacggtagcgaagactacgcgttcagcggtggagaaggtaacgggggaggctacagcgactcatccgacgaagacgaagttgatatcaccgccgctctttcgggtacgatgccttccgcgtccaccaagcgaaccacccggccagctctaccctctcaagagtctaggtattctggtagaaagtcctcttcggcacccaaaggaaacgagccagaggtgggcgacggctcagacggagacgatgacttcattgcagaaatgatggggaagagaaatattgaggatgggaaggctgttgttaaagaaaccgtaggaaagaagggagacaatggaaagaacgccaaagaggccagtggaggtggcagtttccaagcaatgggtacgttacttgtccttctttctgttctcagtcttgcgtttctatcgttccctaacgctaacttgtgtactgtgactttcaggcctgctcccgccgctactcaagatgatcttgaaaaaatacaagacaccaacacccatccaaagactctccatcccttccgctcttgctgctcctcctagagacatcgttgccatgtcccgaacgggatccggaaagacattggcttacatcactccgttgattcagagacttcaaggtcgtcactcgtcttctttcggagcaaaggccattgtgctgtgtccttctcgagagttggccgtgcagatcttgaaagttggaaaggaaatggctcgagggttcaagaatggcgggcgtggtggagacgcaggagatgacgacgacgatgacaggagaagctcggagatcagatggggtttggtcgtaggaggagaaggtcttgacgaacagttcgaaatgattgccagtaaccctgatgtgtgagcttactcgtttcccttaattcttttgtagaaaaacctaccaccgctaatgctctacattttcacggatacgatagcatcatcgccactccaggtcgtcttttgcacttggttgtcgagatgaaccttgatctacgatctgtcgagtacatcgtattcgatgaggctgatcggctcttcgagatgggatttgaactccaactacaagagattctccaccgacttcctacaacccgacagacccttcttttctcggctacgctccctaagaatttggtcgagtttgctaaggccggtcttcaaaatccaaaactcatccgattagatgctgagagcaagatctcggacgaccttcagatgaacttcttctctgtcaaacctagtgagaaagaagcggcgttgctctctttgctccgaaacgtaattggagttcctttgagagatctagacgaagaagtttctgagactgaggacgagggagacgaagaacggagccgtcatggaggaaagagagacttcaaaaagaacaagaagggcggaaagttcaacaaagaaaagatccccaagctcatggcccctcatcagaccctggtctttgccgctaccaagcatcacgtcgactacctttctactatgcttaccgctgccggatacgccgtgtcccacatctatggatccctcgaccagactgctcgtaaacaacagatggatcgtttccgacgaggaaagacttcgatcctggtcgtcactgatgtagcagctcgaggtattgatgtccccgtgttggagaatgtggtgaactatgatttccctaccggagccagagtgttcgtccatcgagtcggtcgtaccgctcgagcgggaaggaaaggttgcgcttattcgtttgtcaccaacaccgagcttccgttcttccttgaccttcagctcttcctcggaaagtcgctcgttaatgcccgagcagccatgcatccaggatacgacaggtcaagttcgatgttccttggtactatccctagagacaccctggacgccgacctggaaaatattgccacctcgttgactcaggaagcttcaagtttgcccatcttgaaagaagtcgtccggaaaggtcaggccatgtatgagaggagtaacggaaaggcctctcaggagagttatcgtcgagcaaaggagatgaccaaggatcctagctggggtctagccgggagtaccggtgaggaagcagccattcaccccacgttctcagagagtgccctcgccaatcttgtcaactcttcctccgcatctgcgcctggaataatgtcctcgagtggaacatcctcaactagcaccccaattgttcctaagcagtccgctgcggaggtcgcagctgctcgggctgctctactcgcttctgtcaactctttccgaccgaatgagacgatctttgagattggtcaccgaggaaagaaccaggcatttaagttgatgcaggatcgacgaaagacattaagcaaggtcgtccgaaagactgagatcgcgaaagccgaggaagatgcagagtacggcggggccgctagcgacgcagatagcggggcggacggtgagggtttggagagagcggaggtcgatatggcggatgaggatgacttggaggtgcgtctctatttctttctttgccctctttcttgtaaactgagaatctgatctctgccgtcgtctttcttttctcttctggatgtacagagcgcgttcggaaccaagaagaagaaggcgaagtcggaaggatacaaggaccctgagttctacatgtcacattatcagagcggagcagagcatgataccaaagggttcgtctttttcttcttcgcatctctttttgacaccctttttattaagattgcggtggaggaagagggtgattacttacggccggcccgatatttattcaacatacacttggctaccaactgcagatactctatgcgggacggagcatccttcattgagcaagccaagggcgcaacgatggatctcgccggtgacgatgggattgtctcccgagtccaacgatcttctcaaatcacctgggaccgaaagaagaagaaattcgtcaaaggagacggagttggttccgacaacaagaagatggtcaagacggagtctggtgcccgactacctgccactttcagatctggtcgattcgatgaatggaaggcaaagaacaagacctcacttcctcggattggagaggccgaacctgaaacttcttcttatgggaaccgagcattcaaccaaacgggaagtgacggtcgaaggtttaggcacaacaagttcaccgaggcaaaacctctggacaagacgtctacttcttacgagcgaaagatgcgggttatcgaaggaaagaaacgggcagaggcagaagggaaggaggtcaaatccggaaaggggcgaggtgttggtggacgaggtggaaggggtgctgcagccgtcaagagcgagatcaagagtgttcacgagatcaagaagcagcgagatgctctcgccaaggtacgccctctttactacgttccaatcttcaatgaccgaagctccatgaagttctgtgctcatcttctctatgcgtcggtgtggaacatcatacttgcagcgaaaagagaaaaacgctcgaccatcaaagaaaggcggaaaaggcaaaggaagaggaagaggctagtcgaccaagatccctcacgaaatttggttgcgatagaatgtcttgttttcccgcaaaacttatcagtgctgaagataaggcaaaattccatggagataattacagagacagaaaaggaagaattttatttgataagatcgcgagaataatcattctcagtaccactgagcttttagtttcttccttgcaaccgtaggctatgatattcatcaaaaggaggggtcagtgaacccatgagacctgtcgataagcgaaaagaggaatattaacatacctttgcaacgaaaattccgacggacaagcccaagatggtcagaaccaactgaagcttgttgaatgaatctggcaaaagatcgaatcctccagacggctggacttttgtgagtgccagatccaaggtaccgactgcaagaatctgtgaagtcgactctagaagagtagggatagccaagattcgatcaaccccaagaatctggtacatcataaggaggttgtattgtcaggatatagaagctcgtgatcgaagtgacgaagaacgaagaacttgcatcagagtctttagagagagcctttgagtcatcaagcgggataacagggaagtatggcactaagccctcttcctttttctcgttctctgttggtcttcgagcgtctaggaatctttgcgagatagccatgatctggttcttctcggtgtagactgacagaatcattcccagaaaggcgcgtacacgccagtcagcgagatgcatagggtataacgacggctagagtggatgataaaaatttaccgagtacatcgcgagcggtaattccaaacttggttcgcgagaaggatagagccttgacgcccacaggaagatggtacgtcctcgagatcaaatcgaaatcgtgatcagcagagtaggacgacaactcagagctagatcagatatgaatcatacatccgaattaaaacatctcagctttgtttttggttgccatgaatcaagaaccacgagcgtctacttacctgccaagctttccgcctcgcgccaaattcctctcgtaaagctctacgctgacaatcctgtaaccgggcgtgttgtaagtctccgaaacgctctgcttgaacgagtacaccaaccagttctcattcagaatgatttgaatctctttcgaagtgtcgacattatcatgggcgagtcgctcaaggataactcctcgaacggagtcaacaagatagatggttgcttgtgatttagaaggttgagtggacactacagcgagtaaatgcgggttcaaatctgtatacatcccgttccaacatgcgtaacatactcacactctcagttagcttgtaattcgatgaaataataagtggaaagggtctataaacatacacttgtacagcaactttttgttggcagtcacctttccgtaactggcaacgagagatctcccacccaaactgtcagcaccggcgctaacaacgtgctcgatttgctcgtcttttccaacactcaatctccaggcttccaatgcggcggaagagtcggcgacttctaaaccttgaagtgaaccgttagaggtcactttggtgagatgaatagattcatgtgaaaccgagccagtaggagggaacgtgtgtgcctatgagatttccgatcgagaaaacaagtggaaagcatcaagtttgtgctgatgattatgagaacagatgggtaacgtaccttgaattcattatcgaacacgatcacaggtttggtaccctctatatcggcatcctggctgtcactaatagaatcaagtaaaatcccttgactgaagcctttaaacaactccttgggaccgtttccaactaaagatccatccaagccattgagctcgatcgcataagtggaaaccgactttttggagaagagcaacaaaggtgatatatcacttgtcaatctccagatcacaaggagacaagctatagggaaaaaaagcttaccccatcagaaattcctctgaacacaacacccactttcccagctccacttgcccaaactttcaatacggcccacccaacagcccattcggtactgagccgcttaccccaaacaatacttccgtctatagagtctagtgcaaagaccttcccataaggcgaaccaacgagaatcaactttcgaaagttgaatggatcctgagcgagaagtgacagagcggaggacgaagcggacgaagatgaagagggcaagagcgcaacgggtatctttaagagataagagggcaagtacttctgtttgatttcagcaacgatggtcgatcagtctcgatgcaacggaatgacaagattcacaatcagagaaagcaaacacataccaagctctcatgtaaatgcctagcgacacgctcggtccagccctcttcttcgattcggctcaaaacagaaatgacccctactttttcctccactaaatccaatacactgacgtctcctccgctgagaccttcttccctcaaccctgtggcaagacccgcggagtcaaagaaatggatcgaaccggtctcagtagtgattgctagctcgtttttggaagacttggtgacctgtggtttcatgaaaggagagacatatttgatcaactaagaaggtcagatattcggtagataaggggaagatatgacttacggaagtgatagctccatagagctgttcatcatagacaatcctgaagtgtttgttcttagacaggtcagatgggctagagaatattttaacctgaggataaccacgcacggaacatagaatgaaaaagtcagcgataccggaaatgagaaacgccaggacaagcgaaacatacatacctgaagggtcgactcggaatccaagggcgtaatgtgtatgatttcgccggtctcgtatgtggtcaaggctgaagttttttcagaggaagtctgacccaggttgaaaaggacaaaatgttctcgatcaacttttgaacacacacacatacacacagcatggagcaagcgaggagcacgcgcagatagacatgaaagataattgacgataacttacagtcaagcttgcgatgggaacccctttgaagccacccttagtcgccgtgaggcttatcatgtaccattcatctttgttcgatttcgccatcacagcagcgccaggaacatgtttcaactcgacaaggcactcatccatcttcacccgcccctccgcgccggagacgagatcaaggtagtacagacctccctcatgaacatacaagaggacatgagggagtgcattcacaagagatgaaagggcgatacttgcaggaagggaaaacgttcgagagggctgagagttcgactccaaatccgataacggataagcagttaatttcggaacaacagaagagggctgtatgagaaggtagccagggataagggtgtttggagctcttgaaagaccaaagttgaaggcggtaaaattcccaagcccgaaatatcagtttgcgcttcattcttttctttgcaggattgaagaaaccccaagaatgaagaacatcaaaaaggggacaaacgatcggttgtcatcatccgatacggtccgttcccagacgatgtctccgctatctaacgtcagaccaacgagtcttccggcttgagcaagaatcaactgtttccctacagaaatatctcccacgggctcgttctcgaaacagttgggaactgaagtctcccatctgaccagaccagatgaagccgagaaggagcggatgatcgtttgggtacgcgtggtcgttctaaggatgatgtctgatttttgagagcacggtcagcatcctactcgcctaccagagaaagacaagaagaaaggtattactggaatcagcgacatggtagctttgaatggtctcgactgaggcaagctgatgtctccagtctgtccgacgtaagggggcgaaaggaaagccagtttgtcagtgccacccgtccatatctttgaagcaaagctcacgagaacaaaggagaagtaaagagtgaaagcagaagaacagaatatacactcacaaacatcttctccgtcaagagatacagaagccaacaccccgctctccgtggtgatcgcaagtgcttccaacgaggtcgctgccgacttattcaagggaaagatcaaaggtcggacattgtcaccgtgggtgagtggtttcccgagctgagtacgatgccattggaaaggtatttgatcggccgcaagacacgtggtcgacagcagcgatgccagagagaggaacgagaagaatctcatcctactcgaatgagaaaagggagtgttggtcaaagagcgtgagtgtatgtgtgcgtgtgttctggagatggataggattgatggcaagctgggtgtggttgaaatctgcttatgtaatctgagagtcacgtgttttccctcagaaatgtccactctctatgtctcctactgttcacatacgcacttgttaggcagaaggacacatccggacgatgagaaggagaagctggggtgatgaaaggaagaatctaatctggacaagaattacatgggaaatatatctttttttctttctctctaagccttaacagagaccttgtccgaatctgctccctcctcccaagcgttcacctcgagacttccatcgtgaacgatgacctcgacgagcaccttggcatcctttgaagccttgactccaaccttgacggcggctaggaacgtcttgggagacctgacaaccgaggcgacctcttccggctcttcctcctccgaatcagagtcgtcctcatctcgcgggggaggagcgatggtatcaatcttgatcgactctgcaccttcccagacctcgacgccaacctggttgacaccagcgctgacaggaagggcgacgactcgtcgagcgggcaacggggtgtcggcaggaacgaccacgtggaactcatccgatccgggaaggacgaaaccgatgggctgggaagtcgacgggatctcggatgtcagggcagcaaagaggtcatcctgagagatcgcaccagtgctagaggtcgagagctgggcgaggtggagggcctgaagggcacaaccgatggcgatagcctgggatggatcgagaaccgaggtaatggcggtctcttcggggaagatcaaagagattccagaagccaagccggggagcaacgaagacgatccagcgaggagaacctgaacgagagaaaaagataaaggaaaggagggagcgagaacgcgttgtatgatattagccgatagacaaacaaaggggaagacaaacgctgaaacatacctcatcgacctggaccaaattcttgccgcaaccttcgacaacactcctgatcttctcggcaatctttcggtagacacctccagcaagaccatcgaatcgcaatcggttgatgctcgcgctcaagtccatgccatccttaagagactcgactgcgcaagtggcagctccggtagaagcagagagcgatcgcttggtgtgttcgatagcgaggaggagcttggtctgggctcggagatcagcctggttgacgttggcgccggccggggagataggaagggggagggcaaccttggtcttcttggtgaactctttggcaaagtgggagatgagctatgaagacagcgggccggaggaagggcgtgtgagaattcatactcgaaccaaaagacaagactaccatgaagcactctacaatcacttaccaccttgttgagctctcggccaccaacggtctcatctcgccctccaccgagatgaacgtactgaccctgtcggacggcaaccatctcgacctcaactccagtatctccgacgtcgacaacgacgacgaccttgtcggccttctcctcatcctggccgttaggtgcgaaacctcgttcgagcctctcggcgggaagaccagctcggtaaccgacgaggacagcagcactctcgtcaatgatctggagaacgttgatgccggcagccttggcggcctcggcaagagcctctcgctgaacggaggtgaaggacgaaggggcggcgatgacacaaccgtccttgggggaagttccgaggaaatcggtagcggactggagaagagtcttgagatacagagtagtcacctcggggacagataagacaagctcctggggagtgggctcggcgttggcaggagtggccgtgccggagggcgcgggagtgtttcgggcagacttctttccgacaggggtagcgctaggaggagggacaaggatgtcaaccttgtatccagggatgtcatcttcagtggagatcacgggagcggatgcagtcaaggtctcaggagcagaggaaccaatctgggagaacctgttgggtaacagtgataacaattatgatgaaaggaagggaagaaaaagtaaaagagagttcaggctggagtccacagtgaagagggataaattcggcaaggcgacatacttcttgcccaaaaggtttcggaatccggtgatagtgttctgggagttcttgacaagctggggcttggcaccgtttccaatgtactaaatagaattgaagacgcaagcgaaggacaagagggaagggagtgagttgatcggagggagtgaagttaggtagatggacaggtgtttagagactagtgatggaaacagatgggacgtacgacctgctctccgttgtaagagatggcacaggcaatctgtcgctctccgtcttcgttagcgatacagtcggcgtgtccttcctctgtgaatgtaaaatgatgggtttaaagggggaaagaagagaaaggcgtgagcatgagttatcgacgtggctcaaaagagacgacgtatgtgagaacgtgtataggcgaatagtacgggacaggaaattggaagaaaaaaaggaaactccaagatctgaacttactaccaatgacggcgatggatccaaaggaggaaccaaagttgataccaagaacggcaggagcagtggaggacatgatgagttgtaagaaacaagagtggaggtttgatggaaggagagcagaagagaaggaggaaaagaaaaaaaatgtgagtaaagtaaaataagataaaatatgtttattacgtaagctagacgtggtagtcttccaccaacatatccacccccattagcgatccttgtgatcaggttcgacataggaccgagagagaaggttgttaccggtagctgttcatctgttgtttcatacatgctcgttctcttttttttgggggggagggg

SEQ ID NO: 907 - DNA, 11119 bp, Xanthophyllomyces dendrorhous
aaagtgcaatgtaagaggaggaaaaacaagggaaggagagcatcagatcatgtcgagttcaatcgcaagacctatcctgaattctgatactgtctgttcaatctcgcctgccaaccgttgtctcttgtaatgtcgaacgaatggtctacactggcttctgaactcatttatatataggtacatattaattgcatcttctctcggtctggaggatgtctatcaacgatgctggtcttctcatgctggtgcgccatccttctagatctccctccaagatgaattcattgtaccctcgacacaatttaatctgattccacaaagccaacggcctcggtgagatccgtttatgttgttagacaagtttattcatctccaacgagcactccatccatcatgaatgtcctcatcgctgctcaagtaggaagcgatgttttggagagaaatatgaaataaccctaaccgagtgtaaacatggttacaacatcggctacagccctggtttcacaaggcctggacctcggtgactgcctgcgtaaccgacttccccgcacgcgcctctcttttttttattcctttcttctgttcctgttcctgttcctgttcctagtgttgtttatcttttctttcttcatctatcaactcgtcccactcacattcgccatacccacactcattcaatctcatacacactcagcatgatcgctcttaccctcgctaccgctctccttgccggctcccagctcgccagtgccatcgccgttcccacttaccctgattcaaccgctgtcgttaagatcggagacgagctcaccactctctggacggccgacaccactggcgaatggaccgacatgactatccaggtaggttctgtatctgttctcctgtgtgatatctcttgacatccctgctgatgtttctctctttgaacccactccagctcatgagtgtgtaattttcctctccttctcttccccggcctctgttgttattttcggcgactgatcgtccacctctctctttttcctctctcttgtcttcagccggatctaatttggccgtaagtcaccaatcctcgtgctcacaaaacgttagctaacagtctgacaatataatcatattggaccttttcaatcattctgtgatgtcctgctctctagatggtcgccctcaccagttcgttcattcgttcatttattcatttatccattcgttcatcgtccaaccgggttaatcaccacatccgcctcacctgctgacgtcccgactcaatcccttctcgttctagccgttggaacaaacattgatgccaccacctctaccaactacaccttcaccattcctgacgtaactcctacctctgccatctacttccttcagtaagctcatatcctctcgtctctccgccgtctgtcatctcggcaatgtccgtggctgatcataataaacataacatccccatttcctcattccagatacactgctaccaacatgaacgcgagtgatactcagtggaccacccgatgggccgtaaatcctcagtttcttttctttttaaaacatcatcagctctccctcaaagtctacgcgacactgacttcttgcttctgactacttcctatctactctctagattgctggtaccgatggctctactaccactcctgaatactcaacccaaccctcgggcgatgctattgcttggggtaaggttctccatgctttaaattattcgtgaagtgcctcaagctgatccatactaagatccatcatgaacaaacacaggtcttggagccctcgtcaacggtaccacctcgaccacttccaactcgaccacctcgacctcctcttctgacgtcttagccacaagctctgcttccgcttcagccgctgcctcgactgcgtccaagtcggcatcttccatggtgtctgttgctgcgtcttcgaccgcatctgctgcgtccagtgctaccaagtcctcctccgccgctgcttcctctgctacttcctctatcagtggtgcctctgagcgagttgttggtgccagtctaggagccgtcctcgttggtgctttagttgcccttgtcatgtaaaaacaaagaaaagaaagaaacacagattatccaaaatcaagattttctctgaataaaaagacctgcagtctgcgcttgcaattctttatttatttttatagttatctcgataccccaattattcacctggcccatcatccataacagataccacactctttcttctctcttctttttctttcctcatctccttatttccttctcactttcccgcactaggagtgccggtggactttccatatacatctatcacatttgcctgataagtcctttgaacgaacctcgttctgttgtgtttattgccatgtacgtttctgcgctcttgtgagtgtggcgagtggataggcaagcggagcacagctttcgattcacctctcttccttctccatctcgcttgtcgtagttctctcaactttcacactccttggccttgaccatggcgatagacaacacatcagcattccgaaagttatactctgaacgcgtctcatccatcacgactgatgagcctgatcgttcgtcggcttcctcctcaaagacaggtctccgccgaggtcaaaatcagcgtcagggtcgaggaggaagcgttgatacggatgatgggaaggatgagtttcttgcagaggcttaccgaatcgtgagtcgatttgatccttttcttcttttccccttttgattcgattcgccttgattttgtgtactggtatagtgcgttgcaaaaaagtacggaatctgatcaagtgcttgtatattgaacgtactgtgtcaagcatcaccaccttcaagggctcttgacgagtctatcagctatcaaaagacagtacctctctatcagctcttcctcatcaaacccaatggcatccagtggactcaaagggaaatcaagagagaacgtctcaaattcgacaaaaatatttggggagaccgagagagaagaatttgatcttcaggcaaagatcttgttgaagagatgtctggaacgggtcttaagtttggaaaaagccgaagaacagaccggaggtttgttcaagaaaggaaaatcgagagagtttggttcgtctcttctttctctcttcgatgtcactgttcccagagattgtgctactaatgctaacgcattccaacccactgtagatctggatgaggttcctacatcgactcgattactctctctcatcctcccaccttcgatggtgcccaacatgacatcatccagcagctccttcaaaatacttatcgcagcacaccactcatccatcctattttacctccatgcttctctctctaaagccggtcaagcgctttcggatttgcaagaagagcgcgtgaggaggttgacagaggctgagagtcggtcacttggtggtgggcttagtatcctccgagaccagtacaagtcgtcttctaatccagacgcagataagaccggagaaaacagttcaacgacgacgacgaagatgatggcggggctgggtatcccagaagcaccggttgtgaagagagaaggagagagcgaactgacaagagaacagatccagttgtttgagagtgagaacgaacaaatgatgaagacttacgattcccatctggaggaggtgcgccgcttttcctccttctcccacatatttctctgatgtcttcccgtacttgacgctccggttccctcctcctcctcctcctcttcttcttcttcgctttgccaatccagatccaaaagactcaaaagacattgtcccagatatcaaccctccaatcgctcctctctcaatccctgatgcaacaagccgaaacgtctgatcgtctcctactcgaagcaggtcaaaccgtgtccgatgtcaaagcgggtaacgaacaacttcggaaggctcaggagcgaagcggatcgggtaggatcatgttgctcaccttcctcatcggtgccagcttggctctacttttcttggattggtactcatagtcgtgggaaacggaggagagggtcatatttgaattcatctttgtagaccttatgtaaagattattataaggaaagactgattagataacggtggggtatagaagaacacctttttgtctctctgcctgatgattcctttgtctgttcatgtctttggctataaactgcaggatgatcactggtgatcttcacggggtcattcatgatgaatggtggtcagtcgaacccatcaaaggcgaattttgtaaagaaagaggcatcgatctcatcggcttataagatacaaagaggtcgaggtgttgaggacagtctgccgcgttggaacactccccttactccacctgcgttcacatcagtctccctctctcttgtcgcctttcaatctttctgatggcacaaaaccaaatcaagcgatcggttaaggtggaaaacaaggagctgtcgatcccctccggtcgtacagacgatgtcaaggctgaattacccgactcgccagagctaggccaggaacttttgatcaaacccgatttggccgaattatccaattcatccatatcgacatcggatcggagtctcaaaagggaagacagaaatcatatagacccagaagtggacatcaaggaaaggctgaatagtgatgaacagatgtctgatttgatccaaagcgatgataccaaagtcaagagtgagaggaaggtgaaggtcaaagtcaaggaagtaaaggaggacgggggtatcagcatggaagaatcaaattacgaacagacgttcgatagagtcgctcctgaaggctattcattcgtacttgctggatcaccttatatgtctgtattctttggttttttttcgttcctcgattgaaggaggatgctgatttctattgtgtgttcccttcctatggatgtcctgtagaacacgtcattgtaaagaaattacgcttgcagaaggtctcaaagtctgggaagtcctggtaagtaaagccttccgtcttggaatgacacgctacctattcatccgaccactcctcttgtcgattgacggtcatcgggctgggttggactgggatcaggagtggcaaagaaagacagtcagaggggtcgccataggaccccaaaggatcggactacacgttccgactacaatccgcgaccatgtaggatctcttcttattctaattctcttcatcaaatccagatacttattctgattttcatgtcactaggttcgagtgatgtctgcacaaaggaacgagaaaattgcggcgagcgcaagttcattcgccacaatctatgatgcttttcatcttttcatcgaatccactcactgtcttactttaccattctgtatcttatacagaccgcgaggagtagagagactctccaatccaaggcacgcgcattgattgcacaactttaccctcgtttaccgatcgatcgactggaatcagttcgagagtttgtctacgctgggtttagggcaaagcctgctggaggatttcataaaatgtcggtctaggtctttctttgctgttgacttgtgctatcgctagcatcgagaccaagggctcttgaatttgaacactaatacttgaagatgatcatgctggacgataagattcccgggttcgatgtggaatttggttgatggtcgagtcaagtactactgtacgtccattactggctttactccatagcctctcacccctcacgatcgattcttttgtttctctcgtgtgttgcaccgaatagttcaatcagagaacgtcactccacctggccaaatctctcaacctgtcatcctcgaatggcaacccttagaaggacccctctcaaaccctcatcctctttctgagtctccgccagttgatgatctcgttatcgattccctgccaactccttcacctcccgcttttaggcgcaggacaccagctagacctgataggaaactaaaaaagaagaagacaaagacaaagggaaagggaaaggcaaagcaatctgctcttaggccacttgctagacttaagagagaatttgtcgcttctcttcctgatcaggagacgaagaaggccgcggcggcagcggcgtcgaagaggaagctggcgccatcaggggcggcaaagagtgaagagcgaacgggggcaaaacgagaacctgatattcagcttaaactcgaaccggatgtcaaaccgaagatcgagcacgacgtcaagatggaatccaaacctaaacttgaagagaaggccaccagcaccaataccatcaaatcatcaagtgagagcccccggaagaaacctcgtctggttgtcgcaaaaaccaaaccgcgcgagttcaaagaggagatggtcgacatcaagccgattctttcctcctcatcaagcggaagtggaaaagaaagaagaacaagcgctcgtctgtctgggcgtgtgcctggcgtcatttagaacagcttgctgcttagtctcgcctcacggacaaagtccatcttgattgatcgggatccttctttcttgggaggagcttgcttacatctttccattcatactttgtattctgtcgtttctccaacttgtatgcttgctcaagttcatacatttgaactggtcgtactctgtactttgtttaaatatgtaaacaccatctgaagatatccaaatgaaaatggggtggtggggtggggattacaagcaagatatcagaagagcaacaagaatggagaaggtacaagatggtcctgaaaaggatgagatgaaagatgctttgtctttttgcttcctggtcgttcgattcattatcccgtctatcatgacttggagagctaagaaggaaggggttcatatgttaatactcccgataagaaggaatggatacaaaggaggggcttgaatatatggcgaagggagggacaaacctcttttgatggcgaggtaaccttgttgccttcttcactctcgaatgattccagaagtttgtccaggtccttctcaggcgagagggagaggacaaaaaaaaggtcagacaaagatcgataattgagacgaggaaaacaagaacgaacctcatcaatcgagtcaatcggagttcctgtgcaaattgcgatgaccttcctgtacaacccatgtttttctgctgagatctgatcgattgatctgatcttctcctccagaatgttctccgccctactctgccacaatctaatcctccttaactcgatgagttcctctttcggatcagatccaattttggtcgaatcgacctttggatccggtccggtgtaattagcgttcggctcaaacgacgtaggatggctgacaggcaggtcttcccctcgggttggttcgatcgactggaaagacgggccagttcggatagaaggctgaccatccacatctgtgcggccagaccaatcgaacgcgtcttcctgatcgagagcgcgttggacattcttggtcctttgggtgatctgatcgagtttggctaggttcgcctctagtgtagagactgaccgacgggcgaaagctagggatcgagtgacgcctacgacgtgtgattgagcgaccgctaacgcatcctctttcactttcagctcggcgaggaaggtcgtattcagagtctcaatcgtttttgtgatatctttgtcgtaaagatagtggaaggacgtcaatttcaagagcacatgtaaatccagagcaaccaagacatctacctgttatcacgtctttgctcttctgtaacggaacagacgctggctcgcgtaaactagcgatgatctcttctccaggtgatactcgcaataactgatgtgcaacgaacgtgactcatgttgagcaaccttgatcggattgattgaagaagataacaacaatagtgataatgatgataaatcacttacctcctcttcaatcccgtagtctcctgctctaagtcccaacttgttgaccactcccttctctgctccaacgtcaaccaagaacctggtcaacgttcggtttcctactctggcgctgacgattagtgcagtgtcaccgttgatgtctctcgcgtcgacgacgctcttaaaaccttccgtgcccttgacggtgccagcgagactttcgtgtttcgctatccactccagaagacattccatgtagtatcgcgccgcacctgctcgtcccggcacacccgcgaggagcgcgacgtgatgaagaaccgaccgatgggatctgtccattgtccgcaaagtgagcgcgagcgttgagtctgccaacgaaagcaacgatgggaatgccctttggtcataattgttcgtcgccaagatggacctcatcagcggagtttcacctgagtggtttcctctatgaggatcagcacctcggttcagcaggtaggtcactaagttcggtcgagcaagcgcgcaggcccaatgaagggcggtatgaccctgggggtcgatgataagattcggatcaaacggctcggtcggatccgcaagcaagctagaaggatcttccgggtcatctgcatggagaaggtcagatgtctgttccctgcctccattcgatgtcgatggggtggatgtagtcgcaggaatctgccgctcaaagaacgaaagaagaatcgcccgttggcgcgccggatcagcgttttttgcaggatccgtcggcttgctcgccagtcttgtgtgaggcgctaaagcatcctgtactggcccgggagatggccttgagtcgggctgtgaaagaagatgggtcgagtgaatggagggaaatgaatctgttgatgtggcttccttcagcgaagggtcaaccagtccgtaagcatttgtatttgatggcctgatagaagtagccagttgggatggagaaggtcggtgatgctcttggctgtgaccaggagtgggcgtcccgtcggcgctattataatccacagtgtacaatccgttaccatccccatcgatcaagctgtcggcgaaccgctgcatgtcagctgactcggacgttgtcatcggcactcggtgattacttcgaggcgggaacacctggttggtcaacgacgatgaagtcgacgcggaggtcgacgcgtcgtactgatccaacggaaggtgattctgaaacggagatggatatcctgccaaaggagcgccactttcatacagacctggctctgtgcctgctggattagatccatcctctgttcgcatccgttttgtctggggcgctttggaaaaggaggcaaccgagtcttcatgctgttgatgatatccatttctgccaccgttttcttctttagggatttctcctctctcgtttacgtcctcggttcgagctcgtttccggtctcctcctgcctctgttctgcgcgagttctcttctaaagaaccagaagtctcacccccagcttgatcgtaatacccatggaacgcgcccgctggagttctgacagcaccttgacctgcagcgaggatatcagccggggtcatcatcgcgctcgagtgaacggtttgtccattgtaggatcttcctccatgatgaggagcgggaattggatattgtgctacattcgagccgccgctaggaaggaagggtgacgtgatggcttgctgctgaagcaaaatctgacgagattgactacccgaagggacgatcgttgtcgcagtggtcgtcgttgaggaagctgcgttcgttgtaggcgcagatgtggaaggaggattagttggccctgtcgaattggacggggttatcaaggttggattggaattagacccggcctgtgatttatcgggcgaagactgacgaccggctgggagggacgcggtatatgtcgcgtcattcagcgacgtatccacgatgggcgctagtagactctgaacgccatattgagcggccagctctagaccccgttcaagagggatcctatgagaggtagagcgaattcaagtttaacgaacatagctggagaaaagagcatgggggtttagaataaaaataaaaatggagagacggaccaggttccttgatactttccataaccgccttgaactttctcatagagtccgacaggaataatttctttatcaaggatctttgttcgtctacctttctcaatgcccgctactttcagaatttgagtctaaaaggatcaagaaaatcatcaggttaggaagatataggagagacacgaccgaaacaaggaggtcaatccaatggggcgacatcggcatgatggcggatgaagctaatgtcacgtacagcgtttaaccatctaggttcaggaagcgaattggacattagagaagaagaagacgtgaaaccaaatgggtttagtcaaaagacaaccctgacagcggttgaacgtcgcttagacgacaagtagggagagactcacgaatccgaccgacgtctcatcactgcgattccacggatcatgcattcgaacaccgagacctgttcgtttaaggagtgacatcaaagagagcaagagacgagaagaaaaggaagacagagaagagagaaacagttgggaagtccaaaggaacgcgcatcagtgatcggatgcatcatcccaaaaaaaccgcatacatccatctttctcgacaggtttagaccgacgaagagaacgtgtacaaaggccagatgggctcggagacacgagagagcaacaaggaaaagaggacaagaagaaagaaagaaaggatcgtcacgaacgccagagtacacggctgtataaaccgaagccaggccgggatctgctctaccgggaccatcaggatggctggccgctgaggaaggaccgccatggtttccagaaccggacgagcctggctggccggacggagagggatagaacgccagtggatcttgagactggatggaagcctgttgatcggcctgcatctctcgtagggtttgtaagttgttggatcggaagactaagaatggacagttgctcgtggacggggaatggtgagaacacggatcgggggtctggttgggtcgtgaagcgattggaaaaggcggaagaggaacgcgttgaggccacggaggattttcaattgaaaagtttatagttactttatgggttcctgtaatctc

SEQ ID NO: 908 - DNA, 4874 bp, Xanthophyllomyces dendrorhous
ggttcctgtaatctctgttcgtagtctatcttcggttctgaaccatctgactttcaccactcgtgacttgacacagcagattacccatggcgaatgaagaatacggaacatggagatcatcagagtagagtgtgaaacagaagaaaaataagcagggatatgtgcacactaggaggttggaggaattcgtggatgtatgcagataagaaaatacggaaagcgaacaaatagtgatctacggacatgaatagttaggagcaaaggagaaagaatgacttgagaagagaacgagagaaagagatgtcaaactgaagagtagaagggaagtcacagctagacctctcccgggttcggtcggaacgtcatgatctgcaagaccgcaagagaagaagaagaagagggaaaaggaagagaacggtcagcgtctgtcggcctggttagaaggctttcgaaagaaagagggaaagaaagaccacgaacctccatcacggtctttccgtcttgtttggccagcacgatgcacttatcgactaggaaagtgacacgatagatggcctcgcaaggtttactgagctcccgaatgaactgcccgcttcgaaggtcccacaacttgacccgaccatcgttcccacccgttacgctaattcatgtcaaaagaagggctaagtcagcgaagccggacatgacatcgttgagcatgggaaggacacacatgaatcgattgtcgaattggagacaggtcacagagttatcactataagagattggcgatcagaggcgtcagccaggctcttgacatgctcgaacgcgctcagagatcaagatacgtactgtgcgcaaagacgttgaaggcattcaaatgtggacaatgagaacacaatgacccgaccgtctgatccgccagtcaccaagaggtcatttgtcagttgaagttgtcccacgagtgaggtatgtccttgtaagagcgcgaggcattctctacagagaaaatcgtgaaaataaaccaaacccagtggtccatgagttagaagaggcttatttccgaacaggaagcgaacagacgatggcaacttacccggtatgagccgaccaaacccggacagtcgagtctagactgcctgtagcaaccttgtcgccatcgaacccgacggcatagatttggtgatagtgcccctggaagacttgcaaacactctccagtgtccacatcccagagctgaacaacacaacagagtgagttgaaaagaaccaaacacacagattaagtatacgccttctcgagtagtacactttatgaaagaagaaggaaagacaacatactcgagctgtaaagtcgtaacttccactaacgactctgttaccgtggacctcgatacaccgcacactatgctgatgacccaacagcagatgaattaacttgcccgtctcaaggtcccagacccggagtgtcgcgtctctcgagccagagatcgcgatcggtcgaccgtcgatgactttgatacatcggatctggaaagaagatgcgcgcaggttgaatcatagatgagtcagcattggttcaagaaaaaaaggaagagagaaaagacagggcgaagggaaaagaagagaagtgtacagtggaggtatgtcctggcatgatgtgtttacataatctgttcacgccgaatttgacatccaaaatccatgtagcgaatcagtttacccactctttcagcttcttcgaagaacgctagtctccaaggaacgtagaaaattcaagaaggagtgatacgaaccccgtctcaagatcccatactcgaacggatcggtcacagcctcctgtgaccaggaccgcgccctcctgaccccaacctctggatgatccacaggcctcatacctttccttcgctctcgggtttcctcgtccagtctcatcgcctcttcctccggaggctatctctgttgatgacgaagctgccgtggttgatgatcttgagagatgaaccgaagaagacccgtgctcccactgaggcggcaagctcgccgagcttcctgttggattcgcagagcccagaagagtcgtgtgcgtatacgggttagtcctcgccgatcctgactgtccggactgttctagaccggggtgactactcgagtgggttgctgccaacgacgaagcgcttattccatcggatgatctgcttctcgcgagtctctgctcatccggtctaagtagatccagctgtgagttattcttttgaccatctctatgatcacctgtgtccgttgtccaagggttgggttcttcggatccaggtcttggacgtcgaacaccaccctgactaacgagggtaagtgcccagacaccttggccatgaccttgtagactccggaggaacgcgccagtctcgcaatcaaagatatgaatcttggagttggccatcccgatgacgatatgtgtttcgtccacggcgagcgaagtgacgactgcttcatctgtcgatgtatgagtagagagtatacggcctcctcgaagccaattggattctgtgattgacgatgatagagaataagaagaaggagagtgaacaagaccagtcagtgacaaggtcgattgagttagaaagaaaaccagagaagtgcgacgataggagaggagaagaggagaatcattttgacgagagacacacctgtcaagtaggcttctttgaaatactttttgtaactgaatcggtcagttctctccctctccttctcgttcagaccctcgatgagtcccatggatgccctgcgatcagcctgtcttgatttgcccttgcccttgcctttacctttgccctcactcgccgagctgataatttgctgatcggccgttctatccgccgatcgtaagattagaggcgagcttgcgcttctctctggcaagtcaaccaaaggcattggttcgttccccgaggatgccggcaacgattccggaacagagttgctcgactctcgcctagtcaactcctttgccgacaatgtcgccagcactcttttccttgccgattgcgagcgagacgaaagcgtagacgtcaagctagacacgaacgaaggaggactcttcagcgttggactctgccagcggggagtagaaaacatgtcggaagaaccaccgtcaatgttgtcctcgatgaggtcttccgggggctgggatgcggtcggaagttgagtattggcggaagaggagctggaggaggcagggttgtaaccaaggaagctgtaggcaagataggacgaggacgacagtgacaaagatgatgatgagttggccgactggccggaatcgaacgatacgtgcggctgcgcaggaagcaggcttgacgctgttgatggggatgcagtcaattgtggatgatcgtcaatcagactggatcgagtggataaaggttggatgggcgtaggtcctggaagttctggcggtgaagatgtcgctggatgatgagaaggtggttctgaacgaccgggtgattcagcacccaactcggtttgatccggaacgctctcggcatcagcttcggtcataagtagggaagacgacatggaggagaccgaggcaagttccattcgagcaaatcgatgtcgggcacacatctccttccatgtccactcgtcctcgagaagcctcctccagaccttgctgacctgactggctcgggcgagtgttcgtggggagtctatgaaagagagaacatggagcgagagctcaagaggaaggtctcgaagaaagtctcgttttagccggggagataataggttggataccgaaagaagttccgacgttgtcagcagtgggagaagtgcggtgaggaatgaatgccgggcggaagccgggagatgaatgaactgggcaagaagatgctgaacggtcggttggtctagcgagaatgaagcaaagcaagagaaaaaccatcaacagggacggaaggtatcatggattgtgagtaaaaggaccacaagcacgtacctcctcctccaggataggaatatcttatggagcccggtggagtgatcatgattctatctctcggtccaggacttggagccggtgtaggtggcctgacggccgagctgagagccaagggtgaaggcctggtatgagtgatagagcctggcatggaagcgagagtgttcacgatccttgggtcgaccggagaaggctcctgagggttgtacacatgtggcacagtgttcgaaggaagagaagtgcctgagggaggggtagacggaacgaacggatggttggtgggtggctgcatgatcgaaagctcggaagcgaaaagggagtgtgatggaggatgtcaagagaagagggaggaaacgacgatgcctgaagaaccaggtatatgcactgagacgacagcgaacgtttgccgaggacgagcaggacggcaaaaagaggatgatcaagaacgaaagaaacggaggtgaacgagagtcgataagaaggcactgtcgggtgggaaggctgacaaagtacgaaccggttgggtgtgattctttgtagatgggcctttctttgaggattcgttgaacgtttccctaagagtacgtacgtgtggtcgagtgcttgtatagatgtatacgatgccaacatacacacacgcaaataaacatacacacaatcaagacagagcagaacagaacagaacccagtactcgacaggccaagagaaggcgaaggcggttgtctcgtcgctgtcgttctcccttctggacgatggggttcgtcgattccctcatcgtgcgccggccgattccgccttccggttgggctgaaagtgattaggtaagcggagaggaacgggggggaggggggagggggagaatagagtttgattaggtaatgccatttgggcc

SEQ ID NO: 909 - DNA, 27221 bp, Xanthophyllomyces dendrorhous
cctcttactcttcaccatctccttcttgaccatctattctgttcgtcgtacatctgatcaacagggttaaacagtcgtttggttcaactctattcacctcggaagtctcgaaatagagagccgacgatctatgctccctcttcactttgtaaacaagagtctgggcacacttctcctcgctttggcatccttcactctaggaggtttcgcccagcagccgtcgtccagtgtctcaaagtttccacatctaccttcaaaaatattctattttgaagacacatcagtgagctttgttcttctgcgtttgtttcgtcactttcgttcgagtataccgcaacctgtcatccacagttcatgctcctgcttctcgcgcgtaccgggtggatccatctttatttttaggattaactcttcatactcatgcctgcatttgatcgcttgcgccactatctaggacgtcctctatcatgaccctctcctccaaaacgtgtatcgatcttccaacgagggtaaagactggagcttgatcgaaggtgtgccggacggcgaggctgcacatctgatcgaccatccgaccgacaaccaggtggtacgcctgtctctccttcaccttttgccactcgtcctcatttcggaccgctaacgatttgaatgttgtctttgttcgataggcttttatcatcacccgtcagacaacacattatgcaacatataacagaggagccacctggcaaaagtttgaattaccagcagctgcgtcaagaacgggatcaccgctttccttccattcaaccgagaagggtgagttcctcgccgtcgtttctggcattcgcagcaatgttgcaacttctccgtttttctgaccctacttcgtcgaaactttcaaacaaggttggataatctaccaaggtaccgtctgtgaaacaactggaaccggccactggggttcgggcaagacatgctgggatgatgcctactacaccttggacgcgttcagatcgtcctctaaactactactctcccaagtgaatcagtgcctgttcgcgcatcaatctgaatacttcaagacgccaaatccgaccgaatcaaactctttggtgtactgtattgcttttgactcgagtagtcttccgggagaaagcaaaggattgagcgagagtaggctgtttagcagtcgaagttggtttgccagtgaggggtctcaaggggaggtggtcgactttgggatcggaaagcgagcaagaggcattgttggactgggagtcgcaggtggtttcgttgtagccgcgctcagaaaggatctggtcgccggtggtactggaggaagtgaggatccgatgtccctttatggtgagtgctatccttgttcttgcttctttctttcttctcggctctcggtcaatcatcttgaccaaccaaacttgttgcgcgctgctccatcagtcactccgaatggagtggattggagtgtagccaaatttccacacggctcgatcgccaatctcaaagaaaatgcctatgtatgtcttttgcttcttgcgcacgcacaaacaccctgtgtgctaacctttctctcacgtcctattaatcacagaccatcgtcgagtccacatctcactcaatctcgatcgacgtcttggcctaccctacagcttcgatcggagacttgtttgtatccaactcgaacggaaccgagtttcaagtctcattgcaagactcaaaccgaaatgctcgaggaatcgttgactacgaaaatttggttggtgtagaaggagttgcagttgcaaacatggtaagaaatagagaggaagtcgttggatggggaaagaacaaggaggtcgtcagtcgaatcacatggaacgatggtctgttcttctttcttttttcgtctatcgatcgtctcgtgcaagatggagtaataagccgaagcatcttggaatcaagtagctcacccaaatctttgctattcgggcccggggcgacaataggacgaacctggaaacagctcaagcctccggccaagaagctcaacggtgatgattgggaatgtcaaccgggtgaagatgtacgccaacgccgcttttatccagagtttctcgccggctgtgttcttaaggcagcatatgtagctgacctgagcattgtcattgtcgtgtttggcaggatgattgcagcctccatctatggtctgtttccacacctcacaactttggcaaagtgttttcatcaaccgctcctggttacgtgatgggtattggatccgtcggttcttagtatgtacctgttctcatatcacgctattcgaatctacctctatatctatcattcggtctcacacggcgccctacgaccccgtagtttgctcccatatgaagattgcgatacgttcatcagtaccgatgctggagtaacgtggaacatggccttgaacgacgccagcaagtacgagtttggagaccaaggaagcgtattggtctctgtttgggacgagggaacatcgagcgagatcaagtactcgttcgacgcaggtgcaacttggttcgtttttgctttcaacgagccgcgcgtgcttcttgccttcccagtgaagctaatctctgttgctgtgatcgtcctttccttgatcgatctcctataggaacacttacgattttggtgttaccatcaagccgattctcctcacgaccgttccggactcgacttctcagaagtttctccttcttggcactctttcccgcgcggatgcaggtaacaacgccaggcatgcgcttgtcttcttggatttcgcagatatgcggaagagaaagtgcacggacaaagatttcgagaagtggtacgctcgacctgaagatcaggagtgtcttatgggccataaggtttgtctctgagtcttttttgtttccccctctgttgataaatttacaaggtcggttcgttaaccattaattggttctttctctctcgcttttccatatcacatagcaatggtaccgtcgacgcaaggtcgacgcagactgttacgtcggtgacaagttcgaggatccaaaggtccagatggataactgcccctgtacagataaagactttgagtggtaggtcttcttctctcgttccccttgatatcaaatagacgatcagatctaactttcacttatcaatatgaatcacgtgttcttgaatccccaagtgacttcaactttgtgcttcaagccggagaatgcgtcctggctggcccagagcccgtcccagcaggaacatgtacaaaggcagacatccgaacctatgaaggttcatctggctacagacttattcccggaaatacatgcgatcgatcaaagggaatcgcaaaagacaagaaggtcatcaaggattgctctcaatgttcgtgattttttcttgataacttgcgttctcatcaactagcatcaagatgatcgaatgctgactagataatggtgtttgatacatgacagcccgacctgcagatggacaagtttcgcatcagatcgtatgtcattgtcctctgatcaggttctctgtatgagattggctcgataccgtatttacctgatgttttcatgatcttctttcagcacgacttcgggtccaaggtcatcaagagccagtatctaggagattctcaggtatgttgttgactgatttgattctctttgatcctgtcacacaaactctcataattttaatcactttacaaccaaccaagactgttctcgttcaacttcaagacgattcgatctggcaatcgagcaatgaaggttttacctggaagcagctctatccggatgaaagtttcctcgcgctcactgttcacacatattctaaagatcgagcgtacttggtaaccgacgaccgcaaagtctactttactaccgacaccggtcgaaactggtatacgttctcacccccctccgaccccaatggactaggcgtcccgatctttgatttccatccgaccaagtcggattgggtgatctggacaggtcaggtggactgctcgtccgtcacgtcaaacacatgcaggacggtctctcactattcgactgataacggacgaaaatggaggcagattgaaacctacgtcaaatcgtgtgtctgggctcgcggcagccggctcaagatcgatgagaagatgatcatgtgcgagagttatcaaaagaaggagggctcacaacggtcgccagcgtataatccactcaagttggttgctggccaaggatactactacaaccaggaggacttgttcagtagtatcgtcggattcaccacgttctcggagtatctcatcgtggccgaggttcgtccatgctttcctcaattgattgcaatcctcatttgttctctgcattctctggcctcctcggtacgggttcttactcgaggacctactttgggctcttaacaatgttagctcaacgagcaagaaggcactctgaagcttcaagtttctctggacggtacccactttgcagaggggcagttccctcctggtatgggtgtcgaaaataaggtgcgtcattttacatcttttcactgtcctatcatcttgaacaagcgtctgacatgcttttatttcatgcttcttttcttataggctgtgagtaggcggttgttatcaaatacaatcacaatgcaatttcatcaagccatgctgatctttaaaatccgactggatacgtagtacaccattttggagtctagtaccgattcgatcttcctacacgtcactactagctccaagagcggagacgagtacggcaatgtcttcaaggtcagtctatagtcaaaccgtacatcagcttaaaaaatagaagaaaactgacttgtaaaaccctgatccgtcgatagtctaattcgaatggaacggtgcgcattgattcacaacatatacggacggacatgtcttcttccaggcttcttgaaagcttatcaaaaattgcttcatgtaacagtactttggcctttcgattgagaatgccaaccgaaataatagaggatatgttgatttcgaaaagatgattggcctggatggtgtcgctgtgttaaacattgtttcaaacccggatcaagccgccgtcagtgggaccaagaaactcaaaactatgatcactcacaatgatggtttgtcccattcactctcctttttattcgagatttgagtcctgactgttgttaatttctaggtggatcttggaatccgatgactcctccatccaaggactcgttgggtcagccttacccttgctcgagcactgtgagtcaatgtgaacgcttggcttgttcatattgtgatagcaagttgatcaaatccaacaaattttaccttcggaaactttagtcttgcgccctgcatattcatggatacaccgagcgacgagatcccaaggctacctacagttcgccttcagctaagggtctgatgatggccgttggaaacgtcggtgagaacttgattggttatacgttcgtacctctactcgtgctttttctctactttctttttgtgaattttctacgatgtatcttaacttgtgtttcattcacctatagtgattctgatacgttcttgacccgagatgctgggttcacgtgggaggaggttcacaaggatgctcacctctgggaatttggcgactatggctcaattttgatcatcgccaagtgagtattcataaaatgttgctcggattaccagataccaagacatgctatgctaacctcgattcctaacttttccgaattgcgtcataaattagcgatgaggaagcgaccgatcacgttctttacacaactgacgaagggttgaattggaaggagtacagctttggggaacgactccgaatctctcaaattcagactgttccctcggacaccagccgaaagttcttactttacggaactcgaggtgccaagccggatgagactgtcgcggttcatattgacttttctgccttgactgcacgaaaatgtagggctgtctacttagttgtctctattttctagatcgattgctgatcagaggcccgcttgtctttcggtggttggttctaaataggcgagcagaaaatatctgatcctaatcacgatgatttcgagctttggtctcctagtgaatctcgagcagagacatgcctgtttggtcgtcaggttagtttcttttcctcgccttcttttcgaaaccaggtcagttgatcggtttgtaaactgtttcgtttaaccgatagacactctatcaccgccgaattcgagatcgaaattgttttattggagaacggattattcagcaagaagagtttgtcaggaattgcacctgctcggcatctgattttgaatggttcgttcattcttcagtttgatgcttttgtagtgcatagactgattggttgtggcatcaccgccatccaccacagcgaattcaatcaccatcgagatgcttccggcaagtgtgtcttgtttccctcggctactgctctctcgccgttgaccacggaggaggaacaatgcaaaacaacgaccgatgggtactggtacgaacgtacggcgtaccgaaaaatcccttactcatcatgcgaaggtggcgaccgtccggatcgaggaaagaggcatcgatgtccagaggtcttcgtcccgacgagccatggagcgctgttctggctgtcgatcgtgatcgcacctttcttgtttgcaggcttgggtggaatgtggtgggtgaagaagagtggaggaagctcagggtaagcttgctctatcttttttaaccttcatcttgctcttgtccttttggatgcttttgatctggtcgtatatgtggacagctcttcaactgaactttgactcttcttttgactttcggcaggtctatccgattaggagattctagagcattcggaggaggaggctcatccaaccaagtcatagagtatctagccgcgatcccgtatgtccttatcggcgccacaggtgccgcctgggcttgggtggaaagcaaagttcggacgataccgttcttcaacaagatgcaatccagaagaggttatcgaaacgtcccggtggatgatgatggtgtgtttgctctttgtactcttctccatcctctaaccggaattactgatgagatcatactttcgtgatgcaacttggggtcacagctgagattctgagagggacatatgacgatgaagaataatctggtcaatccttatgtacacgggagttttttattttcctctttacgatttgattgatagattcaggcatggtgtacaatataacttgggtatgcagcgatatggccaaaatatggcgattgacgaagcaacactactttcattgttttttctccctcttctttcgaggtcctttctcttcactgagtggtctttggtgtaaaacatgacattaaagatattccactgctagctatgcgtcaaaacgaacagaacaaagtgaatggatagagattaatcgagatacagtcagacatgccaggtaagaacattggcagctcagggaactagtgataaaagggagaaaggagattctttgtacaggaactaaggggtgagtatctagtgagctccaatagcctgtatgatggaaacaagaccggcaaaacagaaaagacaaacatgattgatgtgagtaatcgagggatggtagagttcagatatggaaaggaggtgatgaaaaaaaagggggatgagaactaaccttctctcctttaggctctggagggaagagattcttcacaggagtgttcattccgtcttcagtgacatagctgagagtgttatgagctcctgcaagagctgacagcgcaagctgatagagcatactatagaagcgcgcgaatgaaggcaaggaatgagatcagctattcttgattcaaggcaacgtattcgccgaacggaaaaaggaaatatatgagagagagaaaatacgaacacaaagatgaaatcgacccagacgaaagcaacaagtgcctttcgcattccaccacaggcagcgaacgtctgtccggtgcaagagtagtacgacttcttaaatctgacggagtaggccacggcgagagcaaaatagaatgcgagaaagaaggtggaaaggctaataacagatttcgtgcggtagatgctggtcctttttttgccaaaaacgatgactatcaagacagaaggtaaaagtggtctgagcaaacacgcatgatctagagacggaatgcatgaaggattggcaaagagcgcaaaattcgatcagaaagacaaacttgacaagaaccagaagttggctaggacgccgcagacgatgaaagctggatcgattctgaaataagacccaaaattgcgctcgatctgtcggatagaaatcgaagccagcacccatgagctggtcgaggagaagtgacgtataagaaatccggataagaaaaattggttagtaacacatcatctgagaacgataggaactcgttgaaggaaccccaaaagccatacgcaaaagccatgaccgtgttgagcgcagtgagcaagaaggtggccgtctgaaggatcgtcatgtttctagatgaggtttttccaagagatcagggaggtgtacttctcgagtatgaagaggttgagtgtggattgtaagtgcagatgagcgaaaagttggattgaaagctgttgggtgctctattatataatgaacccataggagggcaaaccatgaaaggggacgtctcgatctgagaccctcgaagcccacggtggcttccgtctccgtttaccatcagaaggaatcttctctgcccggcatgataagactaattatacgatgacgacagcgacaacgacagtgattatgctgacgaaatcaggaggcattcaatccatagtggggatgggcagggaaatgcaacaagacggaggagcatgaagttttagaggctgcccggattcgcgaatgctcacaccatcaaattggatagaaagaatgaggaaaatcctcctgccaacggacggccgagagcataagtcaactgttaacctaaaaatggccaacgactagcgagccagaaacggaagaggatgcaacccgagaagaccagggttgattgaagtcagtcagtcagccagccggtcgatcgttcgtccatttcgctcttcctgcacggccaggtcaagccgatgccggttcacggcaagtcagcatcagcatcgtcagcattatcatattctgtccaaaggcgccatcgttgtctactctttttatgtcaagtgccccagtttccatcatccttgctggctcccgatgccgtttctctcatgcggcagatgatagaggcaggatgacgtaaacaattcccgacagcttctaccatcggattcttccatattcccgcatggaccatttagacatcctcgtatctgaagaaaccgaaaatgcatacatagagaaaggagaaggtccgtagtagtgatagtggtaaaaatgttgatgttgattataatgatagtagtagtacatgagaagagctatagctatcaacttaacgagcaaaagtgttcacgctcaagggagggcgacccctatcatcagccataccgaacaattgtattccaggaaaccggaagaagaaagagaagaaggacatcaaagaagcgtcagctgaaataacccgaccaagcaaagaatagatcaaacatcgtcaaactgccgatttggaaaaataagttcgaccttacccggccgaaggaaacccgctcggaaacggagacggagacaacattccgttcgaattacccatatcacccatcatgttgttgcctccactcgtcatccggccaaaggcagccaaatcttcggatccggaggggaggataatcggctgaacaggcagactgtacgtcatctctaatacctccaaagttgttttgaggctatggagatttgagttgttttatttgatcgtttagtaatcccgatataatgaaactctgtgagtatgggtatgattcaatgaagcatcaagagagacactcctcatacaaattacacactttttcatgaaagccgttcgtctagcccatcgagctccccaatcgtgccaactgtcaaatacgatatagattagatatgtcaagccgtcgtccccaacgagaagacaaaccgttggcagaatcatcatgtgggtgaggactcacttgctcttgtgctctatcgcgatgtcgactgttaaacaatcacgataacaacgatgacagtgatcaatacagttcccctctgctttggaagacgttacttgaaggcgaaggcaaaacaatggtatacttactataaattgcattctgctgagagatattattgatgttgagctgatgagatccacccctataatgatagcaccacatattcagacggatcagacatgttggttgacttccttgactgtggacaaaactcggaacgtaccactctcgattattatccatcaagtactgtttcacccgaacgttgagatcctcgatgacctccagcggagtactacatccgtgatagacggaaacatcagtttagtttattccatctcgtctacggaaacagcccgatagaaacaagaacccactcgtatgcaatctggatcgaaataacttcccacatagctcgagatcgacctaaacagcaaaaacataagcagaaaaaaagagaagtccatgcggaacgaggcaaatcccttacgaatgttatctagaacaaccccgtttcatcagagatgactcatcagtgtctatgatatatgctgaatctgaccaactgattgataggtaaagaaacgtacgaatcaactttgcgcttgccagcaatgcgttaggagcgatgatctcctgattatcaacccttcggaacgtagtagacacaagcccgaatctaaccaagaagagaaagagattgatacttgcagctgtttgataatagggtaataaggataagatggaacaacgtactctttgacgaagagataatcggtgtcaatcaagaccaaatctccaacatcaaacggatgagtagcaaactactccgaacagccacgagtacagcgcccaaggacacaaaaccaaaccaggatgtcaggcgagcaaccaggttctctcatccgatatgaatggacttacaataaagatcaaactctcaaacaacgttttcgcagtattcgcgaagataaacgagaatccaacgacgaaagtacagacgggaacctatacaaaacgatagtgaaagcaacaatacatgagtataacagagtagaagtgaaaaggtgcgtcgataatcaaatcctgtgagaaaactcacgagcgaagtgacagtcgacgatttgttgaagatgagtaaaaagacaaagacgcagatgatcaaggcaaccccaagaagcacgccatctgttagatggcttgaacgttagtgcttgaatctaggactgtgatgaatagataaaatcagaacgagaaagaccagacaacaactcacccatctttccaatagccgaactcatatctgcgagtgaagccgtcaacgcttttctctctcgatagattcgctaaaaaaaaaaagaaagtaaatttcagtgctgaaagcacgtcatcgacaattgagatggatagtaaacagatgatgaactgacctgaacggctcctctcatctctcgcttggagagatcgccatttccatcctggtcgaaatgcgcaaacgccgtctgggcatcttcctgagaccggaaatactacatacacagcaaatacatcgagtcagcatacaaaatgagaccgaaaaagttctcggatgaaggtgagcttccagatgatccgggtacacaccggaaggaagtcatcgacagtaagggtgtgtctcgtgatacctcttgcattctgtccggtctggtactcgagctcctcgaacagcttcctagccaactgtctagccgaagccaaacttccaatttctggtcctttgccaaacattccctccattgcaatatccttgatttgccttcccaaacctgttacgacctttgctgcgctctttttcttccctttggccttgactgtcagttcggaaacgtctgtctgtctgcttagaggtgagggacgaacggtggtagtcgtcatagaattgtgatcttgctgatgatgcggagcaaaatcgataggttgcgattcggtggaaggcgtacctggtcgagtgaaaggagttccggggatactaccgggcgtgtcgaaaggagagttggttcgggagctagagatgtttcctgatttacctcgcttatgagctccccgaagacgggaggtagggaaggttcgtatggctttcgagagtttgtcaagagcgcgtaaagcctcggcattcaatgtcaatctgtccttcaaggctttcctatggaagttgatggcgataatctgcagtaagaccttttcggtcaacaaaagtatactagcggcgaagatcgcctgggcgactcgattgatataaacccagtaagatccagatggtgaaatggcagctcgagtgacagaaagagtcacccagatatcaacagagtagacgaaaatcttgacccaggtgctcacagctgtttgttcaggggaaatagagaatttgcaacaggaaataaataccagaattggtcattgtgttggtttgcctgtttttatcaagactcttgatcggaatgatatacgtacccagcatgagctgtcaaacagagccacaagaaccgtgaacggacagccgcttcaataaatttacacggtacaacgagagatttgatgggcgaatcaaaggaaaaaaatagagcaaacgatgaccaacctcaacataagttttcaagttctctgggaccttgccggatatccacatgatcaacatcgtgaacaagtgggggagaaaatcgacaaggacattgagcgcgcaacctatagcccaagaaatggtcaagaagagtgacctgtttcatcgtttcatcagaacaaacaaattgtcggagggatgggttaggattgaataggaaaccttgaggtgagaaactgatgtaccatgtttgcacttgagactttgcagggttgtttttgaactcggtcatcacgacgatgaagggaatcatcaagattgtacatctggcaatgatacaaaacacccagatctctgggtaagctcgcttgtctcgatcatagaggaatgatatatgcaagagggaaggaaaagtaaactcgaaggaggaaatgacggacccaatgaacgcagacataaacgctctgaaccacctgctcaaccctttgaaccaaagataaaccctccttcccctccttgctctaatggccttcgaggttcctccacccagagcctcaaatgtcttagcctgatcatgattgatttcatcatcgacatcccagtcaaactcgtcgtccgtgtgatcggaggctgtgccatcggatggagtgtcgtcagatgtacctggatgaataggttccatgtaggaaggccctggcagtcggaaagcgttttcatcagtgttttgttgccgctctgtaggtgagactgagaaagacctgttcgaagacgaccaaggttggggttgaagttcagattgaggctgattttgaggaggaagatccggttgaaacctgccggattcatcatgggtctcattatctgtcgtccctaatgaataagccgaaggattattcaagtcgtttcccaagctattatcgttgtatctcattcgaagaggtgtgtttggatctgaattggaagatgatggagatgaatggtccgttcggtctgtccgtcggtattcttttggttgacgggccggcccggtggaagtaggtgtatagagagatcgggaaggagcatccgtccggtttttaggagacgacatggtcgaaagaggtggcttatctgacttttaaactcttcctctcttttcgatgagctcagctgggatcttgtgagcacacaagaaggagagatatatagggagactaaaaagaaggaatgctgttcgagatggaaaggaaaggtaaaaaagaaattccacagccggctatgaccgcagcggaaaagtacagcggcgcgtcatcaccaagtcccaatttgtcctcaaaaatgcaaaagtctcattgaatacatccgtttgttcgttcgttcattacaacagagaagtgttgaaagtgaaagacaatatcagatcatagtaagagggaatacaattgggttcgtcggtctggacgaacatagtccagcagtcagagggaaagctaaatgtccaccctgatatgattcaagattggaatgacctgtaatttaaggaggttgcaaaagatgacaccaagcttcagcattgaatacagggtattaagaatagtcgagacagaccttgtcccaatcgtccatggctttctggtacatttcaatctgcgcatcagcaaactccccgagaacttccttcatctcttccttcttatcgagctcaaagttctcgtgttcgcgtaacgtctcgtccgaaaatgcgttcgaggtgtctacagcagagacaactgcttcttggagctgttcaacgcggagtaaaatttggagggttggctgtgatctacaatagcccgatcactaggtaaatgtcagaaagaggggacaacaggactaacttccttgatccgtccatccaagcgtttcatccgctctcttcgactggcaatatcgtcctttcccctgagcgcatctactcgatccttgaggtaggttcctatgccgaccggcccgcctggagggacacctccattttcgaccagactcgaaagtctatctcgctcaagaacaaccgaggtaagatactcggatagaatctctgaatcgagctgcttctgatcgcggagcgcgaggagagctcggtgagtctgggagtagtggagaagcgactcgaggtgggagatgaacggaggtagcggagtagttgactatttttttgaattcgatatgcgcattttttgggcatgagtcacagaggtggagtaacaacgagaaaccctgcgctgtgcccattatgaagagagggggacttacaacatgtcggagaacatttgaaaactcggtcattcgatcggcaaatcgaacaagaggttcggtgattccgctctccaggtaggcgagttctttgatgctctgtgcgaagtcgttgtagtccgatgcaagatctatcgcagaagagggggagggagtaaaagaagaaggaagaaggaagggggaagagggaggaaagggagacaaagaatggatctagcttatatctgggagatagaatgaagaagatttccccactcaccacccgttctaccttttaacctgccggcacctttgttaacgcctgcgagaccatattcaaacctttcgacctctcctctcatttcctcaaacctttcgtccggctttcgaacttttccactcgtcagattcacaatcgagtccgagattgattcaaggatggacgaaggtgcttctggattgggagggtttgccaggtgtttatgcattcgtatattctgtcgatcaagcgaaagagagtaagacaaaagacctcttagcaagatacgtgtgttaagggcaaacccccgtcaaaacaaggctaacccagtctgtcgcttccaaaaagctcgcgaaaagcgttgatcgtctgagggtgggatgccgggtcaatcgggagatgaaacgctggagactagaagagaacgaaatagaagcgtaagtgattgttgaggacgatgctaatggataaagaagtacaggcgcgtactcttcgattcgtttctccaggaactcaggcccgaaccggtctcttcctggtagatattctatcaaaggtgtggaatccggaaaggatcatatgtcagataataggtatcctagttaactctgatcagtcagacaagagaagatgagtcggacctatacggtgcttgtctggtaacggagggacgatgcaagctgggaaatccttcgcgaggttgtcatggagaaacacaaaatcttgaaaccgtctgcggactttggcatctgtcgtggtaaatgtcgggagatttgtctggtggattaagaatagaagattgatcagcatataactcactggatgggaaaatgaggcggaccgcgacaaaagggattcaactcaccttgactctcactgtgcaaagggaatagaaaagagttcatcgtcagtcgtcaggaatacaatacacacgcatatatacaaactctcactcacaaccataagtgacgtatttgtctttgcctccttcgatcttgtaatccattattctagcttcgacccagttggatccccagacacctgtccggtgaggagagttggaggaggacgaggcctcggctggtactgatgttggtggtggtaatgattgcggtccacttgaaggcgaagcaatcggtcggaaggctgattccgggtcatctgcttgagtgggagactgtggaatggcaatggtatcccactggacagagtcaaacacgttctcgtccggcgtactgggcatacgtgaaaatgaatatatgtaggcttaggcttaggcttaggcttaggctgtggtctgtacgggagtataatactgtaggtgtgatggaagtaggcgaggcggatgagatcgatgagatggatttcaggaacaggaatgtaaccctaggcttatatttgagcgcgggcgttgaccgatgcgccgactcatccatatatcgcgatatctcgagctcaggcttcttgctttctgtcttcaaaaaatgctattgagaggaagagggataggtcgatgacgagagcagacttcttattgaagagaagaaaagtatcagaccatggcctgtctcagactgtatagatagagacaagctaaattgatgggtatgagttgttgatgattctctttggtcaagaatgccacgtatcttataaccctctactcttgattcccttgtatcatcccgtcctccccattacctctcttccactcaatctgaacatggccgatattcatcgggccaaattctctgttctgttctagttcttgtcttctctttcgttctctgtgtttctcgttcaacaaagttgtcaataaagtcaccaaccgacggccatgtcacgtgactatcgcggtatttgattcctgtttcgactcgagtcctatcgagcccctttgcttcttcccttctggacatgtactctctatctgtaagatgggccaaaagacctagcatgttctggtatagatgcaacggactgaaatggggatcgagagagtaaaccatggtaattacaagctcaatacatgaaacaagagaaagacaaagataaatcgatcaatcgttgtactccatctagtccaatcgcaccaaacgaccctcgtccttgatgttctatcttcctcccttctttctttctttccttcttcgccgattcttaatgcctcggtttggtctctcaagaaggtatactacttgctgtagccatctgtattgaatgacgctggaggcactcaagaaacccataagacaaaagtcggagtttgaaatggaagtgtgaccgacggcgtgaccgcccaaccctgttcctggcgcctgccctgggctctagagaagaattgagcaaaaggaaaaaaattcctcaggctgaagacttcaagactcctcgacacccgtcctcttccgtaagtgttatgcttctaaagcatcactcttgtacctattcttgctgtctctcgtcacattgtactcgtcattccttcggatttcaatcaaaccggtccatctaggggatttttttccttctccaaaaaacatgacaagaggaggaatcataaaaaaaaatccacagtaattcaagaaagggagaaagcagggatgatcttcagtggaaaggatattgcgtagcagaagaagggcagggagaacggtcagatttggtttataggagaaggaaaagagaaaatagctccaggttgcccgtcgtgatgaactcaaagagagacccagaactcacagtaatggcaaacgaaactaacctatcaatcactccttcaccacagcccctcttcaacttcttttttcctcaagatgtcccaagatctccagtggctcctcatcaggaagtctaactccttcctcgtcaagcgaactgccgagggaccgttagtctagctcttttctcatagttatatctgagcctcgaagttgaattttttccctcttttcttgtccttcagcatcttctccaaggagcccggaaacctcaggggccttcactccttcaagcactccggacttgtcaacaacaagaccgtcttcgttgcccccaccaccgagacctccggcttgaccttgaccacccgagtcaagggtgctaacccccgacacgtcaagaaggccctcgtctcccgacagatcaagggaaactcttccgcccgacgagttgccaagatcatcgccgtcgagaccgccgcccgaggataccgacctgatctccgaactgttagtcctctgttttggcaagccgatgtgacatctccatctttcgtatcttttctctgtcctatcaattctctaccccatgaccgccaaaaaaaacaaatgcaaaaggcgcaactccgtcatatctcaacctccgggttgctatcgtggtacagcacggtcccgccaacctttattttgctagaacaagcctacctcccacttttttccgtgccctcttctcttacctctatgaagaaccggcctcattgcgagtgggagacaacacccacatttcttaccttgctctgcatcatcttccgactaacatatgactgtcgtccacaaatagagaaactaaccgctactgccttgttttatctctatcttctccccatcgaaataggctgctcttgcccgagccagcgccatcaccgctgcccagaaggaggccaccaaccccactgccgtccgagagaagaaggtccgaggaaacaaggccgcccccgtcgaggcttccgcttaaatgcgattgaagttttggatgagatgtcgttttgtaggacgtcttaactaagagacataagaggcttgagaaaacacagagagaacatgataatatcaggatagacagaaacatgagcaaaactagaaatttgcaagttttcccctccccaaaagcagtctcctctcgttcaattgactgagagtatgtttgatacgtgttgtaaatatcaacaatgtgccccttttcgatatcttaatttctgtccctcttgcaacaccaagggaacattaaaagaaaagtcattgaaatcgttaaaactttcgactcttgataactgtagaaataccagtctgttctcctccgtaatctcctttgagagcaccttgaccgcccttgtagacggcctggatagaagacactttcttctttgctttctcgtattgaagctttttcttgactcgggggtttcgcacagacttgtttcgatgcggagtgagtcctttgttcttgaggatcgcccgagtgagggttcgaggtccggtcgagctgtcgtcctccacgaatctgtttatttgggagtgtgcgagagtaagaaggaagcatatcagcatatggtagattgagcgagacgatgcagaaagaagcaaagaaagggaacgaaccgctcagcttccctagcctcatcgtaagcgacttgtttatcctccttgtggtccctctttctctttttgaccaactcgtaataaccatcatctccttcatccgcctcacctggatcatagtcctctctgacttctctcgctctcttcctgtcaccctctccccattcttcaccatcgagatccatatcatcaccatctgctcctcccagggaagcagcagtcgactttcgtaaagcggcatctcgaccagcctttcgatctctatagggaacatcatcgtcaccacccattcgaccttgtcgagcgttcgctcgtcggttagaagcagattcaatcttggaagtgtggaaccgaagggaatggcgagctgcttctttggcagaggagtctgccagaccaagcgtggtaggctccaaatgagcatcgtcttctccagccgatcgagaagataagaaagcagtactgctgctcgaggaaggcgtagaccttgaggatttcgatttcttggaagacggaatggtggaagttgagaagactggggaaggttcttcgagcgtagggaacggaagatccttggagaccttttgcttcttcgtcttctttgtcgattccactggggttgctttctccttcattgagctcttcttctttgacgccgacgatgacgatttagtcttgagttcttcgagatcacccatcaactcggccagctcatcttcctccatgtttgccaacatctcctttctccaagccatctcgtcctgaccggcaccctttccaagcagtccgaattggatgagctgctcttctgtcaactcgtcgtcatcttcttcagaatcaccctcttcctcttcttcatcgtcgtcatctccatagtcgaattcggccatctctcgatcggcgatggctaaatcgtcgtcgtcgtcatcatcctcatcgccggcaaagtcctgggattctaactcgccgagtgcttctttcaactgaagcaatcgagtcatcacagggtgagacgacaagtctggtcgggaagtcttgggaagggaagccaagtgaatgtagaacgctagcgtggtggcgtaggtgatgagggtttctggatttgaacacacgattgagaaaaggaatagtatgagcgtaggcgcacgtcgttgaaagatatagatagccgcaagattgaaataacgagaaacgaacggcagtgtaaagcagacattccgagcgcagggtgatcaggatcatcctttgattgattattgaaagcttcggtcactcgaggaagtctatccgccaagtcggcccattctctagcaagagccagggtaagcgggttcgtcagctctaggtgtcggagaagcgcagctggatcggtgggtaggggtacgtcggactcgacctgcctgtgaatgcgtttgaaagaggtaaatcacgaggagtagcgagaacagttagactcagtgaagggtgcaagggagggtaaagaatcgactacgaacttctcgccttcctcttcagcatcatcatcagctaaggtaaacccttcatcgataccgaaatcccctcgacccattccctccctcatcttcctctgcaagactttggcctctctctcctccatagctcttctctcttccaagtcctcatcaccagagtcagagccctctctggctcgtctggtcgaaggccgagcatagtaagccgacgggttggctccccacgtctcgtcctcatcttccgaatcgtctcctcctccgatttggtctgaccgaccagaatcggaatcatcctcgtcggatccatcggagagttcatcctcgtcggaagaggtcggctctggtttggcgtatcgtccctttggcgtagagtccgcctttgccttcgcctttcgagctcgagggaccacttcggacgtatcggggtgttcttcaccatcgtaatagatctcgttcgagtcgtcatcgtcatcctcgtcttcagagccggcaaatcctttaccagcgaacacatcctcttcgtcgttgaaggcgtcgtcgtcggcgagaggttggaaccgacgagctcgttcgttcgaggtatcctcgaacagaactttatctctgttcacatggactagataattgggacgccagatttatagtgggacgtaaaaaaaagggagacagaacccaatcagttgatctgaacttgaaagaacgataggaaagcacagaataaaaatatatacaggtatcctcgcctccatcctcgattgtatcctcccagttgaccatctttgccactgaggcatcgccacctctggaagcaatgtttttctttcccgctttcgttttcgatcgaggggccatctaggtagaagagggcgcgtttcgatagagagagtaggagggtgtgtgtggttgtgtgcgtctatgtatccaaggtgtggctcttgggtgggtcagaaggatgtatgtagaagtgaaatttgagcccaattgcaccccgaatgaccccattggataccccaaatgaatcccccgatcggggcattctctctatgaagcctctcgttcctcctactgacacttgctctttttttcctttctacaacgaagcaaccatctctcaatccgatcgaccatgtctgctgctttgaaagctaccaggaaggacttcgctctccagcttccaaagccgagatatgtcccgtcggctatcaggaatgcgaagatgtacgtttggacgttctgctatctcttcctctcttttctttttcgctttcttctcccttgatttcgtcactcgttttgtttggaataagaactgattcggtctggtgtctgcaacattcctcctttcgggctctctgtgtctaaacctcattagtcgacttcgaatggcattcactactggtcctcgagacttcagacgggtctgcatcgtcgccactacatcccggacgagacgagacggtatgcctctcgagaaacttggtgaatacgatccgacccccaagaaccgaaagttatcagccgcggaaggtggaatgaactttgcaggaagagacgcgactcgatatgagaagagggtcgagtggaacgaggagcgaattctttggtggttgaagtacggaaaggccgagccctcaacaaaggtggtcacctatctggagaaggttcgttcatagcttttagtttcctaggaacaggtggtaggggaagaggtctgtcgcatctcggctcattatagctcaacttgaattatttttttctttcttatcactggaatccctttaggctggcgttctccagccgggacacccctaccgaaatggaaagccacctccggtgcccactcgacctttcatcggtaactggcccgagtttgatcccctgactcctgcaacagttccgaacggtcgggtccaagggttaggatacgtgttgccgaaaaagacgccggtggagagcatggagttgttgggttcgtctccggtcaggtcagctagttcaccgaagagaagctggagagatcacctcaagggctggactgggaagggagcctcgagtggtcaggcatcagcctgagcagcaagggaaaaacaaaaggtagaagaaggaggggggggggaaagagatcgaacagaaatatatacatgtcattccaatctcagtatctcttgatgatcgtgtatgctgataatcgcactaattggttaaatgccgttgatcctgacggaaacggctgactgaccgcaagactggctaactgattctgaagctgaacgattaatctttcggtttctttcctgtttctcgagatgaaggagtatgacgggtgggggggttatttggatggtaacctccttgcaatctttctatattcgcgatcagacttctcttggatagaaccaaggtatgtgtataatgtttaacaacaggtgtaaagagagagcagagaggctgaggttgttgtagagacaaagagaaaagaaggatgtagaagagaagatgcatgtggtacggagatgtgtcctaagagaagaaatgaagaaatggaagtgcagatgtatgaatcaacaaaaggatgacaggagggggttggacaacgattaggtccgttacctttcggtaagactcatacagaaagccgtggctttcgattaaggtaaagtatagaaacctttcctgtgggaatgagaaatgaataagaggaagataaagatggatctacatgaaggtggtgacggctccaatcaaagccaccagcacttccactatgaatttttggttagacagcttggcgatgggcgaggcgttgttgctgaacgggacgtagatctttgttgctgtggccgcgggagcggaagagtcgagagtggaggagggcgagtcggttcctccgccagtcaattcgctgccgttcggctagaaagtcagaggaagtgggagccgggtagtgtcaatcagatgagatggagataacgtgagagggataggtcaacagaagcttactccaataggtcggctagtatcctcaaagagacagtccgaaccagaaacgcaggtgttcccgatcggatcccaacaggcggtcgagcagttggaaggtagtctgtgtcgaaggccagagcctccgacaggaacctgctctggattcggatcgctcacactgggctgactctttgggcatccgtagcaagttgagaagggaaagtccgagaaggagcaccgggcgagcaggctaaaagaggaagagagaagaaggcgatgatcgagtcatgttctcacgagtcagattgatgcgcgctgatgaaggaagcgggacagaagagtagacacaaaggaacgtacgaagagtcgtaaccgggaagaccgttacagatgtttgttcctgcgggcaaggtgacgttctggcacttgagcgcatcagactgaccaagatctgtgatggacttaggatcccgaacccaggcgagcagctgctcacttgacacgatccaaactggaggacggagggagagaggagagagaaagaaagaaagaaaaagaattcgttcagtttaggctgatcgaagtacgaaaccaagagcaaactgcttaccgttctcttgctcctgagcccagtcaaggaactcattaatcatactgacaagagctgcaggcgagctcaaaccgggataggtagtcgagagatggatcgggtgggtgtacaatccaaagggttgacggtttccattgtagtgcgcggtaaaggtctctttcataaacttcaaggtgaatgccggatccgaattgtctagccaagggtcctgagatagcacacaaagaaggtagagaaagtcaataatgtatggttagccttgggtatcacacgatagagaccgaaaccgacgcaacagaaagcctgaatagaggagagaacccaccatgagatggatgttgttggcgttaccggaactgtcaaagagcgcatacatcgggatctcccagaagccggggagttgcggcttgccgaagcagatatcctcgaacgtattgcaatcgttgagaagtccgtgatcgagcgtgtatggccaaaaggcgtcagtgtccgggtcgctgacaggtgagctcgaggtggcactcgagtcgtaaaggaagccagactgggcaagttgattgagaagaccggccgaatagttcaagtagggcgctcggaaacctttgatatcagcaagcgggatgccggcgagggcattaagggcgatgaggttgccattgatctcgtccgctcctgcgagttcgatgtgggtcatggtgtggtcggcgatttcatttccgaggccataccactcggtgaccatcgaaaaattggtatacgaaatctgggtgtagtcttgtggggaagtggcgaaagtggaaagaccaacgggggtcaacacggattgagatacagatacaaactcaggcacaaaacactcacaggtcatttttggagaacaaccgttggggtttgtcctcttctggagtaacgagttgacggcgtcgatggtgtacgactgtagggcgtcatcagcggtgaagacgatgaacatcggggtgtctttcggttgaaggcctcctggcgggctggtactggcgcaagcacaatccggtagtttgcagctagctgggtcacaactgtaggccttgatggcttccgccggggcggcaccagcggtgatcgcaccgtcgtcctgagcgttgacgacaaaggacagaaggatcgatagtgagctcgtaagaagaagggaaggaaagagggatttcatcgtgtggtggtcgtgtgagcttgtctgtgaaagaaagagtgagtttgtttatgtatgagtatgacggtgacgatccagaaacgaacgagaggaacaggaccgaacgaaaatccaacaaagcaagacgaagagaaagaaagaagccacgagagaaacaagagtgaaaacggaaaacagccccggctggtttcttcgttcccacacggctcccttcttcctctgggcccctctttctgggaacttctttgtgatcagtcgtccatcgagcttgtcagccgactcgatccggtgtggtgctctggtcagtcacttcttgcccgatgagttactcgtctggttagctctgtttcccggtcagcgcgctctcgctctctccgatcagctctcgttagtcgtgtttcccttcgtcttcccagggcagatcctctttgcccttggcggtggatgaaaacagattgtcaggggctgaattcatgagagggcacaaggcacagttttcgagcggccctttaagtgtccctgaatttgaccggaggatagttaccggtggatcatcaatttgttaccatcaggtactgtaaccatcccccgccggtcgccccacaccgtcacgcctgtgtgccctgtgtgccttgcgtgacacgcctgcgcttgggccgcccaaaagagggaaaaattcctttccttcttcgtctgtttcttccatccaacgaccatcatctctcatacaaccatcatctctcatccatccatcgatcgtttctttctctattcctcagtctttcttcctattcctgccgctctaacgaagcaccatgtgtacgtacgtgtccccgtgtttttctctttttttctctttttttctttcccttccgttctctcgttttgtccttttgcagcgttctcatcatcataccatctcctactttcatcatctgtttggcctccgtcaaatctcgtctcttcacatttctgtcacaccccccttacagacaatggaattggtcttgccacagcaagaggtagtggcaccaacggttatgtcgtgaaaaacttgtcagcctttcgcccaagagaaggcccacccggtggattcggaactgcatccaactttgatgactttcccaaacaccgacaacccgaccagggtattctcgatcacgaacgaaaacgacagattgaggtcaagtgcgtcgagttgacggacgagctcgaagagaaaggg

SEQ ID NO: 910 - DNA, 70322 bp, Xanthophyllomyces dendrorhous
ttcctagacagtgccccctcctacaattctcccgggttttgggggcgattaggttcgcgaagattgattcatacgattcaggcatgttctagagcccgcgtttttctggtctttcaattccggcttgacgaatcctgtggacgatgctctacgaggtcggccacagaaggacccttgccggaagagaatacgacggccgtcgatggggacgtgggtgtcgagcagttgacctacatctctattctttctttctctacttttctgtttttttttcctttgcgactgtgtccttgtgctgatcctaatttacttgcaacctgcacagattcactgaagatcaaatcctagaagaagtcggagctttacgtacaaaactccttgccgccatgccttcttccagccagggtcgtcatttcaaaccgcacgaaacccattcgatcgctcaggccaaggaagccgagcttgcccgaatgcggggtgctttcggtgtcagcaacgattacaaggagggggcctcctttgatagggaggagcaggagcgaattcgggcagcaaagcgagctcaatatgaagaaaaggataggatccgagcagaaaagatcctcgaacaagaggctcaggccgaagagcgaaaggaggaagagaagaagaaacgacgagaacaggagcgaagacggattgctgatgaacgtgaagccgcgagacgaccccatactacgactgttcgggataatgatcctgcccctggctcgagacggccaaaccgagactcacgttcccgttcgcccgttaccaaacgtcgatctccttcacctagagatagtcgttcaccttccccggttcggagacagagagatccgtcatcctctccacctcccagggctcgaagaagacgttcatccacccctcctactcgacaaagacgatattctagcagctcaggctcgagaagtcctagtccgcccccgaggagtcgtgcttaagccttgtttctttttataccccttcccacttggttttttcttctccacccgattgtggtctcgatctatccacgagttgtatctttccaaaccccttgtctaaaccatataataatatctcgacagtgtctttgttcgttctcaatgccatgccttgtctatctgtgtgttcgttattgctttttttaagcgtcgcaaatataaacaaagataacagaactgcatatacatcacatcttttctacgttaaaagagacattgaggaggaggagtgttcgctcgacaactctgacgatacaacgctctctcaaccttgtcccattcttttttactatccggcactgaaggcggcgttagtgctgcagttgaggtggtggtggaagttcggagatgatgtttatcaaacctgtacggcggattaaagaagaacattttcaatacaactctacctcagaacgattcttctcctgaaaacaagagcagaaatggggaggacaaacaagtacgtcagaagatgcgttcgactttccgagatccctcgaaggaactcgaacatgatgatctcatctttcaagctgattcaagcggggtaaagccaagtaggacacaagtcgtccgagttaacacgcttttacttgaaaaatgaaagtaaagataaaataagcacgtacacaagttgagcggccaaggcaagtgtcgttgctgattctcggacagtcacattcgaggcgttcattgcctgtaacacgaaaaacacccgcagtagatgatgaaagaaaatgatgaagtctgtcctttagtctggcgccattccaatgtgtgtgtgtgtgtacgaaaaaagagaagtagaagatactgacgggtatgataagatccacgatccttgggatctcttcctgcaagacctctgctggtaagagcaagaaacatcttccaatctgaagtagaccgaaagcaaatcctggaacaaatctccgatcgatcatcacttctttctcatcgtctgattccttgatgtcggtcgagtccgatgaagcatcggacgtggtaggccaagggaacggaggaagaaatcggcgaagagaggtgacaatcgttgccaagcagtacacgggagaaagttctgaggcgagggtcatgaacaacatgctggttgcttctcgaatctatcgtatccaacgcgcaacgagagtaagaatgaagaagacacagagtatgagagaggcttcaaccataagaactatacagtgttagggatagatacgtacagattgtcgatagatagatcttaagttgagcagaatttcgaacagacgaggttcatatccctcgaacaatgtccactggttgttcaccaaagattctaaaagaaccaagcaccactccaccgctggctcagtctgatagttcagggtccccaatatatacaagtcttagtataggtagtcacatatgaaagcaaactcgaagttactcactgtttccttcttcaagaattcctctatcgaagtgaacagcctatcaaacatcttttcatcatgccaaatctgccaggttggactcgaagactcttgtccactgacaagcgcatgtctctgtgaaaacgagatgagatcccggacagcggctatcgatgacaaattcttctctagtatcgaagatggatgttcaagcgaagatgtcggctcggtcggtatatctttgaggacgactaaacaagttgaaacaaagaacatccttctgtttagctcgagtgaacattctctcataggaatgtggagaagaagagaagtagaagacttacaactcgaaaccgttctccaactaggataatctccagatgtgtctttcagcaagtcgatttgtttcggtccagctccagattcccatgttgctttttgctgaggggattctaagaacccatcgaacggtctagcaacctcccttagcctattctgctttccttgcggcgtccgtgttactcctgctcccgccgccgccgccgcccccaccgctgctgtggtttgattagctctttgatcacgcgcggtggatccaaagataggtcctctcgcccgtccgctgctttggattctagaaaaagtcgcgttcatcggtttcataggggtcgacaggtccgagattccttcgtccagcgacataaagtcctgagggactggaagtgatttactcggctctagtgccgatggtagtttgggtcgaatagaagtttcagctgctgagccaggtaaagttcgagagatgacgcccgtcgaatcatgtttctcttcaagacccgatttgctggattttttttggccgataggtgttgaaatagaaatcgaaggcgatggcggcgcggaagatgaaggacttaactgattggatgaaactgttggactacatgaagatggcgattcagatgcagcagcaatagacacagaagcaaaggtattgacaagagaaggggattttgattgccctggagtgtcaggtaagtttgactcaatggatggtcgtgacgataaactcgacccagaagataaggacaacgggatatcctcatagaaagtcggcggtggaggtgttgattgggttgtcgattgagagttatccaacgaaccagtagacgacatcatgtcttctgagcctgtgccaggcgtggccgatttgctctgcgcaatctttgcctttctttgggcagcaatcagactcttcatatccaccttcgccttcccttgcgtgctcgaactcgccacagctgatttgggcgacaccgcccctttagctacagaccgttgggcggtcttgccctgttcagcctgcaacaactgtttcttctgcatcccatccaacttttcaatcatctctcttcctaacgccggccatacacctataaatgcccaaaacgcggctctgcaagattctctcaccgtgggatttgagtctgccagtccttttctgatcatatcttccaacgtggtcgtccctcccagggcttcgattccgtgtttgctttttacaccatgaatgtctaggtaagttttgcagtgtgagaatgcgcaagaccgagcccgaacggacttgtcggtcgctccctgagtcaaaattgggaggattgttcgtggaggacaagtggttgtgcgaagaaaaacggtgatggtgtcctgtgtttgttgaacgacgagattctttgtgaaggtagccatctttgacagagggagaaggacggtgtcgatgaaagggtcaaatgaggctcccatggcatgagctagagatgagtagcaaaaacaggcggacgtgcagaccgttgttcgaagactagcaagctgagtgcatagaaaagatagtgatcacaatctcattagattcgtgtttgatgagaaactcaggatcagtggattttctggaataagaaatcaactaacagctttcaaactagcctctaaccagccagcccggagacacccaacaaacgtatccggatactgcttgaacgcatctcctttgatcattcctcggacacgaatcatcgatttttcacgtaggaaccaattatgttcatgctctttgccctacagcaacatatgcgtataggccgtaaaagaaagaagacatacacctgtcgtcagtctctttttcgattgaccaacacatactaagaggagatatacgaacctcgaaagcaggaagcatgtctttgaattctgtctctaggtcccgagccgacgcgatcttgatcaacgtgccaacaaggaatcaaccggttgtcagtttcagggacggtagtcgtgaacactgtgttccttagatcgaacttacatagacagtctcaacagattcaaacccgttagggtccgattgtaaagaggtttcattcctgctgtgggttgaaccgcttgaatccacctggttttgccttcgctcgcgaacctcttttccttttccttcgggcttgctttctgattctttgatatctgtctcgttcttactaaggttggtcttgacagaaggagaaatgactgctggctcagtgacagaaacgacgaagactttcgctagtacgctctctgagatcgcctttctaacacccttcaaaccaagaagcttcttgagctcagccttggcgggagcggaagtagtggatgcggagaacatagcgatcaccgtctgagtttcatcaaagagagaaaataaaaacagatcgagtttagacagggtagggcgaaagaaggaaaagataaagaaaaagcagacctacttctcgagcggtatcccggactgccccatcgccatcttccaatagatccaccaacacagccatgtacggcttcagcggaaacgttgagttacctgcgcgaacttgaccgagcgccagaatcgactgtttccgggtcaaccatcgatcggcaaacactcataatcatgtcaggctgatatgcttccaaggcggactgattttgttttgtgaagggtcaagaagaaacggacctgttctttgatccggacgttcttactactcagcccttgctctcgcatcgccttctcccagagattcagtaccgtaatctcctcctttcctgctgccgaccctgcgagggatttgcttgtgagcgcgcttgtttctccgagaattactaaggattctcgagccagctctctgagtctttctcttggttcggcgagtcggtcaattacaccgttcccagttggaagaaatgcatggaggatggatcggagatgagtttgagtctggaaagcggatgagcgtatccgaagcggagagaagaatgtcatgagcttggatcaagatcaacaaggagaagaagaaacagacggatgcgcatacgtgtgtcgtgatgggtaatcttgcaaacgcttgaaggaagatcaatatcgtctgtaatgcttgaccggctactcgttgaaatcatcagacagataaacaagaaatagacctattctgtgagtcctatcgtccaggctgttctatcaccgcaagaggaaaccgaaagcatcatagacaaatgaagaacaacgaacctagttgggtgtttgggtgccttagggagagcttgagacctattatgatatcttcatacaaatcctctgagatctacttttcccgttttaaacaatataaaataacagagtcgtcaagtcatgagacatctgctctttacactcgacagcttcatcacgaggagtaaaatcaggagcaaagagagtgctaacgaacctcatcaaaatcaaccatcgattccctcagctttcctaaggcaagcaccttcccgtcgacctcgcccgttcccggcttggccagtatctgtattatcgattccatctttggccgtctagctctgttcttgttcctattattctgagtaacgtagtatctctcttcttatctttcgagaggagagaacaggaggacaggtaggttgacgagtgggttgtagaaaggaactgccagatgatgattggaacaaatagaataaaagatccacaagaaatggacgcgactgcctttcaggcacgcgtcatgtcttacacccgtctccgcttcaagccgatgtaccactggcatggttctatcagatccgccttacaagcgtagcatatgattaagaaaaagaagtgttcattgatagcatggaatcagagaagatctcaaggaaacacagagaaagaggctgaaggaacgaggtagcagagttgtgacatgcgtattgaaagaaaagatcgcggagaaaacgagtgtccgttggagagaggtgtacaaagagtatataccgtagaaaacgtccttatgaatagaagaagagaaagacatatgagcgttgcagtggaaatgagcaagcagtgagaaggctatctcattctctacagcaaccccaacacgacagcgataccgacagatccaccaaggacactcaacataacatgactaccgctcaatcggattttctctggagcagcactcgcccggtagctatcgtttggtccagtattcccccctccactcgcgcccggactgggagcagtggcactttgaccaccactgatgaaggaagatgcacgaggtagcgtggtagccgtcgtgctctgagaagaggcacttgcctatttggataagaacacccaagcccagggtcagcaatcgaattacatgagagaaactcaagagaaagaggggacctacgctctgagttgtgcttgtggcatttgaagaggccgtgatagtgaacacaacagggacggagctcgtgacggctattcgtgatccactagatacggagacaccttgggcaacctgttgtgcaatatagtttggaggtcaattacggaggaaagaagggattttacggatgaaacaatcgagtttgtcaaggagagcaaaccagacgcagggcatcatatgaaaacatgcatgagcaggtaaactgaagcgaaggattccctgtgatactatctctaagagccggagtatataaaccgacttccaagaacttacgctatagcttgtagacaacgagacggaagcagaagtgcttgcagtagagtttgagcttgtgttgtttgatgaagaggccgagctagatgctgagctagatgccgagctagatgctgagctagatgccgagctagaggctgagatcgatgctgaggtggaagaagaggtagtggactgggtggacgaagccgaggactgagattgggattgtgcaacagctgagagcggtgcaagaatcagacaaagcaatggaagagcactgggaagatgcatgttgagagagcgagtgatgcagagagtgagtgagtggatcagttagtcggtaaggaaggaagtaagggagcgagtgagtgtatggtcaagatgctgaaaagaaggtgaggatcgggagaatataaatcaatacgaaatatctgtagtgtgtattacaaatagtttgtattggattctcaaaatcgcttgtaatacaaactttttgtaatgcctaattaggaattcatcgaaaaggactacatgaaaaagctatgctcactcgaccgcccgtcatctctccttcagtccatctggtccatcttgtcgactttcaaaccatcatccccgtccatctctttcaatcgtcatcgtcaatccatccagtaagtttgttcattcgtttgggctcatctgtattgaacaagtatttatgctgacagatcaacgttgtgaacgaattgtctcatctccctcaaattagaatgtcctacgatagctcagtccctctgatcgtcgacaacggaacgggggtacgtgttcatggtcgtgcttcttaagcttgcattcgtcttctctacttcctcttgtcgttgtcatctgctctcggcacatcagacgtcccggtttgaattcttgtctcactcgtgaaacaaactatcactttgcttgagtacagttcgtgaaatgcggttacgcaggctcgaactttcctgaacacggttcgtccttccatctcgtttccacttccttgggtcttgataaattatcagcaattcaacagagaatgtcactttgctggatatcatatctcagtgtttccctcgatcgttggtcgaccgattcttagagcggaggaacgactcgggaaccaagagatctcagatcttatgatcggtgatcaaggtaaacacatttcatctttgttctctcttagcctctatgaagcgctacaacatggctgacttcgattttctggtttactgataaatacatctgtctgataatacagccgccgagcatcgatcgtttttgaatgtaacccatccaatggagcacggtatcgtcaagaattgggaagacatgattcatctttgggactacactttccgagaaaaactacaggtcgatccggccggacgaaaagttctgctaacggaaccgccgatgaacccgaagcgaaacagagaaaagatggcggaggtcatgtttgaaaacttcaacgtcggtggtgtctacgtcgcgatccaggctgttctcacactctatgcccagggttcggtcgtctcttttgctttttacatcaccattaaccatttgcctccgcaaggctaacctctcgtctaccctaccattgctcttggatgcgaaaggtcttcaaaccggtgtggtcgttgactctggagacggtgtgacccatatcgtacctgtctacgaggggtacgctctccctcacttgaccaggcggttggacgtggctggtcgagacgtgacgagatatttgatcaagctcttactcatgcggggttatgcttttaaccggactgccgatttcgagaccgttcgaggcatcaaagagaagctctgctacaccaggttggctcaaactatcgatcttttcgctctgcgtatagttctaccctcttcctgagcgcttatctcttccttttttgaaatatatagttatgatctcgaacaggacaagaggttatcagaggacactaccgttttggtcgagaactatactgttcgtgtatcttccttctcatctactcgatgtgtgttagtttttgttgttgtgagatatctcatgtttcgttcatcttctctgtcatcgtctagctccctgacggacgagtgatcaaggtcggctcggagcgattcgaagctccggaatgcatgttccaaccgcatctggtcgacgtcgaacagccaggcatggccgagttgctcttccagactatccaagcaggcgcagtcgacattagacaggaactgtacaagcatatcgtgctcagtggaggaagctcaatgtaccctggtttgcccagtcggttggagaaggagatgaagcaactctatctatcaaaagtcttgaatggcgatgcttctcgactcaaggttcgtttgttttccctcacattcttttcttgatcagctgactagacaggctgaacccgtcgtcttttcgttcaatctcgcgtcgttaaattcaaacagaactttaagatcaggatcgaagatcctccccgtcggaaacacatggtctttttgggaggtgccgtgttggcggacatcatgaaatccagagaagaattctgggtgtcaaaggccgaatgggaggaacagggtgttagagctctcgacagactgagtcgatcagaatgagcgttgtctttggctgggttagccgtgttcgttctttgtgtgaaggacttctttttctctttcctgtcctactcccttccttccttctgcctttattttcttcgtccagcactttcttctcgctccccctttttttccctcctcaagccgttgtcgatgatgtcataagaacaagcagaaggatagatggcctttcttcaatcaaagtcgtcctcatacgttatctctcaactttcgccttctcaactcatctcgctcactttgacgggcagaaagagggagagaaacaaacatatatatatatattttcaaagatagataaactacctcgaaagtaacacgtgaatcgaacgaacttgtgtatgaagcatatacgatagagatagacccgctgcgaggagggaagagaaagaagaggaggagatgaacgagaaccagtctctgggcaaatttatagaaaaacaaggagtaatattatgaacgagtcaaattagaagcgaggaaagcaagaggaggacgaaggaggaggacgaaggaggaggacgagacaagaagtaacgtggtatggatagaagaggtgaaagaaagaagaaaaaaaaacgactagcgttcgatggagcgaaacaaaccatccgcgcgaggaaatcacaggaaacatcgagagaaggaaggaaggatgtactaatggctgagagaagaagtagacagacagaaacaagagattctcagtgattctttcccaatcgactcttcctcactttctttgagccggactcctgccttgatcggaaatccgactcgtcaagctcggccatctcctctcgaaggagttggtccattgcagcagtcgtcacggatgtcgatgtggagaggaaaggaaccaatcttggcttcaatggaagaggaagggaagccttggcctgtataaatttctctcataagcttgtcagaaccagttccagtcaactataagcaaattgatgaagtaaaggacgaacgacggatctagatgcgtgaatgtgagcggaaggaacactcttttccacaacatcggacgcccagcccgctccggtccctttctcggcagccgattgatttcggatccgtccaaatgttcgaagggaaggagggttcgcaggtgtcgctcggactgtgtcgggaccgaggaggaggacggacagaagaccgagaaggaggatgagcatgagaggtgacttggtgtgggacatcttgatatatgtttcttttctttttttgtttcttttttttcgttaggattcaggttttgagtctgttcttgcaatttgctctgacggtggagagttcaaagggggtagcgcgggtaaagaatgtgagaagtttgagaaaagctcggctagcgatactttacgggagggaatcaaggacgagaggtgaggcgagatgtcaaccagtgatacacgtataagggaaggatggtaggggaggggggagtgagatatagaggatggatgaggacaagaagtagaagagaaggaaacagtctatatatacaacgcaaccttctccccgcttcccttccccagtctcgagtcttctactcggaagaagcgaaaggaaagtttcagggatgttgaacgaaacggaactggacgatcatccatcatgttggatgattgttctacggtttcacgaagttcacttttgagtatctggggttttatggacatacatgggctttcatggtcaaatctggggttagatcaagagataagacatcccgcggatcatacgtaaggtatcaaatttaagttaagtatatctcagttggcccgtcgttcttcaccgcgtcgctccatactttatcactatctcgcttgcattcacgccccaactcatcatcacaccatcccaccagcagcaacagcatagacacactcacctaggcacacccacagatacacacggacacatagatgtctcagcctcctcctcctcctcctacacgaacggtccccgggccagtgccgaaattttcaacgggctcagctgcgcccgcgaactctacatggaaagcgaaaggaaagacttgggggatggcagcgatggagaagacgatccaggtgtcggactgggcaggtgtccggattaatggggtctctgagaaggtacgcttttcaagtctgaggatacctctctggcgtccggagggtatgtccaaaggaaggctctgactgatgattgtcattctcacgggttaatccgaacatgattcgcacatgcttccctcaggtcggtgggaagaggttttggcccaccacaggtgatttccctcaggtgagctagccttttcagtcgtatctctggaatccatcttcacaaaagctcatcgttcgagatatcgggactccctcgtttcaggaaatagaaaagtgcgctcagatcttgcgatcgttcacaggttcggcttcactatctttctgtctcagctatcagccaccattgtctacgatctgaactgaaagtatatccctcttaaatttcgctcttctcctcctctctataatgaatctcagtggatggaatcgcacaagaggaaactgtcgaaattgaaggcaagaaaaagccccgtcgggtgttccgaaagattcctccagagatcatacagcaggcatgcggtcttgcgatcttcaccgccttccgttccggccttgcgcctcttggaggtgccggtggagcaggcatcgtagtagccaagttatctgacggaagtcagtgcatttttctcgtgttgcgtgctttctttttgatgatcattcctggaatgaatgctgagcatgtttaaggttcgtgatctccatatgcaggttggtcagcgccatcggccatgtcgcccaacaacttgaccacaggtgagcaaggtttcatcatcaggatctgtcagacttgtgttgtgtgtctctctgacagtgataatctcttcgttcgatccaaactcaggcttcatggtatctatctttacttttctttccctccttcctgctctcttctaaaccttacgtttctgaccgttttctttccaatcgtcttctgctctacagattggagtcgacatatacgatgctattctcgtcattcgaacgccatccgccctcgcttcgttttcgacccacaaagctaccctaggaacagacatcggattggccgtcggtccatacggagcaggcgcagccgtagaagctggtttggagaaagcagcagtgttttcgtacgtgaacagtagaggattctacgcaggcgtccagctagtcggccaagtgtttgtcgatcgattcggtaagtctgagggatgagtggatgattccttcctttccttatttttgggatggacaacaggggcgtacaacgctaacaacatttacttttttgacttgccaatacagatgagaacgccagggttagttatgggtttttttttcaaattatgtgatagttttaaattcatcgctaagcgcacacccaaacaccttgcttgtacctcactatgtagatgtacaactggccagggtgagtactcaatcctggttgatacttcagtcaatgccagctatctgaactttcttatgcttctcccctcctttttttttcttcctctcgtccacgcacatacaacttttcctcagaatcaaagcagctgatatcctttctggccgagtcaaagtcccctacgaagcaaaatctcttcaaatcgctctacaagaagccacatccggtcgagcgcaaactctcaaacattccactttggacgttgtggagcttgtgcccgaaatacctgatacacttattcttgaggacggtgagatcctgaagctaccgccgacgccgactgcttctgatgaagcttgggtgagggatcctgatggtgaggaggttgagcaatttgtcatcagggaaggtgagagaaaacgtttgaaggaaggttggagcggggaagtcaatgaggttgaacagcgttccggagaattagacaagacactggacgcgagtgatggacatctcttgagtcgaaaattagagaatgtaaggatcggagatggaccagagcaagatgtcgaagtcaacgtcgtccccatctcggcccctccgttaccctcccgagtccatgcggctttagccgatcatcaagaagtcgtggatgcagcagagaaagaggggaaacagaacgctccggcgttaccgaaacgatccattcctcctcctctaccttcgcgaaaaccaatccaagcttcgacctcgaccgagggactcgctcacccggaacttgcaccagaaacagagacggaaacagatctcctaggtccagaaataccgagcgcattaccttcatcagagacgacagatcaggtcaaagaggagaacggaataccattacctcgctcctcatccccgccgccgccttttgatgcggtcgttcaagacgcacacgagtcagagttacatgatgtcaagctatgattttactctgggccatctttctatctactgttgccctatcttgaaatcacggcatgctcctcctcaagtacatggtttctatctgacaactcatttgaaaccatgagtatgtgccttcttccagttctcctcatccatatgtacgctcgtctctgagtttgttcttggatccagttttttgtcaggataaataaattgaatggtatatgatcaaaaggagccaaccccatcggcaaaggcaaaagagagcaaggtcgttattcatcagtgtttactacatccgctaccacatatcgctattatcgtatcaaagcagacactacatcaacaaaaattagagataaacaagacaaaagaagtgaattccaagtgttttcattacaggatcatgaccgtctgacaacagctagtacgaaatcatctccccaccaaacccccttccattccacaagtcttacaatctccttccacgattcttcgacaaatctctgagcgatcggttctcgatcacgttcatccaagaacacgacatagtccgtaggagtgaagaaagacctgataagcgaaccaaggaggaatgagatgaacgctatgaacaacatcgttgggaaagataccgtggcgggaatcgccgtatgagaatattgtttgaatgagcgcaaggcgagagaaggcgcaggtaaggttgggcgaggcaaattttctggaatagcaggtagggtggcggcttggctagggtgttccttggtaggcgtgacctctcctccgcctcgacgggaaagaccaaaaaagttgaaaagaggggcagacgcgttactgattttgcgaagtggcaaagtaggtgtagcctaatgtagaaaatataaatgaaatgttcagtggacggccagaatcatatgtcgtctgagaaaagcaacttactggggaactttgtaccgtagcggtatccccgatctcagtgggtgtatcctcctcttccgtggattcaggagccgtggcaggattgtcgtccgtgattagctccaatgcagtagcgagtatcggcaggaggtcctctgcaacagcgatgggattcaagagtgaagaaggaagagacagatgtgtgtccgtagatgccggtgtgagagctgcgtctaatggctcagataatctagtttaatgacatacaaattgaaagaattagtgtttgtctactatgcaatgatgggacacgatacaaattataacaaaaaccgaaccgttcgagtttgggccactggctgaaccgaatttcatctggctccacatggagcgaagctgaaggcgatcctatacccgaaacagcatctcttcctaatacctgagtcatagatccctccactgtgaccaagatctggtctggttcatcataagcctgtcctgctaatcgatctactccaatctccactatagcgcccttcagctctaacgtttttaaccaattaggcttggaaggctccgtcttcgatgcatcccgcagtggatcttgtaatgggggttgaaggtgatgtgtggtaggaagcgtgatccgaacaagatgcttcctgctcggtcgaacaggagtcaaggaagcagaatggagaatcgaaggcgggagagcaacgatgaccgtcctgaagggtagtacgagcttcttaagattaggagaaggatggaggggaaggcgaggtggagggataggaagatcggacgatgcggtcacagttgtggatggcggaggtaacgctacaggatcagcacctacaacggcggatgaggtgacgttatatcccgctggaaattgaccagtatctacaatgaactctgcgacgacaaaatctgtcaagtccgataaactcttcagttgcgatcctacaattgtctttgtcgacgacaagctagttgatgaatacatcgaggacagactagggaccggacgaatggtcttaatagttgaagaatcggatgagattgtgtctaggagggcttctgggctatccggcgaaggaagtctcattgataccgatcttggtatcgaagggcccgcgcgtgaatcaggcagaggcagtcttcgaggagtgctttggcctcgcttgtattcttccaactgaggcctaatgagaatcgtcaaccgatattcttgttcgataggatctagagagtgattgagcagtatattctcttcgtttacgtcagaaagcgaccatcgttcgttcttgtttgaatttgaggtgggagtagcaatatccgattgaaggttacttagtttcaagccagccgggggaaaccgaactaaaggagcacaaggctgggccttgagataagactctagactgagaagaatcttaggtagagaggtgttgattgaagaattaacaacggaaggaatcgagccagtgtaatcgatagcagaatagtaagtgcatcgagttgaagggatggtgtactgttcatttccgtagggatccaaagtctatatccgaatagaaaatgaaaacatcagcttgcagttgaatatatatcaacatccatgagtagacccacctccataacccaaccttccaacagtagccgaccaataggaagtccatccggattcagcttttcgatagcaaacttagaagccgcactctgagggtatgacgccgagaccagaaacagagttgatgtcgatgaactagtcgaagggcccaatccgataggtgttgacggagcgcccgtgtgctctccttgagctgataccgtagagacaaagaaccctctgttcctgaacggaaaagcacactttgaggtataaaatgaggtggagcacccgttgccgtatgattctaaagaaacggacgattcgaatctgtcatcccaactcggtctggcgctaccgtttgagacgacgcttgacacgtcctccgcggttgacccttggaacactttagacgcacgataaaccgcatgggctgttgaaagagaaggtacgtttcgtttgctcacaaccaaaccatctttctcagtagtcgacgtccagagttccggatcaagccgctgaaagtagagctgtcgaacgacatcaagaacctccagtgcgggttgcatcgcatgagtggatggaggggccggaatggtcgtaccgacagatggtggaggaggagtgacatgagaagagttggcatttggagtgaaccaaaggcggctgaaaggcgtcgccatctgaggaatagtgtttcccaaagcagagaagactggattatatgcggtcaacgtttgcgctacccttgatgggttcttgatcgacactgttgacaaattggggtcttcaaaatcacccgtcattcggcgacgtcggatcacccccatcactggagggcgatccaatggagttcggttcggtttcgtcctcttttgtttggagagtagtttcacctcggtctccggcaactcctctacatcgaccttaatctttgttccattcacagtaacaacgttcttgtcttttgcactcgacgttccttttgagacgatgatcaacacatgctcctcccccaaaacgacggcgtcatgttcgatagtgatccatcctccaccacctccagctgagagtcgatgtcgtcggagacacgaaaccgattgaggcggaggatcgatcactaatttcaggctattcgaccaagtgtcgaagtcgcatcgaatttcacactccacgtttggtaccggaccaatttctggctcattgaaactagctttcgacgatacgttcgaatcctccgaaggctcacttagagattcgctgggtaatgttgatagaccagagacgatgttggatttccgccaggaagcaggctgatactcgacgcggaatactgatttctcaagatcaaaccttgaattgagtaccttggcatggctaagccgagtgactacaggtggacccccagactttattgtgaacgagcctattccagccagagctatgattgtttggttgtagtaatgattattttcatggtcattctcaagtcaacagctagctcgattgaaacatgatgaaacgtaccagtagccatcgtttgtgggattgatgtcttgttcgaccaacccttaggatccgactgctcgagcaacgtaacctgagttgtcgtcggtgatagagcttcaattgaccagccttgcagatcaacttgggttcgaataatacctgattcagaagcaggaattgcaggaaacaaccctcgatcatctgtcgagaaagaaaatatatggacactcgtaggtgacttgtagattgttttgagaacgacactgtccctggcgctattggttcgagggggtagggaaaggtgaggaaaggtgttgatattaatcgatcgatgcaactagcatgatgggagtaaatgaggagcaatagcaagctacgtacgcgacaggccaggctgccttagatttccaccaccaaagttcgctcaactcgttcacgtcctccaatagaattgcatcatcaaacgtcttgtcccaagcagccctcgcccctgggctgttaatagctgccaggagatcccagatgcctacgccaacgaacacagcttctgcccgatatacgactagtgtgggatctaacgagtccaactgatggacagatacaccttgactggcttcaaggatcggtttccatttggcttccggttcttggagtagtgaagtaaaatcttaatagatagccgatattcccaactcgaaaatatcaacaccaggctcatgttgagtcaaatccaaggcaaagactgagaggacaaacgtacagatgtagcttcttttaatgaacccagccactcctctctcagccttttctgaccttcccttcctcttttctccgttgccaaccactccattaaagggtgtgcttccacccagtccgctgtccactgtttccatcgtccttaaagacaccccgctcagactggcagtatcatctcctccgaatcctctagagagcctcttgttcgcctctccggagattcctccggcttgtttgactgtcagatccttgacgacttgcgggatgccattgattcggatcgttcgactcgacggatccctcgcaattgagactttgaatcgagagagttgagaaggatccgagagcggtggatgggttactctcagcaagagtgggcgaacggacgatgggttcacgcccgtaggagctagagcgggaggcggcttgccaatgatggcctcccaggataaacccggatctgtctcggcagccagataggatttgacagaaatttgaattctccatccttgggaagaaggtacatcaaactctaccgttcttcgtgtgccgtcgtccttccctttgtcgtcgacggatttgatttcattttcgtcttcttggtgtacgactgcgtactcgatcgataatgtgtctcttcctctgtcaaacccgcttgaactcaagctgacatctttgccacacgcggtgagcagaggaatgtttccaccgtttcctcgagcttgatcgacgagatttgaaagcaagtccgggagatgcgcgccgatactggaacctacggcccaagttcctcttgggttccattgccaaaaacacgttagttgaactcgattcccgctcatagtactcccgccacttggtagaggtagggtatcagatttggaaggaggaaattgaacacagaacgcgagaagagagaccgtcgcccggacatagggaggtgcaggtcgtagataggccggttcatctggcgaacggggaagggaagtcgaaatattgatgactgtctgcgcatcgctgaacgttttggagattgtgatggtatctcttggactgagacgttcaagccagcagatgaaacataaatcacaacatcaggatcaagatcacagagtctcgttctgaaaattcctgacaagattaggtagccagaaagacatacctggaaggccatccaagcttgtaggccgttctgacaattcgagtctcacaatctaggtgttcgaccgtgtttgctgattcgaccatactatcccctagagttcgatccacgccatttttcaaagctgatcagactcgacttcaaactcctatacttggtctcaaaagaaacagaaaggaaggggaaaagaaaaacgaccacactcacatgcgcacctgacctctgctgtacccaagagcgctctgaatgcctcggcctgtaggccctcgtcgtcgtcttccccggtttcgacctcaagcatggccctccatacttctccacccttaacgctcctcttgtgaagctggacagctccttctgacaggcttctggcctttcctgatgctgacgacgaaggaccaccgatcgacgtaccggcagatgagccaacggcagcaccagtacccgtcccgatagttgaactagtagaggacgctacagtagagtatgatgatgacgatggcgatgacgatgaggagccattagggagggtgaccttcttccaagattgagaggatgaggatgccaggagagctcgaaagtatgcggtggaagtgtggagggtggacgtatacgattcgagaagtctgagcagcaacacgtcgcgaaaggagagaaggatgtacgttagagaacagactgaaagacgaattcaaaaatgacgagacacagatctgaacgtagagaacagaatagggagagcaacaaatgtccatgggatgggtatcgacatcaacgagaaaggctcacttctgaccatctgattgagggtttaccatctgaacctttggggagtcgatactcggagagagttcgtccttcgatgttattggccttcgactatcgttcaaaaacagggtcacacggatgtcaatacgatggaccagtagatcttctcgagaaggaagctatgtttgatgtcgagagcaataagatggacagagagaggagaggcgaaatggatgtgttggagtaaatccttgtgagctttgctgttctttcgttgggtatccggaaccgtcatcgttcgactttctttttcaaatatctcttctgctttcttgttcatccccagaccaagtcatctttcaactttcatttcaacaaccagaggcaggcaattccgctacagcaacagcaaacaaagagaccgaatgtggaaaaaaaaaacaaagatgagaaaaatggcgaaggatatggtgtcttgttacaaaaattgatactatgggataggggtaagagagagacacagagagctgaagctaagaagcggaagaggatagagcgcaagattttaacgctacatcacaaggagattgtgcaagatagaatgattcgttggtggtagaaactagaggattgaaatgtataagaagagaaaaagcccaagttgaagatttatatgctgatggagacaacgtcaaaacacaggaaaggcagtaaagaaaagctgataaggggaatccaacgaaacataaaacgatgcacaagaggtaaaacggtataaggaagagaggaaacaagacagagtaccaaggggagcaagtcacgagactaagcaatttaggaggaagcagcaggctcggcagtctcagaagcaggaggaagcgggttctcaggatctcgctgggagtcaagagcaaccttgacagcgatgtttcgctatttggtgtgcaagaaagatatggtgagtatacgatacaagaagtgagacgatagagaactaaatttgttatatataaaaaggaaaactcacgccatctagatccttgccgtcgatagacaaagccttctgctgctcctcggtggaggtagtgtcgacaaacccgaatcccttggatcgcttcacaccaaactgcctcctaacaattcgagcagtggcaacagagctagagggagaaacacgagtaaacacatgatacaagtcaaatcaagggaaaggaaatattcagacaaagaattttgccaacgacttacattccagactcggtgaagagcttgtgaagaccttcgtcgtccatggagaagggaaggttggcaacctaacagtagtatgaacagaaggcaacagagtgcaggccgcaggattagtagtctgtcaagggcagtgcgcaatgattctcaggaaacagagcgtacaaagacgagagtcttgtggggctctccagtaggaggctctctgggagctctgggagctcgctccttcttggctcggggggcagcgtctccggactcatcatcgattcgggtcgaaggagtggccttctttcgtcgggcagtcttaggagcctcagcctcaccctcggcaggagcagcatcagtctgagaggattcaccctcgacagtggcagcagtcttctttcctcgcttcttgttaggtcgctacatacgcatatacccatatgaaagaagcgtcaacacgtcttcatctcgatgctgagccaatcggtaagctaaaagggtcaaacgaaccttcttggtcttgggaacggtagctccctcagccgtcgaggcctcagcaccttcagtctcctcgccgtcaacagcatcctcggctcgggcaggtcgtcctcgaggagttgccggcttcttgtttcgaggcttcttctccttgggctgcgaaggtcgggcaagctcgacaacgatggctcggccctccacatctttaaggttcaaggaacgattgtggtcaacgatctgtcaagactaaagtgtgcgaaaagcaggagagaatgaaccaacccttctggttcaaggcctgaacagccttctcggcctcttcggtcgacttgtaggtaacaaacccgtagccggaggatcgctgtcctcggaagacaatctgagcggacacactgtaagaaaaggtacgaaaaaaagatcagcatgaatctcttccacttgaagtgtagagagaagatgaccaggagacgatcaacatacatctcgccaccaacaggctcgaacagcgacttgaggtcctggtcagtcgccttgtagctgaggttacccgcgaagacctatggggaagagaaatatcagaaaccatgatgttaggagctgcttggtagtgtgaccctatttgatatcgaccagagagaaaagttctttttttgcgatggaaaaagggagggacgagatgacaagaatagatcagaagagtggcgagaacaccccaaactgttaggtcttctaaggtatctagcttcgctcgaaggatgcgatcgatgagagtacagttgagaggagggtcgtgtcgcgttcgattgaagtgggtgggattgacagcaagatgagatgaaagggacacggtggcgacgttgccgatactgatctcttttccactcgtttctttgacagatccatcagtttcttcctggtctccagccatgagatcttcggtctgaccattagatagtcggtggacgacagaggaaggaaacacaaagttgaaaatacaagatcgatagatgaacgaaccttcacaccatcctccttgggagcaggggtagaagcctcgggggcagcagcctgagacgaagagacaggctcattcacggcgttggtagtttcttggggagcagacatgacttgtttgttgaattaaaactggcaaaggctgggtttatgtttaataagaacgtttggttaaggaatagaatcgaaacagcaggcaaacaaagatggtcggtcggtttggtcgttggtagatggaatcggccagggaagaaaaaaccgaaagaaggcgaagaaggcggtggaaaaactaagggtggttacggcttatgtaagcagggatcttctggcggtattgatggtactaacggtgatggtagtcattgttctgctggtatatctttcttttggtcttgcgccttagacctgggttgatgtttcggttgtacatgtgtatatggatgagttcatagagatcatcttgtgtgctatgttttcatttcttttgggttagacgtcgagttctcaatgagtgtctctttgggcgacaatctggttgttgccgttcagtcacacatctttttaagtatgtatcgggcattcagaacgtacttcctttgtctcttcataagctcctgccgtgcgctatgcacctccaactagagtggtctgttatgcttcctgattgttcgagttgatggggtctgtgtcttgatctgctctgcaacctgagatacttgctctcagtgttagggttgttagacccgtaaccctaggcacacacgatcaaccatctccttcatcgtctgatggagtttccaattgtcgagcaagctccctaacgctatcaatccaatcatcaatgtctgctcctccaacagcagtcgcatcaccagcaggaggaagaggaacagggggtggaggaggctctcaagaagaatctactgcatccaccctatggtcctatgctcgcacggccatcatggtctacgctggttctcagatcatgaacaagctgatggccaacgtcgttagtcttgctctctcgaatcgaaccgactgaaactgtatggaagacaatcatgctgacatcagctgagaactatgtgacccagatacctcaaccaccggctgccgttcctacggctgactcggttggtgagtcggcctcgggcttggctggagctccgctggaccctcggctcaaaccgaaggcagaccccatcacctacagacctgtgagtgatgcctttcaaatcttgtctggccttattaaggctcaacatagctgatggaaagctaatacttcattctatacggtagttctgggaagagagtacctcaatggacatgtctgtattgtcattcagttttcttcttttgtgagcattgctcctgacgttgtgttccgctcatgaccaacaggtacatctacttctccacatccccttcgggcgatgtagactttggtcaagatggaggctctccttcaatcgtatggaaagatctggtctatggagattggaagatcaatgatttcaaggatattcaagtcgatctgcctgctgtccgtcgcgtcccttggtctctctatttctatacctaaagacgcgtctagacgctaaaaaccgcgtcactcttcactttttctagtccgtccaacgaaacgcgtccctctgggctgatatcttcttgacaaacggacacgtttctcctgatccgtctgatccaaagtacaatgccagcgctgttgctcactctcgaaaacgtacgcccggtctcgtttgatccatcctgttctcaccgtttgtatttgctcttaccgtttccgagaatctgttatcagtcctcacgcggtacgcccctaagaagaagatcaggaaggagaagagcttgattggcggtaaggatgatgaagaggaggaggatgtcatccttagtctagcacagattgaggaagaggtgtgtaaatcgcattctttttcttcttcttctttcgcctggccgccgggtctctcgacctgatcatctttcgccgtttcttcaaatggaatctttacagcacaagacgacaccaatcatttcgtactggcatccaaacttgactttagccatcgtctctgatcgaccgaatattatcgagcaagccttgccgcctgattcgaaggagttcgttctgctagagccaagtggagaaaaagacaaggagggaagactcggccattatcccatcgtctatcccaatgagtgagttcttatccttcacttccctccctgttctttcattgatacacaacttatctgacgtggtactctctgtcctttcgtccgttcagcttctggaacatgaaggatcaattgattgagatcaacagcacgacgcctactcttcctttgcgcatctcgatctactccatgagctattggaagtttactatatattcggtaagagacatctgccttccttcacatcctgccaagtggagtattgcttctgggtctgttcaaacaattcaatcttctctctttctatcaactgtcataacagagtgtgggagctggaatggagaagcaggcggcagctcaaggtggaacgggcggagagatggatgagttcaaggtgtgtacgaacttatcgttctaagtaatttcatgttgtgttttcgtcggctgacatcgcccatcttttccccctggttatatagcgagtgctggtcgaggttcgtccctttgtcgcctatatcactgtattctcccctgatgtaagagtgaaagcatgtcatgctaaccgatgatgtttcctttgttgcctacttctagaccaatcctttcctgtccgtcaactgccgcttcagcctctgctgttattgagtcaacctaaactgactggactttggtttccctacaggttgggagctaccgtcttggtatccatccttcacatgctcttcgagttcttggctttctcgagcgatgtcagccattggagaaagaaagacggggatatgactggagtctccctgagaacaattctgacgaactgcgtggtacaagtaagagtttcttcaccttgtgcgcatcccaagaggaacgtccaaactgactcttggacaaatcgacacgggtcttgttccctagcttgtcacgttgctctacctgtacgacaactctcaagaaacttcttggatgatccttcttagtcaggtaaaatctgtagaactttttcaaaggatcgtatcggcctgtcaactgattcaacatcctgtatactcttcccccatcagggcatggggttgtttgtagaagcttggaagatcacaaagatcgttgatatcaagttggttcccaggtctgccgagtctcagtctatcttaccttatcggttggcgttcgaggataagaaggtgttgagcgaggacgagcgaaagacccaggagtacgacgctttggccttcaggttggtcagctacggggctatacccgtgttgatggcttataccgggtactctttattctactcgaaacatcggtcttggtactctttcacaatcaacacactcgctcaagctatctacatgtccgtatattcattttctccttctcctctttctcttcttctctttgttcggccagggtttccgcgagagatatctgactgatactatgattcatgacaggtttggtttcgttcaacttgtgccccagttgatcatcagtacgatctctattgtcgttttcacgagtgtgcgcgtatgcgcatgatgttcttggactgacaagaagttgtaacggattttgctcttgcttgtcctcttggtagactacaagctcaagtctgttgctcatatggtctgtcttttcaaacctattcactgttactctgtttgttttctatgatgaacatctcatctcttcttttgcgttaaacaaatgatggctgtagccgatgaaagccatggtttacaagacgctttcgaccgtggtcgacgatttgtttgtcttccttcctttctttccttttgcgtcgaaagatgtataatccgctcacgcgtttctatttcattattgttgtcccacgtgttaaattgatattggacacgaatcgacattgttgttatttactgtcattgaacggttccgggaactcgataaacaaaaatacaaaaatgaaacactagcttttcgtttgtgatcaagatgccattacttcatcgactggcctgtttccgagatgatgttgtgtttatcatcctgctataccaacgatggatcgtgagttcaatccatcgaaccggtggttccatataccatcttcggagattttttaaatagaacatattcggtcgaacgaggtttctgatacacacatacacacacacacacacgcatttttctctcgtccggatttgaacaaaagtaccgagtggacaagacccgagctaatgaggtgagttcgtttatcgggtttctcatccacgttactactttcgactgaacaaagaggttttccttctcttccactttctgtttgcaatcttcatttaaattatcgaatcaagtacggccaagtggcggtagaccaaagtgactcagattctgcgcccgagggattatccggagacgtcgattcagagacgaagaagactaagtagagaaggagagaagacgatataaagcaaaggagaagaaaaaacaaacaaacaaacgttttggaaaagatcatgttcataccgggtcgggtgggtacacgtggctgtgttttgtttattatattctatcttcttcatctcgtttccataatcttcttgtttttgcatattgtttatgacccgggatgagatgcgatgagacgtcttggtgtgtaatggcgagggaaaccctaaactgaaggtgtgttcaattatactatctacatcctgtctatcgtcggcgatgatgatgaagacgaggagagagttgagaagcgagaaaaaagatacaatatatgatgatagtcaatagaaatggctgacagaagatccctactcgatcaatttgtctaaatccaatgaggattctttcactccggtgaattgtttttcagctgattccatgattacggtcccattcacccgccgacacaagcctctaccatgactgtttatttcatttatgcattcacatttatattcacacccatctttatatatatttgtttactctgtcacatctcgggcgaggagttgggatatcaccagaaggactgtttccccctctctcctctccctctatcgaaccctggcttttaccgtttcatctagattgcatcccaaatttgcatttattttatgaatccatccatttatctcgtatctggagcaagcaaggtatgagagggatacgaacaagaagagaaagttgtaatccacggaaggacggaacgacgacaagaagggaaggacaagaacaacacaagaggttatgcatccgagaacgtttattagtatgtaataccaagttagtaccattagcgatggacaggcgacaatgagaatcatggaggatgatccatatgatacagcctacaggatccaggattctcaagttctgatctctttgaatttatgactcatgacataagacctatcaaacgaagactccgagctttgatgggaggccaacgtcgagagttgagaatttgctgatggcttgccagtgtctctttaactcgacacgtttttctatgaattctttccgagagatgagatgagagtgacacgagaaacaattgcggtaaaaggtgtaggcgagagcgcataaagaaggaagaaaaggctagagtgaacgggagaagaacgatgaagcgaagcaagagccatagagtgtaggcgagatgagtgtagagagacgggattcatgggcacctcgatacacggacccacgccaaaagcgcgagatgaggcatttgatgctggactggtgaaaggccatatctatgatcgatcgacgccacgatcgacaatttcagctttagatgatctagatcgaccgagatcgacggtctggattgcaaccgaatggtgctgcgcaggtgttccgagggaggaccgatcagcagcgggccgccaagttatagctaaaaaagaccggtccggggacctcaaccaccggaatcatgcgggtcacgacagcagctatctacgaatgttccgggagaaggaaccagatagaaggaaaagcatgaaaaaagctcccgagcggtccctcttcaggtgccgaggctagagtccaccctctcgtcgattgccgcggttgggcgcccagattggtggcataatgagcactcacgtgtgaaagagaagaaattgtttcctagcccgtcgccttctctgcctttttttcttctatcctttcctcttagctttcctttcctcgccttctcgccatccgttcttcaaagcattcagaggtcgacagccaaacataaccgaagagagacatagcaagccggtctgtttgttggtcaaagaagaaagaaaacaatccttcttcagcctttcctctttcgtcttccctctttcctccctctccttccctttcacctctttcgttgttaccttcttcaattcttcttcccttcgccttctccttcgtccttacatccacacatacacacgtgttgccaaaaggaaacactgcatccgtatgcaatcgagcccacgctgacaaactcttacagtagccagtgatcaacacccagagtaccagcccacatactcaaccttccactcgcttactcgctcaattaactaaagggtcaaccaagtgtcgtctggttcagcagaaaggttcgtcccagagttcgtcgctctccagagaacgctaccgttactgatgatcaatcttgcttcttctatctctcttttctcctgttgccagacatccaatcctcgcctcctatccatcaaatcaaaatcttctctttttccatccaatagagtactccttcctctttcaccgcctccctctgtctccccccacaacccacgtggagcgagtttgtgcatcaaatgtctgcgctcactagtcaagtacgtcccgaatctgtctcattcctcccaacgcgcctttctcgttgacacgaggtctcccgatcttgcttagtcctcggcgatacaacaaaacttcacaaacccaccaggattctccacggctggttagtccgatcctctctttctttctttcgcgtgctttctacctctcctggtcaatcctgttctcactcctcttctgtcacagtccacctcaaaccaaagatcacgtacattgatttgattagagaggcaatcctatcgtttcccggtaatccctcgcttcaagaggttcgccttcctctctttggctttctcattctccttagattgggtttctaacgcgctttttccatcggtatgcaaccccccgccccgatgttttttcgagcagatctataactatatccaaaagacatacccgttctatcacccaaaggatgatggttggaaggttagcctcgattcattcgatacaaatcccttcccattcccgtcgatggaaactgagaaattttaatctctttttccttataatccggccgttcacagaatagcgtccggcacacgttgtccttgagtcctttgttcaaaaacgtccgtctgttctctctttctcttcatcgccagacagaatcatggatgctgacatgtcttcttctctgtttaatcaagatcccgagagtttacccacagccagggaaaggaggactctggcggataaatccagatgtatgtgtcttccttcccctctctcgagtctctcacacgcacacagagggcaaaattcttcgattcctaacgtctatcacccatccaggccccggtccccacttctaaaaggaaggacaagtcgtcgaagggtcctgctctctcaggcaaatcttctcgatcaccttactctcccggaggcaagaaacggtcgtccgggatgaacccaacctcgcattcaacaacgacccatcctctcaacccaacaccaatcacagacacggcaacagacacggcaacagactctgatcggtcggacggaaggttgtttgctacgccttctagcggaactagaggtggctcgacgttcacctcttcctcttcctcttcgacaacaatgaccgaaggatacactcctctatccaataacctgtatggccctggaccccaactctccccggtttcacctcatgatcaccgattccgtcctctacaccagcacccacaacaacaacagcagcagcagcagcagcaaccgccgctactgcagcgaaatccgagtagctggaacattccaccctactcggcccctctatcgacatataccgaaccgtcctgtgtgactgcgagaccaggattaaatctcaggcagacctacccagctcccaatcagttccccactttcaatacgcctacagctcagttcggctcccacgctagcctctcaggctcaagcagcctagctacaccagtttccctactggatgtttcatctagttcatccacttccaccttgtcgacaagcagatcgcccaatttatcggatcattcggaatcacatccgtatcctaccccaggatatgacaccaggtcgttcgatcagaattcgccccagtatgaatctgcaagacatcccaataccgccccggcggcggcggctgtgtatcgtcctcaactctcatatgcctttcctacgccccaacattcccacggaacaaaccatccgggtggtggtccgtcattgtccgatcaccaccatcagcagcaacagcaaggatactatcagtcatctgtagcttctcaacaacaccagtcagctaggtacacctactcggaacctgttcaccagtcaacatcatcttcaacagaccctcggtcggcttcgtcgataacgacagatacgtggaagccatctcagcgattatcacagaacgcccatcaaggtcttccctcattctccacgttgcttcctataccgggatcctctttatcgtcatcgtcatcatccaccgcacaggtcgtccctccagtgcctccgacatcaacaatgatcccgtcagagtccgctcaatcgagcgcgtataaccactatcagtaccaacgaccaatcgggaacgatattcactcgaccgacgcgcgcggaagacctttcgcttcccatgcagctcagaatcaacaacgacagtcgccaactcagctttcccagcagcagcagcagcagcagtaccagcaacatcagcacctgacagactcgtacttccctcctcaaccaccgaaccagccattccaatctttccagtcgtacccgatccaagactcgctcgtcaaccagtcatcaaactaactccgtcttagcagttagccataagggaagctttagggtggcggtgatggttgtaagggatgagcgatgaacggcttgtctcaatcttttgtgttctctttcttttagaggtcttcttctcttctcacagttgcttctttaaacctgctttctttgtgctttgctttttgttccttctctccattttttctttccattattctgtccgggctttatcgtcgttgtttgcttctctctctttcttttcctttttcacttccagaaatcctctgtagccgtctttttcttgtcatatttacttgttctttatctcttctttcaatcctgttctgctcatttttttcgtcgtcttttcctcttttctcttcttgttctttcgtctgatctgcgggtctcttcggaaaatggtctttactcttctatcttcctgtctctctctttctctctccctcttcgtcactacccttctctcacctgtcgtgttcggccgttataccaatttcaccctacagatgtttctatatgaatatcctggttcacaaaagtggtttatatatgttggatgtggtgatcagaccgttccgttttcttttccagtctatccctatttctctctattcttcgcgtgcatatcctcttctgagctttgaggcagacaaacactagttagtgatgtgttgggttgcaagagaccgatcgtgatggtaggaaaaggtgttacatcaccgaacatagaaacgaccttccatcacctttacttcagatatagaaacacacaaaccacgcacacatacacatcgccatcgaggttaggactatgttctcatatgctcatatcatatctttctctgtctctgtcctggtcgagtctgacctagaaacttggccgtctacctggtttggggacgatatgatagcatactgtttatcgtcgagaaatggccaaacgtccttccccttcctcctccagcagctcgaaagatgatatcgactttaacacgagctcaaagaaatcaagccaactagagatatcacacgaagagcaactccgactggctagagagataggtgtcgtaccgtccgatgtaccggtagttcatataaacggtggaacattgttagagaggatccctggccggccgatacatgaacagaaccagggcggggatggggctggagatcaggatggaaatgggatcagagaagaggctcttgagggtgagatcttcaaagctatcactatggtttgtctacctttactacctctactttgtttgctctgtctgtggttgagttcctcgtttcttctcccttcccaaagatcatcccgttcagcttcttgtttctagcgatggacatgtgaggattcttccactgaactttcatgagatgtctcttccatgtagctcacaaggcaggtctgatatctttgacttgtttctctttgtttcgctcctctccggacgatgaagaatgatacatcagcagtatggtgaacatcctacaccgatggacgaactgggaagactaaccaccgccgttccaggttcgtcttcgtttccttccttcgctcgtcttcctctctcctatggatctctgctaaactcatctccaattgttcctctttctcttgataaacggatgactttccggttgccggaatatgcgctcggtttgggatgagatagtcatttccgccgtggtgtattattgttagtgttctctagtttcgagtcagagaatcgaataggcagccatctaacggatcgtctgttcgttctcgtcccgactcgttcgctcttcctcatcccggatcagctaacaaatacgcctatgaaagatgggctcagctcttgcttctggtcgtgtcgatcgtttgcggaagtaggttgatgtggatagtcaataaagcaggttggctcgtcgtcatccaacaagtgagcgcgcgcccttgtttgaatcttcttttcttttcctttcttgtgactcgacttgatgcagagctgacgatccttgggagtcgaactctactttccaacaaaggctccgccgatatcgacgatctgggtgatcacgatttgtcaattagatctgctgtttgccgtaggtggtttaggcgtggtgtttgctttcaaatggtggaacgggttgaacatcactttttgagcggaaaagaccagataagaggaggttttgtttcatcctgagcgtatacatctgtcttgtcatcaaccaaccaaggccttctcatctccaaacgattcatcctggaggataagctgaagcatgttatcttcccactcgatacctgtgtgctaggcttctctcctaaggttgtaaccctaaccgtaaatttggtgatctttttcgtccacaaacttctgccaatctttcctccgttctccctaccagtcatcttctcttaataccaaaggcgatcgatagcatgatggaggcctctggatcgacagcttatatctcgacctcggccaacaagtactctcattgttcggacatctcacccgacaacaaaggtctcgtcatctttggagcagctaacggagtggccctgtggaacagtctggacaaagaccaaaagctcgttcatcaggttctgcccggtcatctgaaagaaatcacatccgtccagttcgtacccactagatcggacagcggcgagcttagattcgtgtcgggcgatagagatggaaaactgatcttttggagaagaagatctgaggcgggagaaagagaggttcgtactcttgtttgcagccctcatcctgattgcttgtcctgtccgctgtggctctcgaagtgcggtccttttgaatgataaagcgagacagataagaaggagaactatacatgaactttctcaacagatcgactgaatgtttattctcgttctatctcacttgctctgtttaaatagtggacttctgtccaagacatagagtccgggcactcagcttcggtaacgagcatctgttccctggccgatgtttcttgcttagctggagattctagctcgagctcaaagaaacaatccgatttgatcctcaccgctggctcagattgtatcgtcagagtatggaggtgggacgttgatgaggctggcgaaggcgagtccttccttagatttattcttctcttcttgtaagagattgcgttggcgtatccgtgatagctgttcgttcgtaaactgactatcttctatttgtagacaagcccgagcttctccagacgatctccactaataagaaaattcctctggcttctgctatctctttcttccctggaactaatggtaatgtcgtctcaacagaaatcttatgaccgtcgatcagacgtggacacaaacactcactcgtgtagggaacatggttcatgacagtcccggtgcttgcgctatcctctaccgaccgaaaagttcagatctttaccttccagccggacaccaaccaagtatgtgaccatccttttgaatattcatcaacgattctgtaggactgatgtttgtatctcatcttcgttcagttcacgttctctctctccctcgagggacacatcgattgggttcgatgtctcgctttcgctcctacaacctccaatagctccgatcttttgctggcttccggctctcaagatgcctacatccggttatggtccctctctcctctcgttgaatccagaaacgagaccgaagttgcgccaactgagaaggagactgatggatcagatgaggctgatcaagatcaagagttggaccaaaagctgatggatcagttcgaaggtcttgccaaccagggtgatggagagggcccagatggtgaggtcggtactgtcaacatgagagctttccacttggatgtgaaggaaaagtctggcaggtaaatatacataatccttccctcaataagatatctcaatcaagtgctgttgctgacgcaactgtcctctctctttcacacgcacatttcaacagtgtcaagaaattctccctttccctttctgccctcctccaaggtcacgacacttgggttacctcccttcacttttcaccacctctaccctccgggtcagccagaaagcaaccgttacagttactttccgcttctgccgacaactcacttatcctctggtcgcctaccaatgcaaacgccacctcgaactctacagcagctagcactaccggtatttggttcgctctctctcggttcggtcaagtctcggtcaaaggtcttggtttcttcggcgccctttggggaggaaactggacggaacctgatggcagaagacaagttctggctagtggatgggcagggggatggaatatctggcaagagccgttgctaaaggaagatcagaaaaatcttgatttgggattgctagctgatgcgtgggaggacgtcgaaggtcctacaggtcactttgatggcgtcaaggccgtcggttggggtggtggaaaggaagggagagaatggatcttgagtgttagttcggacgagacatctagaattcattgtccgtggaccaggccgtctgcctctccggaggaaggcgaatcttcttcgacagcaaaaatcaccacttgggcagagatcgctcgacctcaagttcatggatatcccttgacgtccctcgccacacttccaggaacacacggtttcgtaagcggagctgacgaaaaggtcgtccggatctttggagagaccagagggttcgtagagagtttggtcggattaggagcagcaaagttggaagatgctcagacttcggaagctcctgtgggagctagcgtgccccctctgggtttgagtaacaagatggtcacaaccgatggtaaattacctttctcttgctccttcctatcgtccttttctcccttttctctccgcgcctcataactgatcgattcggatatgatcttttgcagctccggaagaagaagatgcatcagccgatgttgggttcaactatactcggttctcgatatcggaagccctcacgaagccgcctacagagaacgcgctttccacgtccaccctctggcccgaagttgagaaactctatggtcacggatatgaggcaagtcctgtccatctactgtatatatacataaaccagaatgtgccgattgaagataagaatatagaagagcgcgacagtggctgacaaccgtctggtttattgtgggaaacagttgatggctgtggcagcatcctaccactcttcccttatcgcgacatcctgcaaagcatccactccccaacacgctgttgtccgtctatactcgaccaaggactggaagtcaattccagttactctcggtggtcattcgttgacggttacacggattgcgtttagcagagacgataggttcgtcatcactgttggcagagaccgaagttggcgacttttcgaggtagaccaggatggtcaaagtgagtctcctttttcttttcgtctccttgtccttatcaaagtcatcgagaagctgacgtcctcaatcccggatgcggattcattctttctttaaaaggttaccacccgctcacgttcagtcccaagcctcacgctcgaatcatctgggatgtcgctttctcccctcttctctttggaacgaacgacatgctcttcgccaccggttccagggacaagacggtcaagatctggaaaagaccaagtgctgaggattcgaaagtttgggagtcggtgaaggttttgaagttcgaagacggggtgacgagtattgacttttatggtggcttacataacggatggtgagaaaatccttccctgacttttctgtggtccgcttgccaactatgatgggtttctgattcaagaacgactctttttcttcttctcaacgctatctttggttttgatccttcagcttggtcctggcagtaggacttgagacaggccccattcacatcttcacatccgcccctcttgtcgagaatgtattgcctactgagtggacatctcgactcgtcatggaacagtcgtacgtttctttctctttcccttacacaacactgcgcggttcagtctctaatgctttcttctttgtctggccgtctctttcttccctgtttctctgatcttccctcggggttatcagggtggctcatcttgacagtgtcactcgacttgcattccgaccacctacttctgactcttcggcggatgagtcgtccgtcttgaagttggcaagttcaagtgaagataggagtgtgagagtgtttgatatcagaatttaaggacatattgaacttccgatataacaatatagaataaaaatatgctcaaaactttgcctgttgacttatgttttcgaaagaatggaaagagagaaaaagaggggatatgatagtacatatgctcgatcgatagcctgcaatctgaatctccttgtatcgcctttcttcaagagttcgaatcagttaaagcgaaatatatatatagatagatagaaaacaactctgaaaagcgaaaggaacatggccgagactttccaatgagggagtctaacaagcaggagatgatagagggattttgacggtagtcttttccccaaacatcaatccattgagtcaagacaaaagaccacttcatgttcagcaaacaagcaaacagaagaaggcacaggtagaagaaatgatgggatgggcttacagccagacctgaaagactcgtttccttgtagtttgaatgcatgtcgatactcgtcaggcgcatcgcgtggatcgcatcatctagagagaccgagtgtgtaccgtcacctgagagggaatttatttcagaagattaggggaaagaggaaaggtcagtctgtttggagcagataaaacgggaaggtaacggcttctgcgagattacctgccaacgccagttgagcggctacatgaaaggaaaacaatgtcgatttccaacttggttagagatgcgctgagtgcgttaggaggaatggtccatatacactcaccacagaccgcttttacagctcctagacttataaattgaggcaagaaaatcatatcattgtaagaagaaataagcgaaagagatggcgtaagagcttcagcgaacgagttgacgaacctgtttcgctcaatacacgggatctgaactaatctactcaaccccaaatccgtttattggaaagagaagactcattgatcagttccataagccctccctatgaaagcatagatcagatgatagaatgatcagcttacccagcgacgggatcacaagttaacctgatataaaacagaagttcagtttgtgagtatatgcactaccatcccaatttatcggataagtgattgcaggatgaattaacccaagcgaatgctcaattccgatctctgcagcctgcaagatcatcttaggactcccttcataagtagaaacagacaccaaatggaaaatcataaatgagacgttcggctaaaatcacgagatagtcagtgaagttcacgaacctcccatctataccaagagcgcggtgatcaaaaacagttcagtctctatgattagatagggtccgacaatcagaagatgagaaaaaaaaatagagacaaacgtacgcaagccacgaaaccaccggctgccattgcgcttgcgacgccgacctcggccatacatcctccctctgcagcagagattgtagccgaccgtttaaagagcatcccgatcgccgccgacgtcaacaagaactggaacaagaggttgacgagagttcaagtctgagtgcgtaagagaaggtgtgatatgatttgagggaggcataccgttttgacatctcgctctgcgtcatcagagacaaactcgataatatactacacagcgcggatttggaacaaacgaactattatatatttgaagtagcggcagctctcgatcgatagttcgacgacaaaagacgtaccttgagaacagcagggatgacaccggctgctccattagctagaaaatgcatcgacgagtaagatgatggatcagttccagcgccttcatcgaagagatcaaaagcatgtaaacaagaactgaggatgaacttggggcggttacgactaaagattaaatagaccagatcattggtcaggttttactttcccaaaagattgaacttgagcagacgacatacctcggccaccagccgcgttgacttcattgactgcgattgcctgttacaacatatatagaaagagttggtaattcgaaccaaagctttgtatcgaagacagatttcactcacataacacgacaagaagtctacacccggctatattcattatcatacaacccatcaccaaattgatgaggtcaatctctacgactctagcgatatcgagctgcaactcagatcaaggataagcggctcagtactgatgagggactcacgaaaacagtgtttttccaaggtgtcactggcaaatcatgagtaaagtctccatgaaccaaacctgtcccagacggaccgagtcctgacttgagcggcaatggcggaggcgaattgaatcctgatgccatagtgagactggtagctgtacttgacgtggaagatccagctggtgcagaaatcttaggtagtgtagaggcagtgttgatggatggatagaatcctttggaggtgttcaaaattgccatgaatgaggcttgttatataaccgagtaagaacaggacgtagaaagacgaacctttgaagaggcgtcgatagaggagaggtgaacggcgcttgacgtttagtccaccaggaagaatatcctctcctgagatagtagaggagattgggagtggatacaacaccatattattcgaacagaaaagtcagaaattgtgatagaagataagtgggaaacggaacacatacgagaggaaactccatctctgatgcacgaatccatgacaccccagatctacgggaaccacacaagagaacccgattagagaccttgtttaacacgacattgaatttaaaccctaactgtaccttgagaaggttatcagtgatctgctgggaagtcatatatgacaactcattgttccaaactcttcaaaagcgccgacaatggtcagctggttattttcggcgtgtaagcgccaagtttgatcgatgtgagatgaagactcacagctgagcgatcgtcaactataaatatgaccagaagtttgcaagctctctaagaaaaaaagacgacgattttgttgaaaacaagatagaaagaggagacaaacattatgcttccttgtgagagcttccaacgaagctgcgttgtggaagaggtatttcggttgttgtttcttcttatcttcattcggcccaccagattcctgtccagtcgttgtgtgttcatgtgcgcgctgcgattcttcgctcttcaactcatcgggagctgcgattccttcaatcttgtcagttgtcataccatgggtctggtctcttctggcaggggaagcggccgacttgttaatcgaccggtaatacatattctcgtctactttggtacgttcattaatgacgaaaccaccaccaacctgagattgaaagagaaatatcaacaatcgaaaagcaattagaagaacaaagaatgcaaatgattagaagataagattagaaataataataatgacttacagagaaatactcattggttgccagaagatcaccctcattatcaaacacactgaatctcatgccgtttggatgagttggtctacgcgttccgatcaagcatgcaaccagatgggagattgtaaaattacacagcatgaccaaagaatctaaatgaacgaagaagaatacgtacaaaggggtcatgttccagatcatgtccttgtccatatcatagtcgatgatcctctttccacccaagataagctttttgttgttcagaatagcgtcataacggcctgcaagggtagatgtcctaccatgagaggataacgcaagtcaggtctgatcttggcgatacaactgagaagaggaggtcgatagaatataggcacgtactcaattgtttctggatcagacccttccaaacccatcatcactgcctgaggggtcatatgtctagcatgttcacagaaaacacgtgaagagcaaaggcagaggaaaaggcggaggttagaaaatcatgaagaagtttcatcaacggtttccattcaagatcagcaagcatgcacgtcttgttattgtgttttcgaaatgaacgagacggaaggcagcatgacccggaagacagactaacccttttccggtggcagccaaagaaccatatagagagactttgatagtcttaacctagaagtccaagagcgcaccaaagtaaagagaggaattacatctcgtacatcatcagacctgatggtatccagaggaatctgcaccgagacaacaaggctgaaaggtgatgttaccttatcaatcaggcccaactcttccaagtcctatttcgtagaagagaccgagcaagccaacgatatacatccaaacgtcgagtcacaacatcaataaaactctcgggctgttttgaacaccgacaaacctgagaagaaaaaaaacaataggctggactgacaaagacaaagattttgcctgctctcatcggtccaaccgtatgggacgaactagggccgacaccgatggaaaacaggtcgaacgtagagatgacggcatgaccgactccaggagctatgtctctgatcgcatcatccactgtcataccctctgaatagctatcctggggtggctttgggggctgaagaggaggaggagtcgagcgcgagaaggaaggttcgacagacgtggccagatcagtctgaagactcgctgatttgttgataagcgagccgagtgaccggagaggagctcgagtgagctgtctggacacagccgagggaaacgacgatctgaccgtcctggaaagtagtctgcatgccatggtctaaagccgtttgctctgtgttgtctggtcgagccaagaaggaaaagaggatgagacgacgagctgaaggatgtggaggatcttgaaatttcggcgtggaccgagaaagatgagatcactgagtcaacatgaaatacccgcccgttctcatttgtccggctcttcttctttcgttgtgttcatcacgagtgttgatcaatgtcttgctggcgcgtacatacatacgcacaaacgtacatacgtacatacgtacacatggatgatggcatgggaattggcatgttataatcaagagatgtctgatctgagcaacactccaaaacaattctcgcacaggccaagaccttcatgttcgaatattcgtagattatcaaacggtcgctcgcaagactagatcggtttgttaaatcatatcgagcatcagaaacatcagtcgtattcaacaactcatcaagcggccaagagactgggagcatagagtggtgacaaagaaagattaacactcacttcgcaagctaagcattctgcatgccactttcctcccaaggcctctagtacctcacccgctattggctttctacatttcctacacttcggagcgtgcagccggacgtgacatttgtcacaatacggatgtcctttgaacaagttgatgtttcccgtcagaccttctccctcctcctctccctcgccggccgctccggctgctgaagaacgagacggatcgaggaacgggtcaccacactctgagcagaagaagtgtagctcgtgatagtacctgggagtccctaacgaagggtcggtgattgtgaagaaccgctcgtccacaatcggagtcttgcacgtgtaacatctcgtggtgaacagctgaggaacatagctggcagctgatcagctggagcattccgacatatcagaagaggaaagagaatttaaaaaaaactaaacaaacctcatgataatctagatgacagtagatcttgccttcatgttcatatgaagacacatgttccaatagcaacgaacacgtcgtgcatctaatgccatatagggttcaaacggatcggtcgagcggtcgatttgtcagttgcttcgaactgatccgatataccgataggagcgacttaccggaaacatttaggatgccaatacgttccttcgctcccactgaccaatctaccgaggatagcctctccacaagtctcacatacgattcctccctttcccctccctctttccgcctgagctgtactcgacttgaccaccaccgagtctgccgccatccccggattcgagcccgagcccggaccgctcccaccctgacctggcagcatgttcttacttgcggactctcgagaaggtgaaggcggtgcgtctgaagagaacgtcaccgttggtctcgacggagacacgacgcttgccgtctctccttctactgctatcttttctggctcggcgtcggcgttgatgtcggaaaagacgaaatcagggagaatcaacggaggtggaagtcgtggaggaggaggtatcggcgtgaacgaggaactcggtgcttgtctctcctctctcttgttctcttccttccccttgtccttctccatctcgactcgtccaccatcctgttgatctacactctcttccgtcggttcaacaatcacaggaacagatggaatgggtgaagccgttgtcaaatccattcccgccagcttatcgaccagaccgtcctcctcttgctcttttctaatcgccatcggtgtagactgttgcgagagtattttctttccttccttcacagtcggcatggtgtttgccctgggtaaaactgaggtggcatttaatgtggttcccgatccaccagtcgtctttccaacctcggctgatcctctatccagacttttggaaggcaagatcccaccctttggaacgctgggtaacggtctcttcttatcactcgtcgccatcgtagtggccgtcaccgtctcggtccttgttaaaccagactcggagggcggcgcagagttgagaaccggaggaagaggtctaccagtgagagaattcatagtggctgtccttccgaggaggttaccggactttggtggaccgggtaacctgtggaatgatgaagttggcatgttctgaccggtagtcttaggtactgccgttgcactcgttgtcagagccctgtcgagagctggcgaggaagactgaggaagaggtcgcgatcgttttgttggtgaagaattcggcgagccggtcagctgggaagagaaacggttggtcgaagaagtcgaaccagaggattcagtagcggtggagtttagcgatgaaggcagaggtgatagttccggtggaacttggataggaaatacaggtcctccctgagctgattcagcaggtgcggaaacggaagcagaaccagacgcttgaggaactggtgctggttgagaacccgaagaaggccaaagtgggggagtggactgaggagcatatggtatatacgaatgcccgggcgtatgacctgggtgaggaggagcatatgtaggtcctgccgaaggttggggttgagtgctagggtatcgatggtgttgttgttgctggtgttgctgctgctgctgttgttgttgttgttgttgttgttgttgttgttgttgttgttgatgggaagagtggttcgtttgatacatgagcactccttgttgttgctgctgtgaaggaggaggaggaggaccggcgagagaatatgtcggtatataagcagaatgagtaagaggagctgcgaccggcgagtgagaagacacatgaggataactcagaggagcggtattatatccctgtgggaccagatgaggttgctgcagctgcagatgctgttgctcttgctgtagaggagcatgttgagctgacggatagggagagtaggcgacctggccagaaacctggtaagattgtgttgaaggggtatatccggtcccggtgccgttcgacgggtgagcttgcggatgcccgtagctgtaagcttgatgggtatgaggatgtgaagaaaccggctgttgtgactgttgatgttgttgatagagagacagagacggtggctgttggtagacctgctgggcctgagagatttgttggtgttgttgccaagcgttcagaggagttgccgtcggaggttgcccatagatctgttgcggttgctgtggatgtgactgggcagccaacccaactgcacccaaatgaggagcgtacgcataaccgtacggttgactgattggagacgtagctggaccagccgccgtctgagcctgtatcggtggttgtgtttgcgggccagatgaaggatgatctgtgaaggccgggaggatgagaacggtcagctagagaagaaaacacaacagcgacgaggcaaagaccatacagtactggggataaatctgttgttgagacattcaaccttcagggccgatttggcagagtgaataagcgagtgaatgagactagatgagctagcttgagctcttgtgagtctctatgatctctctcggacgaaagagattgcaagatgttgacgagcgatgctgatggtttgatggcgaagacgaaagtctgggaattctcagcgttctttcattttctttcgatctattgcttcggggttcgtcctcactttaggtcggttctttatctgaatcatcacgttctcgagagagatacatcatcaagaacacagagtaatgaacatttttgacgacttggtagagaaagaagagggagagagaaagataggatgcttgataaacacaagtagatcctgtagacatgcagacaggacgattagattacgaaagggagaacggacagaacatcaacgacgacatcatcggcaaaaatgaaactatggcgcgctggaaggatgctggaccaactgggagtcttggaacagaagaaagaggaaacaaaggcagaagaaaagaccaaaaagggtataccaacacacctcagccctctttcacttcaaccaaaattaggctcgtcctcctctagatcaatctcgtctgcccagctctgcgttcttaggtgaacgccccacgagtcgtccgagaacgaagggagtatcattggtctctccacttgattctgttcttccttcttctgcttgacctgttcctctgtcgttattttcggttcctcctccttctttcctctcgatccctttccgcctggtgtatcttccttcgttttgggcgcattctttttcttcttctttttctttttgtccttggctcctccttctttagaggacgctggtccagcacctgcaacgacgtctcctccaacacccggcttccctttgggtagattgaccacgattcgatcgaccggtccctttccgccagcaccaaacagcgaatcctcctcatccgtccgtcgccttctccatgagtccccctcaacaccatggccgtcccgatcctgatcctttgtctctgctagcctggccgagataggcaggtttaccaccgggtttggcctttcttccgcagtagggctggacggaccggccgagtggattggggtcgatggccgagaaggaaagatgaacggcgctttggaaggatcgagcttggacaaaaatggtgggagcactctggataagctcggtgacggagtaaacgtcttttggaggtcttcatcaagttctgaaccatcgacaaaagtcgcgttcgagcctaggtgatcggattggatgatcggaatacccatggcttctacgccctttcctgcggctgtctttgaagagccttttcctttcttcgcgttctttcccttcctgcctccttttcgactccgtttgtcttcgtagtcgtcttcatcgaggaaacagtgcttggcagcgttccaatctgaatcaatgttgtgtctggtcgatcggtcgacttggttcgacttggagtccagaatcctagaagatcggtaggctgttgcaggtgggacctctgcttggcttgacgcaaaagtcgagagaggctgatccatggctaatttcgacgaggacgaagacgagacggtgacctctggcgtcttattggaaacctcagcggacgacgactctggcttggtttcaggcttgctttcggctgagtcattcgatccagcagtctgtccagatggccatggttttcggggtgacgaacgaggaggctcacccgttcggtcttgatgtccagaatgggatggagggccttgtgaggaagtgctggacggattggtggtagacgccggggtagaaaccgaagtaggtgccgaaggtgtagacgaaacaggagaagaggagtcttgctgaacagaagccagagtgacgaccggaggctgagaggagggtgcgtgcattgaagcggatgaacccgttttcttgcccactggagcatgcatcgaagctgccgcgcctgacttgaagccggtggtagaagcaggagcagagagaagagagctagcagatggtggagcatgaacggaagctgacgaccctctcttaacagaaggtgagtctattgacgtagaggaagagacattgattgcatccagggaagaaaccaggctggcggtcgagaacgcgtcgctggtgatcgttgtcgctggtgaggaaggggatgaaacggcagacgaagcggatcccttcagtttctcaagcacacgaggcgatcgaaaccgaggaatatcttcttggggggtaaagcctggtctgactttgatttctttacgaacgctgatagcatcccaacgaacaccacgtcaacgtttctttagcttgattttggcacgatgtacgaatacgaagaagaaagagagacgtacgtcccgtccggccgcctagaggctggaatggcaccctgaacgataccggatgcggaagcagcggtggtcatggtattggtgtacttatggtactgtatccgactagaacaaggtatgccaacaaagggaagggtgagaaagaagaagcaagctatgggaaacgtagaagtagctggatgatcgtttggggtcgaaagatgacgaagatgaaattccaaagattctttcctttttttccttttccgttcttccatacactctcatcatcatctcatcatcgtcatctgagtatattcagcatggcatcctcagtatcaacattggcagcagatcctgattgtacaacaggtctctgtcctccgctgaaagcctctagcttggagcgcgatcaagctccttccagcagcaccgtcccagctacgtcgcctgtcactaccaccaacaccagcaacgataatgtcgccatgactgcagaaccagtgaaacaagcagaaagtatcccagagagcaaagagtcagatccactgctggatgcaagcacgttcactcctcctagattggaggaatcagaaggatggagggtcgtcatcgagttttgtgatcgggtttgtagtcgatctttttactctctacccatgtcttgcgcttccttgaactgatgaataagatgttcttcgttcaacacagtgccggtggcttcatcgggcgacctgggttcagacagaactcttcctgacgttcccttcaccagccatcagatcgatatctcttattccattaaatgctccagagacaggtggtcggttcagagtctgggtgtacaacaagaacgaccaggtcaaactcgcttgggatagaaaggtacattgtgtttatctgatctgacattggtagaaatgctggatacaaaaaacacactagttgctcatctgtggacgtttcgctgaacacctgatgtcttagatcgaaggagggtttcccgagctcaagatactcgtgagttcaaccaattctggtctgtctgtttgtgcaatcgacgtccccggtgggtttagtgctgatcatacgctgtgtttgcataaacattgaaacttgcgatggtcttgatgtctgaagaaacaaagggtccgggatatcatctcgcctgccgtgtcgctgggccattcggatgtccattcaacaaagggcacaaagcattagatacacgttgccattctcatggaagcttatatatgtagatacttcatcaactgtcaaatacaaaaatgtcgtttagttgaacgagacatggaagaaagaagatggaataagaaagattcagtcgagacgatgtaggctgagtgatcatttcgtcatcaccactactaccaccaccatcatcatcgtctgctcataacatagaacatcgtcttgatccattgacattccaatacgcgcctacacactcactatagacttccggtgaaccatgacgaactgtcaagacgatctcagtaagttctctgtatcgtgtcactttctgggatctgcctgatggcttgtttgctttggatgctgactgatctactcttcttgacctacagcattaaccgatctattaacatcatctcatatctcgtctcgtctaacttcagggtcgacctcatctaccaacctgtacccatacatcgatactgacaacgtgtggggtcttaacctcgaggaaccatctcgatcgaccctgacggccatagccggcgagtcaggttcgacaagtttggtcgaccgacaggcgggtgaagggagaggagaagccaaggttgtgataaaaagctgggaggacagagaggatgatagcagctgggtggagagtggagtagatgaccaggtctgtccatctgctttcgttcgcactcgagtcgtagcttggctgaacgatatcaccatggatgtcttcattctatatagcttattctgaatattccatttgtccaagtaagttcaacaaagttcttctgcaggttgtgttggattcaatcttgcctcattttgattcgactatgcttatccaattcagaacgtgagagtacggtcaatattgatcaaaacaggtacgtccgcaaggtctgttttctgctgtctgctgtcttgagcgcaacattcggatctcattgttggattgaaaggtagaggagaaaccgcaccatccgtagtcaagatatttgcgaacaggccggaagggtacgtttccgatatgtgtcattgtgttcttcagctttgttcacgctggcgatggccgtctttgtcttctcaacacaggttgacgttttctgaaatcgagtcagacctcaaaccaacgcaagagctagcgttacacggagaggacgtggtcgaatacccgctccgggtacagtctttcaaggatgtagtctcgataggtctgttctttggcgaaccagaggggagtgacaagtcgagagtatagttagttctgctgttggttttgtttctagaaatcggtcttccttatcactgactcgtgaaccatcgcttcgtccgacccaaactggctttacctatcagttacattggcttccttggcgatccgaggaatcctcaaaaagataatgatacagagcttaccattcctgccgccttggtaagctaccatgattattagggtcttccatctgagacgaacgtcgagaagatgtcttactggacgattgccttgattgtttgtttgattgtttattttggatgtttgtatcaaaagggcgcggatgcacctattggaggcatgaaggaaaccgctactcctcgaaatgccacgatccgatagtttttcgatttagctagaggattcggtcgagtcttggcttatatgtccatcgtgtttctgaagcaaggcgcggtgttctccataatatgcctcccatgaacttggcatgatgaaactcaaagcgtacagtagatgaaaatgagaagagaacacaagagcaagagaaagaacttggtttgtctgtgttacctcggtcagatccggtcgggcaacccaatccagccaaatattcaacaaaattgagattccaacgtcaacgacatccaacagacatcacactcggcttctgctacttgcttttcttttgaaaggatcgaccctacaccctcaggccactcagtctactgccatcattcgagtcaaattaccaacgatgaaatttgaggtcctcggtcgatgttctacgacgtatgttttcaagtcgtcatgtatctgaagctgaactttctgtcctaagggtccgagaaattggccaatgggttagggatggctgctggagaggttcatactgatcgttatcctgctcgtgttgttattgaatcgtagtaaggcaagggtctgtagaatgacacttcctcatgtgagtccaatctcttcacgctccgtcgtctctctgaacatagtgatttcgatgagggtcagtatcataacgaacgtctgaatcgttcttagggtccaacaatactgcctacattcatgcccgtagccactcaaggtccgtcgttctatctcaaggaaaatctttggtctctatttcatccgatggtttttgacacacctcgcgtatacaggtactatcaaggggttgaccccccaacagacggcctcgctaggcgtgaccctccaattgaacaacacgtatcatctgtctcttcagccaggagtcgaggtactggataaggctggaggagctcacaagtttcaggggtggaacgggaatctgttgactgtaggcccctttgattcagtctgcttaataatgccgttttccagagagctggattactttggctgatcgaagtttctatcatgactatatccaggatagcggagggtactttcatcattattattatgatgtctttcacagagtgacatatagcttaccctggttgcatctttgggaatgtctgggtattgatattgatcaattgcagattccagatggtttctcttctcaagtttacccagatcactgaggaaggcgttttgtttgcctcccctttcgacggaaaacctaccatgttgacagtacgttctgtcgtttcttggtacacctgatacccaatcccctctagtttgcgcctgatcgctgcgttgtcatcgtttccattcgtctcggtaattcggtgaaattcagcccgaacaaagtatagcggtccaacactcgatagggagtgatatcatgatgcaactggacgatgttgtctcttctctaagtgagtcatgcctcatatgtagatgttcatctatctgtatgtttctgacagatgatatcttgtgtcgattcaaccaagccactggacctcgagttgaagaggctatggcgagttccatctgttctctcttttccttccaagactaccatgtaatgatcaaatccatcatatcctaaatcagtggagatccgttagatggctagacagatgtctcaagtatcatgccacagctccccctaaggcccatagaatcgatcaaaagatctttgctatcgttcaaggtggtcttgatcccgagttgagaaaaacttgttgcgcagagatggtcaaaaggaaagatgatgctggattgggtggatttgccatcggaggactttctggaggagaagagaaaggtttgtaccctgtttggttcgccttggcttgacttgaacgagatgtagagccagtacttatcaaaagacatctttcgtttgcgatcatctccagatgtgttctggaaagtgtaagccatgctgttcactcccctcttcagattgattttctcattgacttgttcggaattgagtatcgtgttagtatctcgcaatgtaccgacctggtaagcttattgtgattcagtcgatgagcaaacacttgttgaagtctactcacaatatcgttcgttcactgctgatagctcccagccgacagtgagttcgttgctttttgcatcaattatgagctcagggctgatttgctgtaccgaacgaaatgaatcttaggaccgcgatattcaatgggtgtcgggtacgcagaagaccttttggtcgtcgtcgctttaggagtcgacatggtcagtttgtgatcaaactctcagttatcttaggcagcgcttgaacacgtagattattaaccttttgttgtcggtataggcggattgtgtgttcccgacaagaacggctcggttcggtatggctcttacatttgacggtcccctcaacacccgtacgtctctgtgaacccccggtaacatgacttcttcgtcttgtgttcatttctcctgacttcgatttcatctttaaatgcgctccgttatacccgatcgtatcgataacaggatcgatggcatgtattgaagatcatagagtcatcgaagaagactgcccgtgcccgacttgtcgaagcgggatgtctagggctgctttgaatcatatgtcgagtacgacgaactcccatcatggtttgttttcttctgttctcttgtttctatctactctttctcgctcgttgaagcttctggagggtagaactgacaatagcatactttgattcatcctgtatacaacagctatcaccttgttcgtgctttccttccttcttgtgacgtaatcttcacactgacagctcattttctcctctcccttgtctttcactcagacataacatcgcctttcaaggttcgtcccccttgtctttcccttctttctcatgattctcgatcaaccaaaccttacataggccccttccatacttccatcgtcatctagcccggttgatgggtcaagctaggacagctattttggaggacacataccccgcatacctcaaacgtttcttccctaggtatttcgcgaattctcaaggtggaattccaagttggtgtgtcgatgctttgaggagcgtaggtgttgacttgggcgatcacgtcagcgctggtgcgagaaccaagcggaaagcccatacgcaggaagaggacgaaggagcaaagaaagagatagaggatgaagaggaagcagcgatgaatcaatagacatagaatacatgacaagcagaaagaagccggattgccttgaacccattggctagatagaatgaacatcaatatataaaccagagagtcctctagagccacgatccaaacaaaacgatgaagaataaatcgaatgtaaaagtcttatccacctctctaaattcacatctatgtatgagagggacatcgcgagtgataggatgggcggtcgccggtagttcaagcagttttgttctgccatgcttcgatttgcgattggggaacaccgtcgagccttgtgagaagatattcgacctgtgcggaacagaaacatacaacgggatggattgagcgatgtttggtatgatacaccaaactttgatcaaggctcaaaggtgtaggccaaagcagagctccttacctcgacaactttggtgagcggcatgacaaactcctcgtacaacctcacgacaatcgcaggatccagtttgcctggcgcctgatcctgtccctcgataggtttacccatcccatcaaggtcttgaccgtaaagttttgccttgtttcgaactcggataagcagagcagcctcgacagctggtttggtgattaggttgagtagctcagtcgggttggggtcgaggatatgaggaataaagtcatgtggcgccaggaggaactttgattcagatacgaacatgcctgtgaatatgatggcaagtgtataaagaagtatacaaacgagagcagaaagttaatgggatgaccgaggttgatgctcaagagggtgcgaggaggaaggacgaaccgaagtgaactcgtcggctgatggcctggagaacctcaacatctctcgtggctgaagatccataattcccatcatcttccattccaagagtccttgtgatggcgggcacgatgtgctcaatgtaaatggatttgatcttttggttgacattcacgttgtgcttgtagagaagctttggcagatcttgaggagataacataggcatcgggaggtcggctatcgaagtgaatgggtgttcatctggagaggtatatcgtctggctttggctagagcagtgaaagagatgaaagagagctcttagcaacagaagcagctatacatccgacaggatagcacagacatcagagatggtaccaaccgtgaaaggtttcaatctctttcaagaaccactcaagccaacttccttggaagtctctgcctttcagttctttgaacgcgtccggggtgtatgtgattgggttgtacgcaaactgagctctctcgatcaaatctagcggaagaagataacgccgaaccggataaaagaaagacgatatgcttcagcttgaatgaacccgacaggcatatccctcactcgggatcactcacgaaagataatggtatcctccagccggttcaatgtatgtctgatcttgtcgagtgagagcaaggattcgactgattcgcccaaagtgactgtatgtaatttgaaaaacaacaactgggatcgtcagatgtacatacctgtgttccagtacacctggtctcgagagatctagacaaacagttcatgatgacggttgctgatgctgatgatggttgttgattgtaaacgcttgaaggacggaaacctctcaatgacgaactcgcctgttcgctcccgttcaccatcatcagctaccggctttgttgagctgactacatcgtccatcggtcgatagtacatagcttactcgattatactcatactagattgttcacactccagcatacacttactgtcaagaagaacggcgctgctttttctcaacctccaactcaaccggtgcccgtttacatcaggccggatcttccagaatccttttgcgtccgatcctcactcagcatcagcaagtgctcaaccgtccgttttggcctccatgtcgtccaatatcagtccaacagcatcatccttgggtacaacaggtccacctctgattgatcccgagtctggtgcaacaattaccaaggcaaagtcgatacattacgcgccttctagcaactcacatcaaggtttgttcgacgggtcgacaacccatcctttgtattgctttgattcatcgattgaaaagctttgtatactcaccgctgtagagtttttggcatggaaatcaaggtcaatcatccgataataaggtcaagcgtacctttactccaaagatgaaccgattggaggctatcagagctatagcttccaactcgtcttccgagttcaacgagtctgaatttgactggggatcgtcctcgatgggagcagagtcagtcttttatatacatatgtatctctataggtcctttgacctcatcttgctcatcccacccgttcatatatctgtgtgcatgtgtgttgtctgatcggtttcacggaattagacctgggatcgatgcatccaaagcagagttcaacaacatggtcgggccaagcgccattcaagtgatcgactggtcaatcgatcgtgtcctcgaaagacgattcgaaggaccggatttcatcaagtggtttcaatctggagaattcaacaatcgaccaaaatgggctaaaggtcggtggatcaacgtgagtctgactgtcagctcatttgaagtccgaaaccccaattccttcctcgttgacctcgttgacactgatcaaaactaatcaggtcgacggactgaactggaaggtcattcaggtatgtcaactctgaaaaccttgcgcctttcttccagtaccggataccgaaaactaatactcgtgtgagcgcgctttaacgatgacctcttaggctatagcgttgcagtttgaacttcagtacgtctacgagtttcattagaagcctttcgttgtctgtcaatcgtcaagctaatagtttggtccactctatgcaatcgacagtccacttgctctcgaagatgcaatcaaatacgctgctcatgctcactctaaaggttttcactcatttaatgagcaccatggtattgtcaaatctttgggttaactgacgattgtccgttttgctacaataacacagtggattggtacgccgatcaattgtacgccttttttcctcaagtcataggtcgtggttcaggctttgatactcatccctgagttacctacctcccaatgtcctttcacatctcataaatgtcatgaaaatagatttacccgccttcagatccacacgctgtgcaaacacgattcactccatcaatcgtcacatccgccaaatccaagtttcttcgaccctttgcttcgtctgttcaacatgaacacctcgaaacgccaagctcgggattttatcctcggtgaatctgaagggtttcctcgaaattggaaacagagaacccgatcaggattcttatcaggcggggccagaaatggtgtcgacatgattgacgcagaagccgacggtcagctggaacaagaggaagaagcagaggaagatagcaaggcggaagagttagaggcagaaaacgagtgggatgatagattggaggaggtacgttcatctggaaattgagcgcaaaaacagatgtacactagtttctcatcttacattcttttctctttcttgtcttatcatacttctaaagcaaatggcagcaagagcagttgtccatcatctgaccgagcattatcgagttcagatacataaacaacaactcagcacttttcttctcccacatggtaaggatcaggacttctttttttctttcatcgttccagacgtctgggtttcgttttatctgaggcttctgataaacaggcacgctcatctcggtctacacccattcgggcgcaaccatcaacgcatctatcgcgaagaggatccacacgcctggaactctacttcggacaacagaagactgttcgatgctgttgcatgcaattctagataataccgttgaccaatgtcttgaagttcgtgaatcgttccaattccatttcatctctataaccaatggccatagatcacctagtgctgagatgagatttattgtcggtcaactttggttctaatagatagccgaagaattcagacgtgaattagatattctcgagggtagagctctcgtgaacccggatatcactgccgttaggcatcgtgcgtagctcttatacctctcctctattctctctggcagatatgatacaatgtgctgatggttaaagggtccttcacacagtacacgttctctccggtcaactcctgatgtacgacttcatgcatctcattctctaatttctcttgtgtcacaccgactgactcacactgatctatgaattctcttacccatccttaggctgaagcgaactctcgctccgctacaaaatctcatcgtctctctcagacaagacgatcgagaacgaacaagggtagctcgtttggtaggaggttatgggaatgaaagctctagagtcgcggggtacatttcccgagaggcaaatatctatctggctgatgtaaatggtcaatcaaagatctcatttgtctgttctcatgagatggaacgaacaagactgactgacatcatgatttggctcgactcactaatacagatcacataggtcggtttatcacatcccccatattgcaacacaattcggagactgatctacttcttatcggttgcgctctaagattcggtcctatcctcactggaaatgttctccaatatggcaaccagcatagttgacttcatcttcagttcgtccttcaatatgcccatgatgcttatctgtccatgcgtgacttcacctgacatgatttcgccattatctagacactatgtcgttttcaaggtatgttgagcatgcggttggtcatcgtttgctgttacttagagttgttatttgacttcgaaccggacaccaatgtagtaacgagtccatgaaagtcagttccctgcttacttctgttttgttcatcacgaatgatcgtttattcactggacaatttgcttcccttatgatgttcggttactagtggctcacattcatctcaattatcttcctacctctggtaagcacacctcacttgtgaaccgctcctgtgtcataaaaattaaatttaaagctaaccatgttctggctcttggttttgtagggtttcttggtaagaatgctccgtcatgtcacgatgtctcttaaattgaccactttcttcttcatgtcgctgttgtttcggtcggcgtttcatagactggatactttggaatgttcgtcatttacattcaatatccttcgttgcatcaaagtcaactaattgtttcttatgcacccgtattaactggacctgattcaggaatttcactgtcttccccgagtaagcgccatctctcctcttccttcaaggtaatcttcttcctagtattctcaaacaacaggactaatctttctactggtcattcatagtatcggtgtgtttggagattcccaagacacttggggctcaaatccgggtggtaacatcggctagtgagcagctcctcttcttcgttgtctgtctttcaacatgagcgcaaattgaattttttactttctcgatttataagcttctggaaaatcacggggccgtatgtatcaagttcatcgtgtctttatacaacaccctattcttacaacgctttgaatgtattttaatccactagacttctcgccgttctttgcgcttgtatcctcatggccaacttcggtcagtatctgaagatattcgatgttttcatgaccgttcttcttcggccatcaaaggatttgattgatatttattctaactatatgttactcatctattctttgcgtgatacaggatcggtaagattcacttgattgccattttaatttcgttgtcatcagcatcaactcatttcatctctcttcatattgttcgtccagacggtccttggatggagtcgaagaggtctgcacagattggagcgatacgttagttcctacttcctctccttgtcttatgaactcttcccaatgtcaacaagtgtgtctaaccattcacataatttatcacacctttcgaaatgtctaacagaaacaccacaagattatcaaaggtctcaaacgaagcaaaacctcgagtagtaggagcagcggaacgcgacgataagaggaaatccgtttggaaaacgttaagtatccgttatatgtatgtgaatcaaagtatgtttgtaaggagaatatgcggagggtgagaaggtagtaaagagttcttgataagaacatatggatttgttttcgatgtgaataaatgaggttttgaactctaagatcggaaaagatgaagaaactgaaccaagcacccaagaccgagaaggaaaggaagaaaagaagagaaaacatggacagccaaccccttaaacagtcttcatacttctagcttgtctcctccatttaactccaaagatgtaaaagagaatcaagaccccttgtaagaggcccagaagacccagttgaagccaagtggttgatgggttggattttggaatgtcagttgtttgacctgactgacttatcgacgatcgaccaacttgttcttgggtttgatcacgattggaaggaggcgaaagagaaagaggtttagaggctcggacgatagtaaagatctcgttaagcatgtcgttttctcgattctatacccgaatgcaccgaggaaagagcgcggaattgccacatacagatatcaacacttgggaaagagaagggaagggtaagaaacaaaaccacggagaaacatacctcgagatgatccatattgattcccagagcgtccagctcgtcccgaaagtcgtcaattaccgtcctcagatgcttcctctctgattccaagttggcgactcttgtcgaaagcccagataatgacgtgaggagcatgccggtgttcagatcccagtttgctttccctgccaatatgctatcccagccctccttcatcgtacgtaatgtctgaatctgttcgtggacttcttcaatcgcttcgacaacgcgttgtttggaatgatctaatatcgtatctagaacagatggttctcgaggttcgatctcttcaaactacgacagatgcaaatcaaggtagacgcacgcaagagccgatcagaaggtcgtgtacagacctacatgagaaatagatggaaacacaaacctcgggttctggctcaggaaatgtctcgactggacgcatcaaatcatccagatcagactcggattcaatacatacgactgaagaccccaattaggaagaaaagtcatcagcaacaggaccactcaataggaaggtgaggaaaaggaattcggaacaaaccatattgaattgctccattgacaaagtcttcctggaattcgccgctcgcactggtcgtgttataaacaaacggcaccggtggactgttctctactggttccgtcggacacttacttcccctaagcccagagtgcctagcagtactcagattgtccatcactgtaaagttgctgactccggcgacgacaataccataacccatccagtatcctttgatgacattatcgatcaccgttccgtctctgaaagtagtatcgaaatcgtcagaccaaacaggagtacccacaccaatggccactctgattagagatccaagggcgttgatggtgttgtgcgagacaacggttgaagtataggcgccttcccatggtccgtagtcgaccataaggattcctcccatttgggtagaggattttgcgagaacagtattgtgggagatggtcgatccgggggaaccgaagattacaacggcagcatccgaagtgtcagtaaagacctatgggttggaaccaggggatgaattagagcgtcaataaaacccaaatgtagacccatgggagcctgatgtgctacacgattactcacattattcgaaactatactgtccttacaactcagactgactccatcacctagaggtctacccaaaggactcatctctggatctggtccgtccaactcctctatccattcttctcccaccggtccctatgtatcagcataccgtgagcaaagtcaacttggaacgtcagggaatgaaatcatttctacttccgactagactcacaatctcgttccattcgattatagcgcctacgcatcccaaattgtctccttctctgatatgaacagcagcccaacctctcggatccatgagtgaacatctctccaccctttggccttcgttgtttcctaacacaatcaggggaccccctttgtgatccggagtggctcgacctaaatctcgtcgacggccgtcaattcggatgttcaagatcgctactcgagcacagcgccgacagtcacctctgtagttttttgacacagagatatagcacataaatttcgggcagtggccgagttagcgaagtcgcgtcaggagtgtctgaatcaagacgatctaaaggcaagaatgatatcttacgcactgaacagcagtgaccgcgtctcctgtgatgatgagttgagctctcgatccatcgtttgggtaaccctgtgtactaagttcttgatctctagccgtgaaatggataggtcctgcgatgttgaatgtcgagtctcgacagagttgaactttggtcgaaggtccacctatggtttttgggtcggcgataggaaggtgataaatcataacagaagagagaccgaaacaagagcgacgaatcagctccttgtagctctcacgctctcggatagaattctttgaaaagaaagaatcaagtccagctgtctctccacatcaagagcaatgaagagaggaaagaaggatagaataaaaagggatagacagaccatcactgaagagcctgttgattgtgttttcgtctcctttggagagacaaggtgacgagtctgatgagtcggccgcctgaacgaaggacgaccacaaaacgaacgatgtcgcgacaaatgcgaaacttggacgtttcgggtatctcatcggaggttaaggagcctaaaggaactaaagaacacgaaagaaagtcaggaagaactctgaaagcggatgggtgaatggtatgggttgatcgaaagagaaaccggtgaacgcgtttcggagaaatccaactatcgggccattcttcttgcttgttctcctttctccatcgctctcttgctttcctcttgctattcacagtaacgagtggatcatatgtacaactggaatgatgaagaaagaagagcgcgaactggaaggtcgttaacaacattacgaggagagaaatataaactatatgtgtatgtagagttcaacagccagacaaaaaaaggaatcagaaatagcgcagaggaagcaacattatgaacggcatcctttggccagttcgccaggtctattggccaaaggatctgagggaagaatacataatcggcgaagagagcaagcaaggagcacgaatcttccgaaactgagagacacaacagattaattcacccaggggatgatcacggtagacatccaccatcgagaactttctggcagcgggtgcatatgctttttcggtccaaagcacagctgttatggtagacaaaacaacaaggagagcagaaacccgacagaatgaaacagagttagcatgagatctgagtgttcagtcagggtattctcagataacgtagccggtcgaggaaacagagaagtgatcagtcagactcacaaagcgagtccccaagctgtatgagacaggcagacggataccgatagagtgtatatccatgtcagctgatgccgtctgataagaaccgaacgagaagggagaatacacatacgaaagaacgctacagcggccaagactccaaagattccaaaccgtttcgccacctatcgttcaaagaatacaacacaaagataagatgttggatcagacaccaacacgcaggtgtgcaacagtaggtacacatgatagcaagaactcgagagtaagattgatcaaagagaggaacgaatggacaaacctcgtgtccttccactaagcaaaccatttcggacgtctgcggtcccaagctagtggcgatcatcctgttggccactgggttgtagtaataatgcatctgctgtcctgccggtgactcgtacggaacgacttggccagatggcccttgattgatgtagggtcccgcagggtggtacgttgtgtgtggtgaagcggaagggccagtgacgacagaggtatacgatggcggtggagccattgagggatcagccgatgatacctcgctggatttgccgtctttcgggagtgcgatcatggtgtctatgttgtcttggtggatgaaggcgttacttcaaggtaggcagatgctggtatgcttataatgataaggatgatgatggaaggtatggatggaaacatgtagcgacgtggaagaaggcgatgcaagtcgacttcttcattctccctcgggtttgagcggaacatgcagtcacctcaggatttgaatggtacatctatagcaatatctttgcatcaaacacttcttcaaagctctccggcactcctctcaacatttgcgcgctctctagcagtcgttgtaggctcgacttctaccgtctcgctcttctcctccggcttcttttccctcgacgatgtcgtccgagaagagccggtgacagtcgctgagcgcgaatccggttgaaggcccagatattcggcaacaaacactcggaggacaagatcccagcgtttcattgttggtatatggagcgctgtcgcgtcatcctggaaagaagtggatgagtttgaacacaacaggatgaaggggtttatcagctttgaaggatatcacgaatgggtctttcgatcagagacaaactcacagccaacgtatgccacactctagggaacggcgatgtgattactatcatatgccaagatcaaagccaacaacatcttagcatggccttcttttttgtgcgcctacgtagcaaccctcagccgtatacttaccatgcaaaatttctacgcctcgtctcaaaaatggcagatgatcatcactgataccccatccgacccccttgaaccagctaccctgttcccagtccatggtggcaacccagccctcgtccttccctaaatctataaacttcccgctttcacctagccggcgctcggcagacttcagtcgttcgaacagccaatgtgtagatgggtaaaacgaagggaccgtggggttcggagcgccgaggaggtcaaggagtagtaaaaagtccatactcgtcagttcggtagggaggggtgagtaagggattttagacggtcggtaggttttggaccacttctcggcaagatggctgaatgttgaacagaatttgtagatagagataagaatgggtgaaagaagtcgactcctgatgcacacgatgatataaactcttaccgactcccataagtgctgtccgtatcggtccacctgtcgttcagatttcacccctgacaatcagcccccaaattcgatcactgtgaagagtatgcgatgttgacgtccgcacttacatctgataagcttcctctccgtcaaagaatacgatttggattgtcgtcttgccttcactaagctctgccaacaagtcttcactcagcccttcaagcgcatctttaccttcacccaatccgctcaacctctcttttcgagcgttcagaagcggtgtcagagaagtcgccaacgacagaagaagggtgcatggaaacgccgagtccgtagcaccgacgaactaagaccactccgccacccacccgacaacaaaattcgaatctcggtagatcgtcagcgctcgcgtaacagaatgataaggtatgtcgttccatacgcgcacaacagacataccttgttccgaggtgacgtcaagaaaaacttggaatcatgatgagcagagagaacgatccgtctgggcgcatctgggtcgaatgtaaatataagattggtaaactctttctctccgaacggtgtcttgtcggtgaatctgtcctttataaatttccgaaaaacgttgacgcgtgtatgaaggaatgagtatggttagcaagatgcaacccggttatctacgaggaatgcgcaagacacctactgtctcaaccgtccatttaagatcctcaaatacggatgtgatgtatttctgtacgaatcgactgaggtcaaccgaacacaattgcagaagcaaaccaacttcagtggtcttgccttgggaaacagccttgagaaatgagcaatgccaagcactcactttccgtccgatccggctaagaacaacctttccccgcaagcacagacggtctttcagtcagtataaccgacatgtcttgttctttctcaggtttggagtgacacagaaagagacccacgcgttctaggaatcaatatcttgcttagccctccatctttgactgtgtgatcgagaaagccatcaatctgtgaattcggctgcgtcaaaacatcgagcaacgttgaatttaatggacgatatgttctcttcgaagctccatcctgctcatatgtcgatcgcgcactcccaaaatctacaagaagtgcaaacgctagcgcgaacgccccggcaaccgatagaaaaggtgagatcagcatggcttgttgaacagaaaggataagaagacgaagggtacgaaaggtataggctgggcatgtggcgtttctggtcacatgatcgaagctgtgtcttttcgtaaccccggcgtaaccatccgagcactcccccgccagggaattttattaacgctggctttctttcccagcttgcttagaaaccctggacggtcatcttccttctttgctcttccttcgttgctcttttcttcaactccctcgtgtgcttaacccccctgtacaccccagcaaggcaaccaaaaagaatgtccggatatcagaacggaacgcaaaacactggagccaacaacggggttggaggaagcgtgaaccacgagcggtttctcgctcaggtctacctctgtgccggttcgtttctaagcttttccttttacggtcgatagttccagctatcggaaatggtcgcaggtgaactgatgcgaaatgtatgtgacgtgtgacgctgttcttgtgttcgtttcgacttgttggaatggaaaacagactgtgcggctgagaacaacatcaagatgggagagcctatccgttgtagggagtgcggtcatcgagtgatgtacaagccgagaacgaagcgaagtcagtttcatgttttatcttcttctgggactggattggattggcattgaacggaagagaacacagcaggaactgatagctttgtcttgtattccctgtctccgtttgtcctttgccacgaacaacccgacatgtcgattatcaaacggtctattcgctctccgatacttgtttgaaacgacttcagtggtaagtttgttctgtctacaagccagatcatccgctcagactcgccaaagtcaaactaaacgcgtctttcctgttcacatctcaaatcattctgtcaacaggttcaattcgaagctcgataatgtcctcccggtcgtctatctttcccttctcatctcttgtttcgacttcttactctcacttggatcggtttttttgtccggagagaaacgaggagagttgtaacactattcacatacacatacaccaaaaaggaagtctgtacaagactatatatacaagaaacttggaagcatgatgcatatacttctatgagcgatcatatctttcgaactttctctgtttctttttgcaaagagaattaattgtggatacgagggtgcagaacctcataccgttgcgcgtacacccatcgtttctatcaagttagagacaaagaagatgctgaaacaaccattttagtgacctcttccacctctacctcccccccttcctcttcctccgcctcttcctccacctcctcttccgccacctcgtccgccccttcctcttcctcttcctc

SEQ ID NO: 911 - DNA, 29189 bp, Xanthophyllomyces dendrorhous
ccttcctcttcctcttcctcttcctctacccctaaagttcctccgttcagcctcccgcttgacaccctccgcatcgtccttgctcaacttcaaaacaccctgatggaatcttcccacacccatgctcaatcctcggtcggtttctttacggggcttggaggaggacgcagtgggaccataaagagaggctgaaagatgagcgttctgagaagtatgcagaagagtagtatctcctcgttctttggcctgccgttgagagcatcaaaagatagccgttatcagtactctgttgcattgctcccaccaaccagacaagcaagagggaaacaaaggactgaaaaacagaagaagagacgaacctcggcaacgcctttctcccatctctgtctgcctacactacgcattccgttgccaactctactagcacccaacttcatcacttccgctttcctgactgctctctcaccttctcccagcttaactgcaccagctagttcattgagtctgccttgaagagcagtccgagaggacgacgtgcccgtgggtagaagggaggtaaggataagagattgaagagttttgtctaggttttggtggtttcttttgtttttgggaatcacagatcgtgtttgaggaaaagagtttagtcagacaggcgctcaccagacataacacagagaaaaactcagaaacttacttctcgacgtcttgctcggtcttggtggcgccttggatgggtgcaggggctgctaggatctttgaagtctttgagctctgtgtaatgttcagcccaaccaacgatgaacgaggtcagatacagctactaaatagcctagaaaggatacagagaatatgaaccgacgaaccatgaatgccttgtaatctgcccgggaagagggtgtagacttttgatatttcgttggatcgaaaataacctctgtcggttgcttcttcaaggttgagctcgacttaggattcgacttgacctttgacggtagctcatcatcttcgcctgcgctccatctttcgtcatcgtcttctataccattctcatcatcctcttcgccaccctcgtcttcatcgtcgtcttcatcgtcgtcttcatcgttttcttcatcgtcgtcttcatcgttttcttcatcgtcgtcttcatcatcgtcttccccactccaaccttcttcatcctcgtcttcgtcctcatcatcttgctccacatcgagagcccggcccttcccctttgtgtccttcgtgatagtcccgaaatctccgagcatagctctggagtgagcctcgagcgcagccagcatcgccgccttacttgactcttcgtcgcccgaaccaccgtcttcatcggatccctcgtcgtccgagccagtgtacgaactagcatcggaagccgagtggaaggaggacgcgtaggatggcctatttgaagttggtttgagcttttttgatttcgagaaagaaccggaaggagccgagctgctcggatgagctctcttggtggtcttggtggtctgtgtcatgcctacaaagcgaagggagagagataaggattgccaaactgctgctactgatgttcaggagcaaggactggcagaattatttgaacggaaagatatttgcaccgcctctttgacagcacgtgacttccgcgctaacattaccctcacttcctcttccttccgatcatctctctacaaactaccattgactagcgacattaatccaccatgacgaccacgttgacgacagatatccccgccttgggcgtgtacgcacatctgcttcctccttcttggaagtctagcattcgggagtggctggatgaggacacaccttcttttgattacggtggtttcgtcgtaggtgaagaagaacagaccgctcagcttttgggaaaaggaaagaccgaggtacgttgtccttctgtttgagttgtgctccattcgtctttggagaaagttagggaagtccgaacagtagcatctttggctgacagccaaccagtcaccttcatcccatccgatcgatcacccataggccgtcctcgccggagttcctttctttgaggaagtcttcaagcaggtcggatgcacgtacgctcagtcacttctccctcgaagttgacgcacatttgttgatgacctgtcttgtttcgatctctgtagagtcgaatggcatcttcaggaaggtcaaaccttcactcccatcaccctgatcgccacggttcgtggcccggctcgacagcttctccttggtgagagggttggactgaacactctggcccgatgctctggaatcgcgaccaagagcagacggttgcttacgttggccagggagcagggatacaagggtatcattgccggaacaaggaagacgactccaggttcgatttagcagcattcttcttatcaaggtaggagactcgtactcatagtctgatgttgttttaccaaatcggcctcacgaatcggacagggtttagactagtggagaagtacgggatgttggtgggtgggatcgatgctcatcgatatgatctatcatccatggtcatgctcaaagacaaccatatctggtccaagggttcgtccttatcttctcttatattctcaaatccccccttctactcctttttcttgatatcacattgactaatagaagagtctacactccgtatcttggtcatgtattccaggctcgattacccaagctgtccaagccgctcgttctgtctctggtttctcccttcgcatagaggttgaatgccaatcgctcgccgaaggtcgggaggctgttcaagcaggcgcagacgtcatcatgctcgacaatcttgaaggtgaagaacttttctcagccgccaggacgttaaagtccgagtggagagaccgaatgaaggcaggcgatttcgatcagatggccggtaatggtgctggacagggtgccgccaagggattcttgatcgagagttcgggcaatgttgaggaaggtaatttgaagggtcgattgagtaacggttcgttgttaaactctcctgattccggtctttaaaatgatttccaagagtccgataaccaacgattcatctcgggcggctttttacgttccttcttctcttagacatcgacatcatctcgacttcttcggtgcatcaggtatgtcgctccgcttatgtccccttgcaagcccaatttcagaatcgtcctaacgttctctcttgttggtttacttggaatttgatgaaacgacagtcgacccagcacatcgatttctcccttaagatccgtccaaagaatgctccccagccgtccgtttaatcaccctttgttctctctttcttggtccttttgttttcttcttccttcagtttccaaagtatggtagttatgtgtacgaacacaaggatttcactttttcgatcaagtgagcgatatgacatgaacgaatcaaagactgtcatattctttggttgcaaaacttatataaatcaagtttgcccgttagcaggcatggaggaacatcaatatatcgatcggtccaaccgagcaagtaggtgaacaaatcctgaagatatatctgtaaagacaataatgacgacaataacaacggcataatggaggggattaaattaagaggtggaaaaacacagatgatctatagattgtcgagacacaagatgaaaggcaggttctagatatgggctgtcactccgatatggatcgctctggatcaacagaccaattggaaacagatgggttcaataaattagttgcactagactgacaagagataatgacagcacggtggaacctatacatactctccatcgcccttgtcggtctggatttcttgatcggggaacatcactcttcagtgccgaattcacataaagacaatcaatcaataatcgcccaatgtaaagcgccgaataccagatgaagagaggtcaaaaatagaacctaccgaagtctagcatagagctcctcgacaagcatctttctaatgtaaccccaagaagcccatcgggtcttttgtgaaagtagaacataactaggcatgatctgggttgtgttggccgccgcttgttcgatctctttgatcttttcgagagaaatcttcgggtcgaactggcgttcggcttgaatcagatagggaacaacgtcggccatgttggtacgtgactgatctcggtatccggttcgaacggtcaggccgtagatcccttcgaacgaacgactgacatttcgagtaaagtatgacaaattgagtaagcgatcgagagcaatggactgcatggtgcgataagatgaatacgtacactttggtgatgatgtatcgatcttcaagagcgacatgtggagcattcgttacctcggttgaagcaaagatctgaatgatatatcaatgagaagagagactccattcagtatcttgatcctcccttccaaatcacatcgcagaaacgagagcagagtaggatgaaaagttgtatcgaaaaaataggaaatgacgtacgacgactctgggtaaagcaggccatcctttgaggaactgatagaacgtatgcgggattccttttgacgtgttcgaagtcttatgaaagatcgcacacgtcggcactctcggcagctccagataggtctctcgaacattgaggaacagttgttccccgagttcgaccttgtcctccgtgggtgtcttcagcgccttcttctcgatagataccgaaggatttccgggccgtttctctcggggaagctcaacgatctcttctcgtaactcgaccgggttggtctgctggtctttttcgtcatcgcaggcaggaatttgagtgatttcaaatctggcgtgagccctgccctcatgggatgatgcgacacggtgacgacggaagatgatatcgtgtagtcgagatgtgtggctcttatcgaacgacttctctagggactatgtgccggaaaattactgggtcaacggacactttcaagattgtaaaaacggataagataaactcaactcgtccccagctatagaaggtcatgaggatggtcaaagcaaccccgacagaaagagggaaccaagctccgtgaggcacttttctatgaggccagatcgaaagatgttcagtaaaacttgtaagactagaatgtgtcagtttcaaagcaatagatacgaaccgaagactcgctccccagaaaagaccttcgatgaaaccaaagaatatgaggaacggaatcgcaagaagccaggacttgttcttgacgaaagggatctgcagtgcgattaatgttgtagtaacaaacatgacctgtgttgtagggtaagaagaaccggtgagaaagaatgctaaaatgctgcgtctcttggattgttagaatgaggccgtaccgtggagactgagagcgcagatttgaggcgttgtttgattcagtcataatgttcaagcattggttgagtgtatcagacagagctcacctgcaaatccatatgcgttggtcaagctggcgtccgttccaaaaccggccactgctccaacaacggcaatcatcaagatatagttaacagaggctgttgtagagatcggcaaggaaagggttatctgaaatcgtcagtcctgcttgaaggggattgatgattgttacctaaagagagaagcagagaagcccaccaaagtagatctggcctttgaaggcctccgaagtgtacttcatccttaatcgagggagtgcctccatggagatcaattgttgagtcaaactgaatgaggcggtgatcaacgtctgggaggcaatcagctgtgatgacaagccaaccatgaaaaaaaaagtctaagtaagtcatccgagggttcgatactctaccaggatcgcaacgacaattgaagacatacggtggcgaagagcccaaaaatccatagtagccaaaacactcccgatccggtaccaccggggatagaattatagaagatgttagggatgacgtttggtccatcggttatgattctgtgagaacagattagaacacgggcattagtgttgattgttcttgcattactgaagtctcaagggagaaatcagacatacttggcgccttgtccgaggtaagctagcacaagacatatgtaagcatagacaaacccgatccggatggaaggcttccagcgcaccggtaggaggagaacaaacaacgtcaatcattctgaactggacgaatcaaaggctagcgggttcgatgactaacagcgttaaattggccaaggttggcaaacattccttcacacccagtgatacacagcaggacacctgccaatgcatcgtagtcaccagttcgaacaaagactacaatcaacagagtacaggtcgtttgtcaggtcggttggagtgaagagtaggttgaactgtggatagggtattgagagaacgaaggacaaacacatgatagctcgactgggatcaaacgctctgaatatcccaggatgggcaacaatatttattattccagtgattccaagcaaggcaagccaaatgacaaccaagggggagtacacgatcgagatcttgtgtgttccgaagctctgaatgatgaatacgaaaataaggaacccaatggcgatcggagtgaccgagttgatagtgctaggtttggctacagcaattcctccgacggcactacggaaagaactcgtgtgagtatagatatccattattagaaatgtttgagaatatagatcatacctgacgacggagacagcaggagtaagaattccatcagccaacacaagagcggttccgaagaaagcctgtacattccccattcatagagaaaagagatcgttggttgaaattcgactggcaagagtgagaggataacaaacgtggaatttacccagatcatcaatggccatttcgactttttcaagatttcggatcctgtctttccttcaaagtctcttctgtcaaacccacgagtgctcgtcttggtaagctctcgctgctcatctgaagaagttacttttcggggaaacagtccgatgaatagtgcgaagactcctccttcgcctgatcagacattgaacgttgaaagaaggatttgtgtgagtgcaagttctgtttcgttcgacccgttctgaatatatatgtaccttgatcagttccaaagtacaaagcgatcaagcactgttttgcgataatcgcccgtttattcgtccctcaaagaattcatgagtatcccacgtcgactcccgaccgcaagcttgaaaagagagaaagggagaagggcaaatggaactcacatatttgacgagtggaaggagcgtcagtgtccaaacgatggcgctgactgagatgtggaaagggcacggttcgttagaaccttagagcatcgagacaagacaaggacgagaagtgaaggctcaccaccaccgatgacatcctctgctgaggggacctatactcatcatcgacgtacaatcgagatgagaattgtccatacatctgaagcttctttctgatcaggttcacagcatgtgatatcaaactccgcttacgtctccggatgcatgccaaatcccgttcaacacgtaaagcgggctcgtcccctttaggaagacagcgcataggcacatacgcacacgcacgcaagaggcgagagagagaaagagaggaagaggcatcagttagaatttaaaaaaaaatccggtcatgcccatagatataaaccagggtagaagggacagatagataaaaataagatgattacaataaaagacaaaccatatcagaatagatgattccaagggcagagaacgacatcactagcagctgcctcaagctctgtgattgtggagtcacaagttcactcatgtttgacaacgatgaaggaaagataggtgggaaaagatgtatgtgagacgatgagagacgatcaagagggatgtaaggtacagaaagagtgaaagagtgaaagagtgaaagaggagagaaagacattcatcaggtcaatggtttttatacccttggttagcatgtgcgtcttgcccagcgtcagtcagaagtcagctagagtcagacccgacaagaagagggacaaggagaaggggaacgagtgaaaaaggagaagaaaaaaaaaaggataaaaaaagataagtgggtcaaacgtcaggttcagcaggttgtcatgagtgagtgtgaatctcgaccaatggatcgggatggtcgatggaagccagactatacgaaagaaaggcgtcgtcgtctgttctttgtctctttgcccttgaatatgccgagcgcacggatggtaaacgctcatcgcctctcgatagagtaagcagctcgaaaaggagagaaggaaggaagaagaaaaagagagtaaaggtccactacaagggcgctgctccattcttcctcgacatctgcctttagaacatgttattcttgaaagaatgtcgaacttagaaacaaaactggctaaaatcgcgctcggtcaaccgattgggacggaaactgaatcggatcaagaccaaatcgagaccagaccagaccagaccagaccataacgatcagaggaacacagaaggataaccggttacattgaacaatcattccaaacgatccgtacatctcaccgatatacaccatgaggcgtatgatagcaccatgagcacacaggcaaggcgatgtctgttgactgatcgctcggagatgcatagagcgttactcttgttttctccttctttccccgtcttggtcaaaatacaaaaaggaaaaataagataaaaacaaaaataaaactaagaattaaataaaagttcttcctgattaggcagttacaccggggtttattcctagtagttaccatatcgtcagcagcagcaacgacgacgatgacggggagctgttcgcctcgagaaatatgacaacaactcaagcaagaagagagagagaacaaatggaaagcagtgctggcttctacaccagaaacccaaaattagaaggaaaatcaaaagaggctctgcagacaccgcttttcgccttctgtaaacttacacaggtcacagatctccgtcatgcttacccgtcccggtctgaccgatctcccttccctgttgtttacaccccctaaatccatcagatgaaacttcattgagatccaattcgtaacgacaaggtttcgttcctctagagaaaagaaaaaaaagaagatagacaacaagaaaaaaagacaaagcaggcggaaacctcgaatatactcgaggtctccatcctcaacatttacttcttcccttttctattccccttagcctctcttttattgttcatttgtatctttcgttcttttttcttcccttctcgctcaatttcgagcagttctctgccgctttttcacaccaggtgaagccgctgtagtctttttgagtctctttccagttgagaacgcgttggctgctttatgctttcgaccaagcgggtccaaaggtttgaccgcgtagatccggacctgcaagtaagagaaacgaatgaatcaatgatcctgttcaagcaatacctcctctccccagtaatcgagaagaaaagaaagaagaagaagaaactcacaagccaattctcactagtaaaggcctcctcgaggacatcaagcgagggactttctgggatctcttgatttctcactcgatcaaccgttcggccacctccaaagagctcggggaatcggtagtaagacatcttgtacatcaacgagttcttcatcgtggccgacctgagtttgtgtgtatgagagcaacacgaacaagaactcgcaagcgttagcctctatgtcaagttcgacgaaagagagagagagaggggtatcgtctcatcctacttacgcgtccttatcgaccttgtactctcccctgggcgtgaagtagttcttctcctgaacctcttccggccaaacaccctgtgcgattcgaaccatccaaaggaacttgttgatgtcatctccagaataaccgagcagtcctccaaagatgacgagaacatagtccacgtcgtgttgtttcaatatagggtacgacacctcttccgaagaagacatcgccttcccgacagtggcaatgtgagtattgttccatgtgttgttatcgaccaacgtcggcctatcagccataccagcgatctgatatccatagtcccaccaactcatcaccaccgcgtccttcttggtgttttgtcggagccaatagtatgcctctctaaagtcgtcgatcgtgttggagcttccgtcctggtttctcgtcgagagcacgaccgagggggacgaataggcggtcgatgtcacccaggtacagtggagaacaaacagcaaaaggaatgtgctcgagattccggtaacaagcaatcggggacctagtccaaagattcccttctcgatcttctttccagaagacttgttggcaacattcttcttgggggtatctgaagaggcagaagaggtctcggttgatgaagtcggtcgagatgcctgcagagggtcgacgggaggtcggaaatcaaggatgggctccggggttctgggatcgatgtaaaccttgaggaggttcgtcaacgccagagcggcagagacacagacgaccggagtgagagtgagcataagtcgaaccataactccggcaaagtacgatgccaacgcagcatagatgatgatgaacacatgggcgtcctctagcttctggaagcagaagaagattccggcagggaatataaagataagcatttggaggtcaaagaagaacgagggccaagctgtcggctggtgctctgagacggatgcgatgatggggactataaagtgatggaaagaaccagcgttaaaagaggtgtccgattaaggatcagaacaaaggcaactgggacatactatggatcttggcgtagccggtgtcccatagggagtagaaccttcctgtccagggagcaatcttgccggacatcgtcaatccgacaagcgctccgaacgcgagcaggaacacggtgataacaaagaccgtaaggagagtttggaactgcttgctgggcaagtgagatcggacgatggtcacaaaagagactagctgaagcagtccgaacacacctatggaaaagtggaggaaattgtatgagaagctgaccaagagaaacaagagaggaccagacgaaaaacttaccaagtgcggccatatgctcgctcgtcttaagaggaaggaagccgacgaaaggaacctgcatactcgccaatgttccgatcaagtaccaggacgagtaggcaatgtaaagcctattagtaaacctgcccatcaagaccaacacgaaggcgtggagcggaagcactattgattttggtcaaggagtaacaggtaagattagtcgacataacgattcaaataagaaaaagaaggagagaaggacgcactgttggtgatgaagacataacctccccaggcggcaaccatgtatccatagaacagagcagccattgttccccagaatgcagatccctccttcagcgcccgaatccagaggtaaaaggtaaacatgagcaggaagatagcaattgcctcattatcgtaagaaccagcgaccgaacgggagatataacctggttcaaacgatataagattgagaggggtataagagtgcttggctgtatttgaatagagggcaagacagattgagaagcacgaaccaggagcaatgccgatgaaggcagcagcgagtaatccggccgaatagtggccaggagcactcatctcgtttgtgaatctgatgaagtaccatatttacaaagtaagcatctgtttgacacgcagaagtggacgtttgaaggcgaaacgtacagataagttgcccaggcggtcaatccactaaacgcaggcgcgagcataacacagacatttcgaatgtcgaccgggacgttgatgaccctgaggaagttccagatgacaccagacgtagccatgagaccaggataaacagtcccaccgaccactctacccagggggtaccaggctgtagggtcgaaccagttccaaaattcctaaacgagattaacaagtatatatataagagaatatgaggtgaacagggtgagctagacaccaagaggaagaattagtgatatggaaacgcacgtagaacccatcgttgacgagaactttgcttgctcggctagatatgtagaacaaggccaggtgcaggtttcagcaaaagtgaaaggatcaaatgtgagaaggcaaagggaagaaaaaagggagaagaaaagaggaagaccgacaagttgaaccagggatcgctagagaagatgaggaatgggagaattcgaaattagccatcatgtaaaagcactctaggagcaagataaatccgactgacaattcgtgaataatactctcatgtctaatgacggcgaacaatctgctggcgacggctgctccagagatggtcacaaggattaggaaccggaggagggcggatgtgttcgtgtacgtggactttttgaattttggcaagctataagctactgacgcggccgacatgacggacagcgttctatctctctcttattgggaggtctaaggaaagaaacagagaaggaacgaaggaacgatcgagagcaaaggtaaggaaagaattgatggtgaggacgaagaaagagagatgtagaagtgaatatggagatggacaaggctgcggttacagctgatcacgttccggttactagctacgtaaccaccctgtcgaggcgagaactagactgatggtcaggctcagagtcagctttctttgacgacgagaaaacagaaaatcctagagaaaggagaaaggaggaatcgcgtgagcaggcagaaggtatgtatgtgtgatatacggatgagcgagaatcactcctgagtgcgttgcactcatggttggcctgcagagaaaagacctaagccattccttctttaatagatacacagctggacggcctctctatcaaactggtaacacaaactcttctgcgctcactcttcctgttccagttgtcctgtctgctagacgttctcttctactctgtgttcttattgcgtgtgatagtctctctgccttgagctgatgctatgaaatgtactgattgttgccacgtgatgtacgttagggttacaacgccacatgatgtattcgtgctactcgtagacactgccatgcctaattcgagtgttgcatcatcttggcagatcactttttctaatcactccctcatcatcaactgaccaagaactaattatctctaactcgatagcaacagacaacgaagtgtaaaagaactagtcatgacccaggctgcttcaaaaaatccgttcctctctccgtccaatacgggtacaagtcagacacccactttggtaccgcagcatacatcaagttcatatgggtcgagaaacccgtttatcgacccactagcttcgttcgctcctgcttcacccatccagtcctcctcatatacatcctcctcagccaatccgtacgatggcctctctccttcagaaatcagagagtttgaacaagccaaggaggacgaggaagcggcgaaggctggtaagacacctcctcatcgataccaacctactgtgcaacaagcgccacccgttgaaccgagtacccgaccaaccattacatcaagcagtcaaaatggatccagtactggtctgacagggaatggaatctatataggtaaattccattcatcgtgaagatctatatctcgtgtgtgaatttgtagctgaccatccattcttatcaatcttgactctctttagatgacgacgcggctatggaagcagctattgcggcatctctgggaacatcccctgcgcggacttcatcggtcgcgcaggcgaacatacaaccaccagcacttccctctcgaccacaatcatttgcttctccttcaggtccacctccaatcacccaaccacactcccctccaccagcctccgatcctccaccggcgtactctcctagtaataccaacgaacgtattcttgattctggtcctagattaccttcgtttgtagagagacctacgattcaaacaagcgtctcgtccgtgtaccctcaatctacaggaatacagcctcaatcgaccggatggtcggacggaggggttggaaaccccggaggatacctaagccccggcgaacccggttggagaccactaggccaaccactctctccctctgacggcacctatcaccatggacagcctccatctcttccgccatcatcagcgtcatactctggaccaagtagcaggccatcacctcatcttgtcacatccggaccgcctaaagatctgacgccgagtagaacaccgattatcggtcgaccgtacatgttagatggtagagttttgatctatcctctgaatcatcgctgttggaagtgtaacaacactgggtgcgttttcgttagcttctttcttttccgttcatcctgcttagtatgactcaaatccaatgtttaattattaatgtttcttcccaaatagtttcaagaacgacgaccctacccatccgtgccgtacatcctgctggaaaaagtatgctcgtccatactcttccgctctgcaacactcctgggcaaaccctggcccaaactatcaacaacctctaggcttcaatcgcacgagttggtctccttataacacttccacgagcaatcagcaatactatcctcaaatgaatttcggagcaggcgcttggagaccagtgacgaatgtaccaccttcaggagcggtgatctaccagccaggagatccaaggattggaggaagactttgctcaagatgtgtcggaaggggacttacaatgaactttcttctaatcgacgaaacttgtggtgcttgtggcggcgttggcaggttgttttagcgtattcgttcttctagaactcgtgtttccattccaaacactcttataatgtcattctttaatctaatgcttggccatttgtgtatgtccttccatcattctttacttgttgatacatgccatgcgtactcatgctcgagtcttcatgtagccgatgaaatcggcatatcaccagtcccaatcctgatcctagtaactacctcgatcgagtgttatgagtttcatatcgctcttcagcactctttcaactgcgttaattcaaaacattgatataccgaagagaaattgtacaggggtgtgaaagacggagtagagttttcttaattgatatatatttggggttgaccttgatctaacgaggagcactcttctcctatattcgaaaacaaccaaagacccacagagaaaaaacaacaacaacaacgagaaattgagcaagtattcggatataggaagcgaaaggaagaaaaatagaagcaagtcaaagagagacataccaagaggtcctttgcttcattgatcttactagccaggtaaggggcctaatccatcaaacacatcatcaaacagatagagaaagaaaaacagtgagaatatcgtcccacgttccagcagttaatacctgggagtaggcgaagcgagaatcgacgaaaaacagaggaatgggatggaaaactgactcctcctcgatcgggatggttagcaatcatgatcctacgatgagcgtccttgatcttcttgactgatatcgggtccctatgaacagtcgagattttcagacgaaaaaaggttagttcgagtaatagtctgtttgaatcttgatcctcatcagtatattgtattgtatgaagaggatcaggtgaaggaggcggtgacgaataactgcatttgattttgcagcagacaaatggagagaaacgagagcactcgaccatttcctccttctcacagtgtgctctcctaggaaaggtttccctcgaatagacgaaaagacagtgcaaccctattccgtctacccttcatgggtcttcacctcagagacaagttctccaccaagaacatccatatcattttcctctctttctcggagaccatgccttcttcatgaagaggagatagcaacactcaagagtatacagtaaagaacaaaaactacccacctgatgcccaagataagcttagcctctttgggatccatcttctgctggaacccgcccttgacccacatatccgctccaacctttgcacgacctgcaagtcggacgtaagcgagtcgtccaccggccagtgcggctgctccacctagcaacatagtcaacgacgccatttctattgccttgcttctaagccgatttgttttgttgtttcgtatacgtctggtgtagattcttgagctaagcgctgaagaaaggatgttatgtgtacgtgtgtcgagtcggtcgatggtccggaggaaaagacaagccgggttaactagaagcagcttagtggactataaacctctgtagatgcattttccttttgaagcacgtgctcaatcaatgtggctacccaaaaggacagtcaatcttcaacatcttgccaggttgcattttgcttacgcgtttgcaccgctttggccatctcttttccttcagcctgcactcactcgctcatgggaacaatcgtcttcatcttgcgctcactctgtccgttccacaccatctctttgtacaatggaaggtgattgatatgggtacaacggaaagtgaaacaggtccacggttcagagaactctcccttctacatcacaaaatacaacaagaaatcaacagaaccctgagcattttgtcgttccctatttccattcgctttctattcttcaaccctcacatatcctggcggacatcgttggacgtagacctgttgcgaatatttctttccttcccaatcggtggctctttttctcaagacagcaagcgtggaaggacaggaaatcgacaatcaggaatgatagaagaggatcgctaatcccccgatgtgcttggcccagaagataaactcctgaagaattcattgtaggcttgctcaatgtcaaacaacatctgtaaaagaagaagacaaatcaatatgacgttgtctatgacagaagccggatagttatgactgcacagagacagggcttacctgtctggactgctcgtcggtgatctcatcgcttgcgctcagcgcattcaaagtgatcagcctatgatccaaccaaggaacaggaaccgttgaataaaactatgtcagttttcgagcttgagcggagagaaatcgataaagctcagacgctcttgaccggaagagaaaaaaaagaaaatatcactgaccaatggaggatccttcctcttccttcccattcagcactagctttgaatctcgagtagcccgccatgaggtccgacaagtatggatggagttgatctttggcacgcatgtttaacttaagagcatcgagcagagtgatgaacgactgatacatatatatgagttggtataaaccaagacaagagagcgtcagaagcttgccgcgctaatcgatgaaaccgaatcctggacacctgataaagacggtaacatacctgtgtgacctcagccactgattttccagtttcgcctccgttattgtccccactagagtgttctacagtggctggcacacctagctttagtctatgaacggccgccggattatccatctacatatatgcatcacgcgagtcagaggagaggggtcgataaaagacacgaagatatattcttaaaagtgagatagaaacataggctcactctaaacctctccatgaaggcttctaaactaggaaattctctttcgggaacaagtttcagtattcccttgtattgagaaagcagtcttgtgcaggcaggtgtatatctgttcatatgccagtggtggtggtgtttgatgttgaacaataaaacctgttaaccaagcctgctcatgagctaaaatcatgatacaacttactctttggcactgatactatcccgtacataggctcgctcgaggtattccaacgagacgacgatggagaacaaggtggctagggagtcgtacaactctcgttctgccggtgtagtatatagtcggagttcctcatcctgtgtatttcaaaatgagtcactagccgcactaagctgaaaggaagactgcaaaggatgacctcactggattgattggcatggctgatagatggtggtcggtgacgaaagagtactctgagggaacagtagatgatgaacgattgccaagtaggcaaagccacgtgatgaaaagctgtgcaatcttttttccttctgccttcctcttctctttcacttctatttcagtataaccatccaacatcaccgttgccatcatcatcaccatcactagcagtacactccatcgtcaccaatatccattctatgtctgttacacccaccgacaagcgatccagatcccccttggctgcaaagtaccgaggcgccgtgatcgaggttcgttgaaagtttccattcatcttccaaatactcaaatatctaacggtttttacttctattcttccctacctttacatcttaatgtcttcaaacttatttgacacgtgattcaggatctccaactgcccccggctatttgtctaggtcttgctaccctagtgattgatgtcctctcgttggcctacgatcgggagttcgatcaaattccgtttgtcgctggttttctatcgatctcggtcttcctaaacaagtcgtgtgctgacgatctgggcctcatcaaactcaaattgtatcttctatgaaatttgatgaaccaaatagtgtgttaacagatcctcgacctagtcagcctcgtcggttgcttggttacgttgacgtgaaagccttgaaggagttattcgcccagggaaaagttcaagaggttcgctttcttatctctttactccctttcgtgcactgcctatactgaatacacatatcgctctcactcatcatctaccgaaacgatctgcttcaatccgtagagcacggcgatagccgatcactatactaaattccctacaggttccaagtcgactggaccaaacgcgtacccgtatactacaatcactcctttaacccctttggccgagcttgaaaatttcttcagtgggacaggggtcgcttttgctttgggtgagtgtggtgatatttatcgttacaatatcaaacatcgtcttctggatctctttttgagttcatcgaaagtttgagcgctgatatggagggtaccaattcatatcttgttcatctagtgaccgatgagaaacgacgacttgtttacggtatcgtcacaaaacaggatctcgaggtatgctcattcttttctatctttcggttggattcaatgtcgtgttctcaatccttgtgtgtttcgtcacaacagacttttgtgtcccgacgaaacggagttcctaccaactagatgcccttctcaacccatcctttctggctacttctctcttgctcatttccgttacatcttctctctcctccctatttctccttgttaatcaaccctttggtattgttttgtatctcttccatctttgaagcctatgtctgtacgtacacagataaaacctgaacgacatcaccctttcaaccgggcaagccctttccttcccccttctttctgcacttatcttgttttcaacaccctatgttattttgaaccatccgaatggcaagaattcatcacagctagatgagaagagctgaagaaaaagaaggaatcgagcacagaattctgctgcgaagtaaaattccagtttggattgaccatggattcgtatcaatacgaattatccgatcaggtagacaacattgcatagcaagatcttcatgctcaccagtataataacacagatattgtgagataaagatgagaggtggaagacagtagatgggaaacggaaagaggaagtcggggatacaaacctttgttcatgcatacggtgaaatgacgaaaggttgagactagaggtaaaacataggacgtgagaggaggacatcaacacaaacaaggaagacgaatcggagaagaaaacaaaacaaaagaaggtatcgtagcgcagaaggatgattgatttgaaaacagacagaacaaaatcaaacagatgaaaggaaggcggaagagcaagaacgagagaataaagaaacatgataggaggaatatcaaatcattccaatttttgagattaggaaacttcgacgcaacaaagaagcaacaggagactaagaacgagagatagagacaccggaggaagcttatctatgaagagagactaggaggaaagagaagatctaaaacatcttgaaacatgcttcgaagatgctaaaagtgacgatatttgttggctagcatgcagatggattaaaggaagcgattcagattcactctcggaattagtaaaatatcaagaaaaatggagaagaaaaggtcatttaaacttacaacagcacgaatcaatgtaggcccaagccctctataaaacactttccaaccttcccgcgcataagaatgctttatggttgacagtgtcgttctatacgggttcaactctccattcggaagtctttttgacgatgacgcggcttgaagtcttgtcttgacgacatctagagggaatgttgtctgtgtaataaagtcaaacgaccggtcaggcgtccgcagagagtcaggaagagaagtgacgaagagtcatagctcatagctcaaagggagaagatgatactcacagtccagctaaccactcctgctagaccaccagctaatggaacagcccaccagcctcttgtgtcctcctctagctcttcttctgtctgagtcatcaggtcatgatccgtatgaagtttggtaggtgaaactgcacggaggatgacttcatatctgttaatttcgatcgatattgttccgataaatccgggaagataagaggtcgaagatgaacacgcaacgtgggagatatggtaagcaagtggcgcgcgcctttcatcaatcactcaaatgaaccacactgacgtccagaagtaaggtccataacccaagtctcttagccagcaagactggaaccctcgatagagacccttgatacctgatcgtttgaaaatatctcgagcaatcgatacagttgatggtgggtgggatgtcgtaaaagattgttgcttgattttgacaagctctgttggcgcgttaattgttctgtgttgcgtttgatcataatcgcaatcgagagaaaaggaggcgcgtcagtgggcgtgcaaaatcctcgatattagaagttagatggacgaacgaagcgacaattccactgacgcatcctgcgacgagataactcgtcagattaggcgttcgtgtttggccttcagtcaaagggggcgcaatcaaagacattgtgtatttgaaggaagcgaatataagaccgttcactggagccactccgatcttttatagtcaaatagaaagagatgagatcaactcataaatttgcttattgagctcaagaaggagatgaaacgcactatgggggaaacaacacctcggtagagacccctgaactgcaaagagaacaaggaggtcaaagtcaaagatcattgtcaggacttggctatagatacatcgtcccagcgacaaacttcaccttttctttcttggcaatcagacctgaaggagcaaacctgggatgttagccaaggtgttctctaaacgctctttattagaggaaagatactaacgaagagctgcaaatgtcgatgtgtattgtccagaaaacgcagggttttgaaatcggaccttgactggtatcatttgaccatgatcgcaccttgtcaggatcatcaaataacatatgaaggtctgataacgcccaaagagagagctaaaagacgaaccggtatcgaaaggatgtccaacaaccacacctgctacacctgttcgagtgcgtgtcaacggccatagcgcatcattgatgcagaatgagagaagaagttagagaatctttcattatgactcaaaaggccagagcttttaatttctctatgaaaagacgacaaacgacatgactaaccacctgctgtcccggcaaaaaagtcaaggacaggccgtggatctaaatgccaaagtagagaccaaatccaggtgtgcataagctttgtctaccggaggcctataaacatggtgatcacatacggtttacacttttctctaccatatatacttttcttctattattcaagcgtctatcctttcagcgttcaatcacgggatatttgcctgagcctctgtagtacttgttcgtatagtctagctgtgtatacgcagaaagcacaagaagagttcttgagaagaagtggcgagaagaaaggacaagggtatgatgaaatgatcaagctgagagcaaacctttgggaatgctctaccagggtcgagaaagcagccctaaaaccccaagtcacgtgacgagattatataataagtgtcagggtccgggttcagagggtaacgggaaggttacaagaatgtgaccaggcagggaatagggctggcaagaaggaagttcaggctctctagcttggtgactgtgacgagagcgcaaggcagggaaatcgtatgaataaggttgatacaacaatggaacaagagtactagggaaccaagaaatgacaaaggattcaggcttggtagactatgctatgggtggcaaagggggacccatcttatatatcatccttagactccaaagattatgcataatagaacaagtcatagaaggtgctagaagcacctgcgctggaaggtcatatacctgcatgttgatgtaatgagagagcataaggaataccgaggcaggagaaacaacagaaccaaaagaaggttaccgaggtgtaacactcaggtcacatccctgacaataagcatttcgctgctgctcatgacgacacgtggcaatggcggacgcgtcattatatcgttcacgcgacgcgtttgattacataatacaatcagttctatgcttatacctgtcatactcgccttcaagaccatagcgacgaccacgatcattatcagtacagttacgaccgccatcgccttcatcatactcatgggccagcagacaaagctagattcttttgtgtttaccacttcagacagtccaaacgactcgaaatatatatctttcgtgaacaaggatcaaattctaccgacggccgccagagtaaagcagcacgatcctgaagatcaatccctatcgagtgaacatagtggggaggaaggctttgtcttggatgataaacccggttagtcttagtggaatactcatccgggtgagaatactaaaactgtcttcttgtgattcttgttcgttccggatttaacgcgtccggtaccctaccctcgtatagtgattctgtcaccaccttctaggtcgtctgtatcactgtcaagctcttcctccagccaagcaagacattcacgtaaacttgtctctcgatcaaacaaaagggtgatacagtcttctagcagctctgaatctgatcaggatcgcgtcagcaaacctctcaaacgcaacgccaagatgctcaagcgaccgagacgtgcagaagcagagaaggaaacattagtcgcgtccaatgaacctgaccccaaggttcgagcagtgagtgctaaaaggaaagatgagctcattctagaagttgtcagaaatttgaaagggaaaggcaagtcacaaagtcatgatcagcacgagaaggctggtacaggaacctcgtcgcctcctcgacctacagagccctctcattccccatcaaccccgtctggctggcagtcagcatccaactctctttttggcagttcacctccgaatcaggcatctcaatctcagcttataatacgtccacctatcgaggaagattacgactctgatctcattatcatagacgactcctcacctaccagtcctattaaacccatccctttagccttaccagctgcttcagcatataccaggcaacctcctgtgccatcacctccaccgattaaactaccctcaaacaccaagtcaagaacgagaaagaaaccgagtacatctttggtaaagcctggtcacagtcgaatcatcaaaaaagcaaaaacaaccccacgacagcggatcggttatgtgacggcgtcctcctcgagcgattcttctgaagaggtcgaaaagcccactggcgctggccgaacgtataagaggaaaaatcggacgagggggctgccgtcttcgtccgatgatgattcggcagggtcggaggatgcattttcagggcaaaaagctgtggttactcaaaggatggggaagagccgcatggttgtttctgaggatgaaacgaaggctatcgaacctaaagaaacaaagaacaaccggtcgactctcaaatcgatatcgtacaccagccgtcagagtggagatcttgggtccacgccaagctcatcaacagtccccaaggttgagaaggagaacggctcgaaacgggataagccgccgaataaatttaagaatgccgaatcgttgagcaacaccttacgaaagcctgtcactccgccaacagaatctcatccggatcagtcggaagacgttcctgacctgttttattcaagtccagaacaagagcgttatgttaaattttcgaacaatcacagaacccccgcctcaaaacctgaaccaaaacctgaacatgaagatagttctaaatcttccccgaaacatgattcttcatctcgaatagatgacgcgtctctggatctagaagttcgactatcgaaagctttcactcctatcaccgtggaaacggcacccttagaactctcctcatctcggctccccaagcctttgacaacccgtcaaaggctgtccatgtcaatcgtttcatcgaaagaagtcgctttgaaacccaaatataaatccgtttcagaatcgaagggggtttcatcaactgcactacccgaggtggatgataaatcttctatgacgagctcagatccgctagcagaagatggctccgcatgggttggtcccaacgatgtcacccatgaaagctccaagaagaatgaggaggagcaggtggtagagagaaggatgcaaagattaaagggtggaaaaggaggtggaccctcaaagcaacggataatcgtcaccagcgaggaagaagatgacaacaatatcaatcatggcggcaggtccgaggcaaccatcaaaagcaccagacaaaagaagagccgagtacacttggatccctcggattcagacgaagagaacgaaaatggagacagtagtgagggtcttcatgagtctgaagtcgaagatctagaggacgaccaaggaaaacttcgtaagttttgtctttcttacttaatcatcacatcttttctttttctgaaaactgtgtttttggcgattaggtatcgtcgaagctcgaatgcgttcggccgaagatcgaaagagcaaacaggcgctagctcggcagagcgctcttgagcgactaaagcacaagaaaggtttgtggcgcgtcttctgatgtagttctttacgattcttaatttgtcttggttggtttggattcgaaacatgatccagggaagaaaggaggatcttctgtacaaaccccatccaccggttcctctacaatagaagaaaaccttgaccagaacaatgtatgggcaaaggatgaggacggagaatggatagttagtggagatgagggaaacagtggttatatcaccgacgatatagaagatgcagactacacgtcgttgatgccgatggaattcaggtcagacgcttctcaggtgagtcttgatcttgctgataggacatgagagcttgagtgatgcgtacgatatgttctgactatgtgcagcgatgtttatatactatctcgatcggtagccaatggaccagtgctttcatgtcatctgccaatggcatgtgagtgttctttcactactaaaattaagtgtacataccatcaactgataaaattcccttctcgtcaaaatctttatgctaggttcattacatcatccaaggccggccgtttttaaaattgagtgcccacaatgactacttccgaattcctatgctacggctgagagagaagatgaccgatgttaagaatcagttcgtctcttcaccacatataaactatttgttcaacagacatttgacattaactaaaattgatcaaaaatcttcagagtagcatctcagatttggccttcgcccttcaatctttccctccagacgtatcctgcatttactggaggtgccattaaggatgctccaccatgtgcggcttgccgtatgaccaacagacctgcaacgagagcgattgttttgcgaggagatccgtacaacaagaaaacgttcaaggttcgttcggcgataaattttatatctacagggtttgaattcatgtcattaataagatttcacatcttcccttggcttgtatgcaggacctcgatgccaactggggtagaaaaggtccacccgagactagctatgtacgtgaagaaataagctgcattttggctaaagatccgattgcttctcaatacattctgatggggtttcgcgctgatttgatcctcgaggatttgttggttgttgtaaatgatatgtttcgtacagaatgttggaaaatactgctacgctcgagcgcatgtacgtgagatatcatctatagtctcgattctcttgcgatagtcgatcaaactcgtgattcttgtactgacaccgtagtgtgtatcctctcctttgttcatagaaatttcatgaggttggcagatatccatgccttttctagaacctgaggtagaattactgtactgattctcaaattacattccactcgccttgttaccactgaagttggctcattggggttcgtatttcgtcggtttctctctcacagatcttcctagtaacttgaatgctgctgatactcatgacaatattcccgggttcaatattcgctatcgacagagtacaacctgcaccacgccctgatagccattcttcaagttctacgcaagtcggttcacaaagatgacgatggcgatgaggacgacgaagacgtcgagataattgccattcgggagactgtcaagattgcaggaaagactgaacgtgtagattcattgccagattataatcgtccagataaggtgactgagtggttgcagaagcgacaatggatcaaacaggtttgtttcttttcttgatacatctaggttccttcaccctttgtcgatactgaaatatgcttgatttggataaatgaacaaacaggagtggctgcatatatctgatctgctgctttgtaacgaaaacctgaacgctccttggaagaagacggattgagcgtagttcatatatatgtcgactaaaagaatgttatgtggcacagagtgattgcgagtctggatcatattgtccgttgttgatggaaccttacacgacctggggaaatctacagtcaaggcggagtaataacggtccggaaatgttccgggccggaataccggaccgcttagcgaatgtataaatgtccatctccatccgacggttgcttctttttcgcttcttcctcacccatcctgttgatcggtttgataattcccatccagattgccatccaagttctcttcaactagatcttttactcaataaaccaagagaatgtctggtaagttctgcgaactccgtcctacttagtcacagttgactttgctcttggcggcataatttgatgaattcgaacttcgttctttctcttttttctttctttttctttttcttttcctactcctttctcatctgaattttaagaccttacgatcaccgactttactgttcatggtaagtgatcatgcaattcgatttgttccaacaaggtgagctggtaaactgtcttcatgacttcactgataacttcgacttgttacacctttcgatagacgtccgttttcccacaaacgctgatgcctcagggacagatgcgatgaacaccaggtgaaatagttcttgccttgtctccgatataagtgatgcatccatgagcttacaacctttgtgctcacttcctagctgtgactattctgctgcctatgttgagctcaaaactgaatcttcagaccttaccggacaaggcatgaccttcactatcggcagaggaaacgagattgtttgcgctgccatcacacttatctctgaaagaatcaagggcaagaagatcgaggatttatccaaggacatgggtgctacatgggatttcctcgttagcgatccgcaacttcgatggatcggaccggagaaggtacatatctttatgtcctctcctagcgccaaaagatactaatatagcaccgtacgctgactaacggagatacgttttctatgaaattccatcaactcagggagtaatctctattgccacgggtgccgtatccaacgccatttgggacctctatgcccgatcccgaaacaagcctctctggaagctcattactgatttcacaccggtgcgttcttcattccttgcgccatcgtactgcgcgatgcaaccaatgagctcaatatgattctacttctctaccttctcgatatatactttatactcaggaggagtttgtgagatcgacttgtttccggtacatcactgatgctatcactcctgaagaggctctggctctcttgaaagagaaggaggcgggcaagaaggagcgagaggctaatgtgataaaaactggataccctgcttataccacctcagtgggatggctcggttggtgtcatgtctcctggcttactctcgtatgccataaaatcatctgcttaactacgtgttttatcacccatttaggttacgacgacgataaagtagctcgacttaccaaagaatctctcgcccaaggcttcaaccacttcaaagtaaataactcgttcatgtatatatcgctatacccgcttgtactcttagctgacttacatacgtccatgtattaaaaacgtagctcaaagtcggagctaatctggaggatgatcttcgacgaggcggaataatccgatcgatcattgacgaccccaagaacctcccgtatgcaccctcaatcacaacttgctacaattcctgcaatgactaatca

SEQ ID NO: 912 - DNA, 2676 bp, Xanthophyllomyces dendrorhous
ttcctgcaatgactaatcattggttttcttatgacgattcagtgaatggagagaaaaaatcgaggacaagacgattgtgggaaaaaacgctgggcctgccggttgtgtcttgatggttgatgccaaccgtacgtcattgcattattaatatttgacataatatggcgctcaccctgtacttgtttcaacagaggtctgggatgtctcacaagctgtggactacgttaaacaacttaaacctttgaacccgtggtttatcgaagagccgactgctcctgatgacatttctggtgaggctcttgtccttgtttaagaaacttattctcttgaatgagaagcgctgaaagcgtgctgtgtctttctgttgagtaggacatgcccagattcgaaaggcgctcaagcctcatggtattggagtggccacgggagagcatgcgtgagtgtactttagcagtccttaatcgctcctttactctcagacgacattctgatttttttccatttgaataaaatgacgataccagtcacaaccgaatgatcttcaagcaacttctccaagccgaagctatcgacgtttgccagatcgatagttgtcgactagccggtgtgaacgaagtccttagtgtgctgctcatgtccgccaagtttggaatccctgtctgcccacatgcagggggagtcggcttgtgcgagtatgtgatccatttatcgttgatcgattacatcgcggtgtctggatcatatgaccgaaatgttttagaatatggtaagcatgtctttctcgattctcttcttgtctgaatttatgtgtacgatgggtctcaatatgttcctttatgggaaacagtcgatcatctccatgagcatttcaagtacccagtctctatcaacaaggctggtcgatataatgttccccaagaccccaagggtggatactcgtgagtatatgattctttcttctccttcagcgcgcctcacaacgccaacgatgagagcacatagactcaccactcatcatctccattccgcacatatacccgtagcattgagatgttcccagaatctatcagaaactacacgttccctggagagtctgatgggtattggcaagctgctgccaaagggaaagagaacgaatggaacgcagctcataatgtttcatctcacgagtagacgcatgtttcatttcgcttctcctgaagtcttttcttgttttcaatctccatgctgttgttgttgcttttatcttcttcttttcactatcgagttggtcatcatctctagtcatgtagaacatatactcttgttgtcaaatttgaatgctctttctcttctctacatgtgctgtttgtacagtgcactagtcaagcagaaccaagacgatcattttagacacagttcttgtcctcattgttgtcattcttttgatcaatcccgtaagtcttctaaagatacaggcgccgtgcgctcaattgattccttttacaagacagataaacccgttcagtcatatagtccccagccattcctacgagagagttctttcaaagcccatttgaacggtcttccagcgcccagacttccttgactcatactctctggctgaccccgtcggacgtactatacatcagtataaacaagggaaaggcggtctcattggtaagtattgtgccaactggagaaaaagagagacagaaagacagagagacaaagtgtgtgtagaggatttgcagatagaaaggactgacgacttccatcgcccctctaccccaaaatagcatccaaccccaagtccagatccttcctccgatacctcggacttttcgcttcgtcaacttttcgaacaagccctccataatgattcctacgccttgcatgatgaagaacaaaggaaggggccaggtcggaccgtgtgttgaggcagggcggccttgagcttcgacagccaagtagtggagaagcgctgagaggaagaacgtgaacattctttgcgagataccgatacgtacaacaaacgagatgcgtacaaagagtattctgtcagctcaagagatccgatgagaggccattcataaaagaaagcaagaagagataaagtcaaagtccactcacaaagcgaaagctctcggtgcacccaacttctttgcgaactcaaacccacagaaccctaaagaagctctgaagagctgatgccatcttctcccccaaagagaagacagagaggtagctgcttctgggacctgaaacaggcttggccagtacagagactcgacgggtgatttagcgagaaggataccgtgtacggccagaatatggtacatgaacgtttggactgagtagtcgatttttgttcgtatacacagataaggatgaaccaagtttaacaggcgaaacatgacaacgaggctctcacgaacaagacgagcgggaagaaagattggacgaaccgacatgcagcgataaacctgagatcaacgccaagccgtaacttgtggcccagactggccaatttccaaaaggagcatacaaactgccctcatgggaaagctccagagagccgaattttggatggaacgtatacggcaacaagataaagtccaaaaagaggtagcactgtaggataatcttgagttcacggacgattgcttggaatcttgggatcggggccgggtgggg

SEQ ID NO: 913 - DNA, 45394 bp, Xanthophyllomyces dendrorhous
gaatgatgggctcagacctgtggagaatccgatgttacggaaacctgtgtttccatcgccatcccagccaagccatagaagatgcgatcatttagtccctctcatgccaattatccgagatccagttgttgtacgcaaggttaaacaaacaacttactgacgacatacctccaagccaacacccaccttgcaacgttttgatcccgttggactttctcttctttctttatagtctgtcccttcacctcgtctcctacccaaccgatccactttggagtttcagacctgaatcctagctctatgctctttccactcaagaccaaggcatacaatgcccagagattgttcaaatcgctaaactgttgaatcccggaaaagtgatgactgaagccaagaggcagaatacctaaaatggctagaggaacgagtgctctacgaagataggctaaagatggagacgaagctgaaggcgagaagagaagggagctttgaatgaaaagaataaacgggggaagcaggacacagagaggtagactcaaagccgtccaggccggccggtccgaggccgaaaggatgaccaaaggagcgaacatatcgggattgaatttcattgtaagatctattacttataacagaattacctgagcacgccgatatccatcgggcgagacgaggaaagaacgagatgctttgattgctggctggacgagttgatggaatccaatggaagatgggggctgaaaagcattccccactgatagaaaatcacacgggtcatcttccgcccaaagtgtttgagagctttcgttgactcagccaataagacccttggcgcacacaagtggttcatgtacatatggtatgcgcagattgagaacagaacacagaagatttacagcaaacacatatagcaaccggatacggtcaagagaatgtggcgaccggatgtgtccagatttactggcctcatcgagtcatcaactaggaagaggagagaaggataagggaaaaggggcaaacaacaagatagctagagctaaagtggagacgctaaacaagtccatcgtacagcgacaaagcctgtactcatgagtagtgtgggtatgatatatacaaatcttgagtcagagtctttctttgggaaacgctgcgccgtacggattgttttaccaggaaaatacatatacaaaagaatcagaagacatacctggacgatcgtcgggtcaagcttgcttccctcaacaaactcttcgtagctgagtgctgcgtttttgtccttgtccatgtttcggaagatctgtataaagacgaggccgatatatgacaattcaaaactgcctttaatatcaccggcaggaagtgaacatgacggtatttaccttgtccacacgctatgatgagtcatgataaaggagaaaagaaaagagatcagaacaaaggtcaatctctttttctttctgtcaacgtctctaccattcgcaagaagcgttgagagcgtaccttctccggagtgttctcatcttccggtagcttgaccatgtggcccgtcatcttgtagatagcagagacaatctgaagcatttccgagtacgtgatcacaccatctccgtcgatgtcgtacagcgtgaaggcccctgaaggtatgatgggacgaacgacatgtggtcagccatagaccattgtatttctatgaggaatcattgtctatctctctttcaatcagagagcatcatgagagacaaagaccaagaaggacaaacatttgagcttctcgtctaatctgcctcgacttgtaacactgagcgcgcagatgaattccttgaactcgatcgtcccgctcttgtcctcgtcgaacactctaaagacatattctgcaaactgccctgggtcaccgaatgggaagaactgaatgtagatctttttaaactcctccttattgagttggccagagggacagtccttgagatagcctttatacctgttgcatacatatgtaggtgcattgcgtaccggttagaaaatgcaggaagaatatctcgagaccaaactgttctagtggacgttgttgggaaacaaggccgtaggttgtgtagagtatccggatgaaagatcttggacgaaccattgttggagctccttcttgtcgactgcatgtcccagttacccagtcaaccatttgatccgccaatcgataaaacagacagtacaaattagtatccgcaatgctttgaccgaataaatatattgtgtgtatgtgctcgctccaatgcactcctccagatatcagactggtagaatgggtgaaggagccaacgatttcctccactctaacaacaaactctccactgaaggagttagggataaaatgctgatcaagacaatggacctacagtacgtcatcttttgaagatcagacagctgctcaggcgatagtttactctgattttttcccatttttttttataaaaaaaaagaatcaacgacggagaagctctgttatgaaaagacgggtcgtgtgaacgtattgggttgagttgtccaagaggggcctctatctgatgtggtcggaggtcgtagagaaaagatggcaagattccgttctttccttcttcttctgatggaggcgccaggttggtgaaaggtcttggccgaggcggtgatcaactacggatgcccaggtttgcccaggctggctcaagcaattgccagatttccccatctaaagctgtgtgatgtggggttaccctgcccaaatagcacagctcacgtgatttcaatgtacttatgcgaatacttaacccagcgacgcaattcaaatacatgggcttacgtaagtatctcatgctgacccatcaccccccctctctccccatcacccagaaatccaacatctcatctccaacagaaagaccgagcaaaggcaaacacacacccatggtcacagagcatacccatcaaatgtcccaactggtagagttcgggatagatccagtaaaggcagcgttttctctccgcaagttcaacggaaataccgaacaagcagccgactgggcttttaccgccgggtttgactgggttcctacgagtgaaccttcaccgccagtcggccctcaacctttcgttcctcctgtcactgccgatgccaacaccggtggaacagaaggcagcacaggtaatagccaggctatccaggcaactcgcataggtatgtccgttgtttcgattccctctttcgtccaagagggctaaaacacactaacatcattctccgtctcttgatgtcatgttcaaccgggtgtacgcgcttgctactctgaatcacaagcgccttataatccctccaaccagtcttctgtgatcgaccacaccgctcaaaccgacttaccgcccattccagggcttcttgacgacgaaaacgatgaagactctgatatgtccaaggccatccgtctttctatcgaagaggctaacaagactaaccggccggcagataccgcgaatatctatccagattacagcaagacagttggtagaatctcgcaaaatgaatcaaagtggcaggagaactcggataccacacagacatccacaaataaaccgatactgggagtagaaaataggcaaattgaaggattaattgaagcaagtagagaaaaatatgggatgggtgttggaggagttgacggaagagcgctagctgatagcttagcattggttagaacccaggtgcgattcaagtttctttgttctcaattgtgagctttgtccatcgcgttcaggagtaaacttaacacaagctcgtgttctctgtcatcccgctccatccctcaagattgagtccagaggaacagaaagcgtagtctccaaagaagacgagcatctatctcaagtgctagaagctagtctacatacatccaaccaacaatcatctgtaacccccacgcctggaccaaacataccacgacctgccgggcagtgagtgattccttcggatcaaattttcgatctatcataagattggtttctctgactctttcatttccttatgacatcagtcctgtggctctttggagttcgataccatatctaggtccagatgtatctgttctccaggcattatctgtaatcccacaattatctaatctcctagagagcgtcgaaagttcggaagaacttcccacatgtatgtttctcgatccatctgttctacaaacattcaagcctgtctgttttcggtcactaacttttactgtcgtctgatcggtttaacgagcaggtctaatccttctgaaagcacttaaagaggctatggatgatccgacgatcagctatcttgactcagacgtactagtcaatcttgtaggcgtcttcagtggatcgtacggatcagaaagtccggttcggagggcggaaggttggtatttgttatctattcgatagagcaatcctttatgctgttgctgaacttttatctcctcatgcctctgcgtattcttagaattcttcactacgtttgtgacaaaatggaattctgaggtcccctctctgacttgcactcagcccgaccgattggcaagcagttttactgatccatctttccagtccgccgatctagtcaggtccgttcgcgcgcatttcatatcataattatctccacacatgtgtatattcgaacttgacattcttcttttactttgctgttttctctcgagcagagtcttcaactacactggttcccctcttcttccttcgtcatctcctccagaaacttttgattctcctcatgtgtttcctatagacggaaaggcctacacatccctttcccaagcaatggcaagcattctctgggaggctgatattcctgttgggctggagacgtgtagtgaggtcctgtgtgtgacagtgtcgtacctttcaaatcaagtggcttctggagcagctgatgcaggagaaaacaagttgttcaaaatcgatggagacttctggatcgataggtttttaagtagaaacaagctgttaagcgctcagcttagggccgaagagggcttgctgaagggaagggaggaagaattgaaaaaacgattagaaaacctcaagagcgtcaaggtttgtaacgatttcgtccgtctgcctagttttgtttgtgatattttggctgttgagcttgctaacttccaatttaactcacgacctccaaacaaatagggaaaagattcaagaaaatcattggtggcagttatcaagtattacgatgagctcgcgctcaagtccacgtcggatgagcagaagtttgagagcggccgaaagagtgtggagaaactacgaacgatgttgaaagagtttgaccgtgaaacttcaggtttgttgatatcctcactgaaatatgaaagctccagaaatactgatcaacctcggaaatctatcgaggggggttcagaagtggcgagtcaattagagaagatcactttagctagaacgaatcttttcgaccggtccgagttgaaacgatgcaaggtgcgtcttttctgcactgtcatttcttgaactcgttcttgatatattgaaacgatcttttttatacgtcgaactcgtgctttgtagtattctcttcgggccatcaactttcacaacgggattcgtggtcccggttcgctgtatacgttagtctcaacagatttctttgttgaccaaaaatattctcggataatgctcaagtgaaaagaaaacaaaatacatcatgtataatgaaaggaggaaggattgtcacgctgataaattgtcttgcatatacggtggcttcacgaaactagatacgtgcagggcccggacaaacgatggtttaaagttgtcgatggtgtctcctccgaagttagtccttttgattcagcgtagaaatctttcagataccaatcatcgacgcatatttctacgactaacgaccacatcttgtgtcacatcaacagatttcggcagaaacagcattcgcagacccgacaggcttccacctaggcgcaggtccatacatgctttggtattcgaaagatgggccttggccggttgagccaaaaccagaaccagatccagtcgttcaagaagagataaatgaaaaagaagaggttcgtctcagcttctgaagagattgtctttcgtggttgtattgagcgatgtgccggttggatttcattctatagatccaggataaacctttaatagatttggacgtggatatggacgttaacaccaacccaggttcatccaattccactcctgatacgcccaccgcaccaattccgtgaacaaagaaaaacgataaagaaaagatgtgtcgtttgaaagattccaaatacttcataactacctaccactgttagaatgcttgcgcttttgtttccttccttatcttcgacaaacatttcaggttggcgaggtatattgtatcaatatatgattatttaatagaacttgacaattgtacatagttgagtagtgatgctgatgataccagcttggtaggacgacgagcaacacaacgtgtcttctacgattggcatgatggatatgtgttgttagttaaacaatggagggggggcacagaataggtgtgttgatatgaaagcgagagaatttgtatttcgtcagaaggatgagaagatacaagagggaagggaatgtatagaaggccattgatgatatgcaaaacttgagagagatcagaacaattcggaactctcactggttttatcaagatcatatgaaatcacgtcaaccaaagcgcgttgttaacactgctcctgaagaacaaaacaaagacaagacaaagactcactcatactcgatcgtctcatcatcacctgcacagaacgaatcctctagataataatcatcctcctcggaaccactttgtcttccatccctctcatcttcagagctaggtcgagagtatctcttgaaaggcttgacggcgtctgctctagtggtcgtgaatcgaggtcccttgccattatcatcttgagaaggggagcgaagacctgtaagataggcggcttgctggttgtagccttttggaacctgggttgcttgaaaatcacctgcaaacgctctattaatttgaaagcaaaagccatttcagtcatggttccgtcagtcacatcatctccgttgaaagaagcgtcaggccgtcttacctatcttcctccgtttcttcatccatgatcgcgctcccatcatccgataaaattgcatcatcgtctctttcgtctcccgcggttcggtcatagaaccgtttcatctcatccggaacgactcctctgtaccaggatggacctttgaccgacatcttctttggcttcttctttctttgttgacgacgttcaataaacgacgacatatcatcgtcttcttcttcctcatcctcctcttcttccttctctgcaggtcttgtagctcgtactcttttcaggggactaggtgcgacaggcgacgatgaagccgccaccgctcttaccctaggtcttgctccaggtcttcgaacagcctgagtggactcgaatggactacctacaaagggcgaagatagtggtcgagtactcatcggtggtaacatcttcctcgcttgactttcaggcgtagggttgaccgttctgagttctgaactaggtttaaatccagtcccaatctcgaattggttctgaagctcaaaatgatcttcgtcgtcgtctgctagaatccaggattgatcgatttgttgaggaatagaagaaacaagagccgtggagcgaatgatcggtgtttgtggcgccgttgaacgaacaggtgttctcgtattgagtgttgtgtatcttgaggtagacgcaagaccccgccgtgaatcagaatgaaacgtgtccaatttcgaagcggccgctgtaaccaagccaggcgaaaagacagaagaatcttcaaactggtcaaagctatcatccaacacccatgccgggtcgatcttatcgaacccagcctgagcagccacatcctttggtaatgagactccatcaagctcagtaggtgtggccgccctagatgtgggtgatggcgagtgaccatgacgggcagggggctgtcggtctcttccttttcctttaggttggacaggagacggggttgaactagggatcacaataacctctttttcttcgtcctcgtcctcttccccctccggtacgattgacactgccatcagggccgctgtagttcctactgccgctgccgctgcagctgcagctgcttcttcagaatcagtccggggtgcaggtcgagttccaatagatcttttgccgacaaatggatcgtccaaagtccttgaccgcttgaaagttcttgtctcatccactccccgcaccctatctctctccttacctttccccttcatattaatggcccctctaagtttgacctcgttttccgaaacggatcttgagaacgtcgagaacgcaggtcccatctcgattgctagatcatccgagtctgaatcaatgcccataggatcgacctcgacattcttctttttgttgctaccagacgtgagcgctctggcattgacgaatccaagagaagctcctgttgggatagctgcccctcgacgggcggcgccggcggtctcttttgacgtctttgtttgttttattttagatgctctacgaggcttcgtgtcctggacgacaggtgggccatcatcgattggtacgaccttttggacgagttgaggtttacattctggcggtaagattcgagggacatcgtcgtataattctagaattgctcctttcgtgatagccatttggactgaagagagaacaaaccccgagcaaacaaatcacttagggggattctcttccggaatgaagaagattcaaggaagacgcaccactctcataggattctttagctttatcccaagaggattcttctcttccctcacccatgagcacatatatagaaccttccctttttcggcctgttcgaccgattctttgcagctgtatatacccagttgatcgtcaatgacaaagccgacatttgacagacaggaaacatcacgatatatgcgaagttggggcgagaatttcaaagactgaccattcgaacagaacttttctgagcatcatagcaaatgatcttatcaaccgagccgatatccagaccttcttctccgatagacgttgctaccaagacattgattttcccgcacttaaaatctttgatgacctgacgacatcgatacgattattgtcgtgccgaaacgatgacattcagctctctgtgtaagcattgagttatataattgaaagaaaatcgacatgtacctggatctgttcggcttgtttcagtcctttgcgaccagacttatcagttgcttgaccgacaaagggaacagctcgtagcaggggagactctttattcagcattgtctatgtttgtgcaatcatgatgaaggaaaagagtatccgtttgatcagcgcgagtaattggaaagatggacgggaagtagtcaagaaaaagaagcaaagaaatgaacaacaagatcttcaagacgtaccacaatctcctcaacacaatctctgtacatgcaaaagaccatgactcttgtcgtgtccggatttaaatctccttttccatcccctggctctcttggtgcaaaatgatccaacagcaaactcttgagtctatccatttttgcgtgaggaacataacctccttcgaccttcatttcttcgatggcagcgcctatcgcccgaagctcctttgaattacttgccggagtatcttttttaggaatcttgtcggcaatagttcgttgaaacatgctgatactatgctcaagctatatcaaacagatagagaaatcatcaagtcagtcaggatcacgccgttgtgcttaaagtgactgaacattcaaaaagatgaacgaacgagataacccatcgctcgagcataagactctaatttcgtcaggacctgctggtatttgaagttcttttgccgcatacattgtgtcctggcagcatgcgctctaaatgcatgaagccttgtgggatcagattcatattctttgaagataccacctttgatgagttggttgatcattggctgtgagcgacaagatgtcagtaaacaacgacagatgcgctgcaaaagagaagagagaaagttaatgtttacctgcatgatttcagaaagcatgtccttgagcttgatcacattaggtgtcatcggaaccaagaccaactcggtgttctatacaccagaaagaagcaaaatccaacagcaagacctcttgaggtcaatttctgcaaatagaagacggtgtcagaaacgttgcgaaccttcttgtgaacataagccttgaggtcgagactttcttcatctcggatctcaatatggctcaaatgtaagttgtcgatcaaactttgaacgccctcaacttttcctgatggtgtagctgtgagagcaaggattctgaaattgtgatttcttgattgaaggaagcggacaacctgacaatacgaatgattggaagtggctttatgagcttcgtctgttgaaagccaaaatgcagcggggagatacgattagtaagaccggggatactcagtgaagccagagggaagagcagaaatagtgaaaacttgtacaagagagagaagactaaccaactactagaaggattacttctcttgggtccagtcggccgttctgcaaatcgttcatcattgtctgggctgtcataaagaacacgctcttttctggatactttacaattccaatgataggaaacgtgatggttccaatataagtgcgatcagacaacgtaaaacagagggagagataaaagaaattagatgatgaatggttcttactgtttgctgtcggacatccttgttagtgtcacccatcaacacggcgactttgctgttcagaaaaccacatgtctcggggaacgcctgggcctgttgattaaccagtggtttggttggagcaatgaaaaatattttgccggttgggaaccatcgattgtcttcaggtcatttgaacgaatatgaataggatgatcaaccgtggcatgatcttctagataacacgtaaagggaatagacaaacaattcaacatgaccactccggctacgaatgtctttcctaatcctgtcggtaacgcaacgagtgtgttggtgaatagtgactttcggacgatatttaactgataggaccgaagcggaagattgatcgggtagatccaagtctttcctgcttcagcatcaaaggcatgtttcaaaggaggaagctagagaggtgcaaaagcacaagaggagacaatgagtttgcttgggggaaaggatcatatgagaacgaaggggatgatagcgcttacgtcgccgactgcaatatggacaagagatgcgtgtcgagttgaaagatatagacaactgtatcagtaatgtctaaagggctcgtcgcaagtgtaatattgcgcacgcacgcgggacgactggggccggaaattgatcgaaacccgtttcggcttcttcctcctcctcaccttcctcttcttcttggtcccaaggttttcctgtctttttcctcatggccacctttttttcccactctgcccgatcccagacttttccaacctttctgacgagtccctgactacttcccacatcaaattcatcgacctgcgcgcgttcaccaaagaggttcatttgtcggagtcgggaagcggtgccgacacctgtggcgatggcatggtctatttcttgcagggactcaggagtgatgtccatggcaaattcgtccgagtattggtgagaagatgatggtataggcgctggaggtcgaagaggaggaggtctcggttggttgtactttgctgatggtgagatatgagtgatagttttggcagtgtacgaaaaccgagtttggaccatagggggcggaggtggtctggatggtcttgataacgaatgatgggattgtgctgatatttggctatcactcggtaccttggagagtgcatctattcttcgaagatccgcctcatccaaggcgaatgagtcaaactcgtccgtgtctgaggaggccatctgcggccggtttggttggcaaccgagaggcgtcagaacaagcgaggttctgatcaggcggtgtcggtatctgaccgatcgattgacaagtagattcggagcgatagcaaaagcccttgagacaagagaaaggatgttgtttatgtgtctgtgtatttatgtgtttatgtagaagagtatgagggatcgaaggatgttgtatgttggtgtaagagttgggacaagtcagtttggatgaaagccttggagagcatacgcgagacgtcactcgcgtcgaggtcacgtgcagttgtcgcgtcgcgtcgcgcggtgttaagtgattgacgcgaaagctgtatttggcgcacgtgaactcaaaaccacccgctactgaacatcacagcacagctatcgttactacccctctgcccgtgacgctgactaagcaagcctcttcttatcaccctctcccatccatttgaaaccctggaagaacggccgaggagcaaccggaacgagcgcaccacatccctctaaccacatccatactcataagataatgcctgaagcactcaaacgaaaggttgccgtcatgggctcccgctctgtaggttagttcgttcttccgttgatcctggttccggtgcgttcagacaaaagtagggcgtcggtggacaacagagagatgaagaaaaaagtaccaacgggacgaacgttgcgggagggacagaatccctcgtacacatctcttcttactctctacctgccttgtccctattggctgtgttgttcaaatgtatagcagatccaagccctgacaacctcacaaggtttgactcttcctcaaacatctttcttgcgttttgaaccggccaggtaaatcctccctggtcgcccgatacgtcgacggacctgctcaggagatcgatagctaccatcccacgatcgaacaggtcaagcacaagaaagtttctttcgcaggcagagactttgacatcgaggtcgtcgacaccgctggtcaggttggtcccttgtcctattcgtcatcctcccgtcagctatgtcgcccctccgcttctttcttcttgccctcagtgcagacatccggttttacttccgttggcgtcaattttacatgccatcgttcatatcgaccggactccgttccgaagataacgacaacatgttttcctgtgtatctcagaaggtcaatcgcaaggactggctcatcatgacattcaccaccagcagatgagctatgcacacaaacacacactcaaccatacacatatccatacatacacatacatatctgaaattacttcctcgctcttattttgagtctttcgttcgctaacttactttggttcctctttcccgccacgcttttcaggactcttcatctttcttccctctaaagtacgcggtcggtgtgcacggctacgtgatggtatactcgatcaccaatcgggcctcattcgatcttgttcagaccatttatgacaagatgcttgaacaaactggagccgagtgggcaccctgtgtgattgttgggaacaagagcgatctgaatggaaatcggtatgtcttgatttcttctagccctatggtgccctatacggtagaatattgccgaggagtatgttgctgatgaccggatttgtcgtcggctcgccacagtgctgtgccaactgccgaggcaaaagcctttgctcaacggatcaaagctccctttgtggagaccagtgcggtcaagaatgacaagatcggtaggtgtagcttgtgtatggtctcttgcacgttcgcaccaagcttatcatcacggcttcttcgcttatctccccgcagacgaacccgtgcaatccctgctagccgagatttggaaatcggaaggaaacgttctgccatcggcagccgcgcccgcaaaggcgactggtggaagttggttcggaagttggtttggaggaaagaagtagagtatgcgtgtgcgcaagcgtgcgtgtgtgtttgtgttctctgttcccgataattttcagctccggacaatcatatctctcctatcatcgctcaagcaacgccgctcgaaccttggctacttgaagctctatccattatctttgttcaacaactttcacccctagttctttgcaatctttgaatgttttctcaacttccgcctcatcatcctgttggtttggtgtaccgatatcttgtcttggaccacgtaaagccccagggtccagttttctcaatttttctcactttctctatttaaacttctagtcttatatagtatcggtttctttcagtagatctgttcatgccatgattcttcagcgtgtgcccagcttgagcgcggtgtgaagcggcacgatggtttgagaagagaccgaggttgatcaaagagagccgttgtgaacacgtaatttcggcaagacgcctgatctaaccgccaatcattatttgttcaaatcaatactcgacatccatataacctttcgttcattaccttctgcacacactctctcctttctcttctcggtcgatattcttactcccatctctctcttgggacgctaagatgcgacacacggcatacctccggacgatattcaatcgagcaacacctattacgtctttgacgagtccgccattcacgacagagcttctccgatcaacggcttcgccttcaaaaacccatttactgcttcatttacctgttgttccttctaaatggcctgccaagttctctccgcataatttcccagcgggcgatattgtagagagaagtgtcattccggggttggaaaacattttggaagctacctcagttacagacgaaaaagtgaagggtgctttggcaagagcaaaggcaaaggcggggactgtgggaatgctcatagcttgggacggaaccaaatcggatttaccaaaccaggatgattcaaacccgatcggactagatactcttaaggagaaagatgttgaaggtgtctggtatatacccggaaagaagaagatcgttctcgagagaggacgaatagacaagcctattgacataaacgccgtagccgatcggatcgtcgaaggtaaaggtgaagagaaggaagagattgatatatatatttgtacacatgggtcgagagactgtcgatgtggagatgtaggaggtgccttggtagatgcgcttcaggtggagatcgatagattggacgtaagccagagagtcaacgtctgggaggtctctcatgttggtggtcacaagtaagttgtaccattcctttccctctcgctttcttcaaagcaagatcttttcttaaacattactgctccctggcattctctaccttctccgcttcaccttctccgactcatcatcagatacgcagcgaatgcattgatcttcccagcccatcaacttctcggaaatctccgaccatcccatgcacccctccttctttcttccctactttcttcccctgcggatccgaccgcttcgtcgcctctaatgctgcctttctggcgtggtacgagcggaatgtcaaaggctgaaatggatgatcggtacgagaaggctttgagctcaggtggaggcattggtgcgccttggatagagtcggcatcgaagggagcagaggctgactttgtcaaggatatcaaacaagagaaggaggaagtgccgataatcttcaaaacttgggaaggggaggatgttgaagtcataggtacagttggagaaaccctgatggaccttgggaaacgatatgatttgggtagtatagaaggtgtctgtggaggtgttctcgaggttggtctctttttgtcctttataccttccttcctcttccattttgagagcatcaagtcaggtttgtcctaaactgatgcaatctctgtcttttgtccttttttttcaatgaaccagtgcgctacatgtcattgttatgtgcctttcgaaccctacccagcgcctgtttcagaaatcactgacgccgaagaagagttcgtctcttgtttctgtttcctctcattctcttttatagtctgcctccgggtcgattcgacccgagcatatgatttttccggtgaagatgagtagtggcttatacgatataacacaatctttgatcaacgaactatcagtatgctaggaatggccatcgatgaacgtgaagaaagtcgactaggctgccagatcaaggtttgtcgcttcttcatcagtatttttcctgccctttccttgatatagattgatatattcgaactgatcgttgttaatatttcgggatgggttgaacgtgaacggtaattaaaaacaggtcgatcaggcgttgagcgcttggtgtgcagctggaggaaaaatcggtctaccccgatactaaaaaccttgtacacttgctaaaaagacaggcttgttcaagtgtctcatagagtcaagataaacaaaagagctgatcgtacagttgtcttcaacatcgcttgagacaaacgaatatatgtggctttgcaggatttgattatcatgggatcgctctcttgtggttgctcgatgtgtgaaaggacattatattttttgccatcagaaaagaggaagattaaagagaaagaagaagaccaccaacaaccaagaaagtaaagtatataaggacgaaactgagagaaccagaagcgcctctagacgttgtcctccggtccaccctcgtcgataagtttttgataatcctcgtaacttccaaagagcggaagttttctctttttctttcgttcctttcggtcctctgtactcgtccgtttcctctttccgtcaacctcggtcgaaggcgcggcttcgtcatctgacatttcgttatcatcctcgtcagggaaagcggatggaacgtcgtcctcagatagaagatcttcgggatcttcgtccagatcaaagacttcttcatcttcagagtcaaattctgagtggttgcaatcacaaattagagtataaaatcatcatgtcagtaatcaagtagactaacgccgtactcccgtgagaagaaaatggaaaggaggaaaggataaaggagaaaatatgagacataccagcatcgtcgatctgaccttcatcgtcctcatccccgtcctcgtcctcatcagagttgaactctgccaatgcgccagcctcatcactgtcaagatcttccgaaccggcttcgctgtactcgtccgaatcactatcgtcctccataaggtgttgatcttcctcgacggcaggcatggacttttgcatagcctttggagatcaatcaaatcgaacgtgtaatgggatgagtcattttgttttgtcaaatggaaaaaggtgaaggtggatagaaatgcaaggggagacaggatattaccttccaaatttcagcctcaacatcgtcatcagactcatcatccgaaccgtcctccttctcctcaacaacggcctgtctcggaagatcttcgtcttcctcagcgtcagaaccttcgacaccaaagccggcagacatctcatcatcatcgtcatttcctcctttctttcgcttggccagtttactagccttcgacttctctcgactgatcttttggttgaagaacttgtggaaaaagagctaatatgcgcaaaagaagagaaagaaacatcggtcagtcggcttgttacgaagttcgtggctggacggcctagacaattctgaaggaatacacacctgatcggcgggaacatcctcctccttttgcctccagaactctgcagtgttgacttcggtctcagcagacgggcccttcatcatgagaacgacaccagatttatctgaagcagctgcgggctgcatgatactagctcccttcggcttcgctttctttgcatttcggtagacgaatcgatcaaggaagtggacgagtgtgttgagattgaggtcagaggatccggtgatgggttcaccgttgaggagctgagacgcatgaagtgcgacagaaggatggaaatggtgaaggaaggggacctgtttaggaaggagaaaaggcagaacatgagtttcggactcatcaaatcatagtcaagcaaaagggtggactaacaatctcccatagacaactaccctgcgcgttcgcgtattctggctgtctcttcaatccatcgtaagcagttccccatttcttggaagcggccgctttttgagtctcctctaccccaacttccttcttctccttctcctcttcatcatccgggttgggtgcgtcaacaaagtgctcttcttcatcatcgtcctcgggatgagtcaacatccgtcgaagtccgggttgggcagagaaaagctatgggcaagaccaacggccgaaatcgttcttcaagtcagccatagaactatacaagaacaaatatcaagaagaaaagatagaaacggacctctccgaacaagaagaatgctccacagatgaaaggaggttggtgagaactcaatatttggatcgtcctcttgacaaacgccgcagctctaggagcgttggggtctttcttgacggccttgaagagcaagttgaggtacatggcttgcttggaagaggtgatgagtcgaggatcaagtagagactcatagagcgttcgatagaatcgatcggatacggactgttaagccggttcaatagtttatcctagtcaacatcaaatgaatagcaagggacccaagaaaaggatagaaccaacctctttcttagaggatacggaaaagatcaagttcagggcttgtatcgagatgttgaaagcgccagagtgagtaattcggaaaagggtgtccatgtgcctctcgaacctgggaaaggatagaaaatgagaaccaatgagtatcgtcatttcaatcacatgaatccatcgcgtagacgaagactgaacgatacagaactcacaggttgtcgtcgatcttggcgaacggcatagctctgttgacacccgtcaacacggccgcgatcatctttgcatccgagtcgactactgcgtcctccgccgcctctggcttctttcccttacccttacccttccagtttccttttcctttgtgctttccgtccgttgactctttctcttttgcttcttctgcggccggaccgagggcgagctcatctaactttgggtcgtcctttccgtttccgtctccgaggattcctctaaaaacttcgaagtaaacctcgacaagcttcccggcaacctcaccgtctcgggagagtaaggtggtctggttgagagtggtgataccgtagtacctagcgtgcagattgccttgctcatccgccgtcttatcgaacagtgtcgtcttcttagccattggctgagccttgcctttggactttcccttcttagtctgctggggtcgctttggcgccagtggcttgggaggagctggggcgaggacaagggaggcgatctctcgaactacaacagacttcatggctggatgagactggaggagctgaaggatgtgataagatgctcgggaggcgacatttcggtcagagtctccctgaaaaagatttcgaatcaagtgcggacgaagatcagcataatctgaaagcgcaagtgacgcgaagcgaaaggacgaaaagcgcgaaaaaccgactcacaagtttgttgacgagcaatcgaagcaggttttgctcctgctcaggggaatccttgagcagttgaaagacgattcggatggtttgtgttcggacgaatgggagggtgtcgtgcgtcatcgtctggaaggagttcaaagaaggggccgttgagtatatgttagattcgaaaaatgctgatggaatctgaagagacgacgtagaaagaataaacaaacctccaagacttgtagaagagtgaaaaagaatcgcttgagccaatcttcgaaggcccagacgatcagatgagcatcggtaacctgaggatgcgtcaacattggttggtcccgaagatatctgcagaagaggaatgtttcaatgtgtttgtcagaaagacgcgctttctatatgcgttttctcagaagcaaactgacctcagttttctaggaggcgatcctcctcccgtccaccaatccgccaccgccctcaacacgctcactctttcctctcgtcctcccatcctgccaatggttccatcctccttcttgtaacccaacatggctcggagtccttccagagcggtgacatttcttaacgggtccccctgtacgagcagaatcaatgccgagagcttatctgcttgggtacctgacttgaggatttgcgacaagaatgaagagtccgccttagaggacatagctggagaaggttgactagtgggaagagactctaggagagaaagcgatcgggtagtaagagtggagagaagtggagcagacagggggggaaggctatctgtttctggtagggcagggagatcatgaagataccattgaggaatcggagggaagacctgagagttataaaatgaaatttgcatttagttctggggtcagactcaggaaaaaggaacagcgaaacccaactcacaaactggcctttagaacccttgggaatgaccgacggagttgaaactgagacagaagggagaacgagcttggactctttcttgaccggaacctccttaggtttttcctcaacagcggcagcggcggccgccgccgcctcggcggcagctcctttcttttccttcttcgtcatgtttggggtatccattggcatttcaccttcagattccgaatcatcgagcgcgtcttcttctgaagaccctgcctggtcagcttcctcttcagaatcgtgagtgttgttctggaaagaagagaagtcgagtccattcatgaaggaagagagttctttcgatagcttgacctgggaagtcgaaggagtaatcatatcgtgagcaagaagacaagatgtcgggctgttgaggagaatatctgtgacactaacctcatctacttgggtctctccggtgaagacctcggttccttctacctcgtgaacgtcgtcaccgtcgatgccctgcaacattttccagtcgtcttcgtctccaccgagatccttgatttcctgaagaaacttgtcagttgttggtacgctctttggttttgctaccgccgcagcctttgccggcgccgggtttgacttctttgtgggctttgactttgccatcggtcctgataagggtggtgatggggtacaagggtgagagaatggaggaaggagctgccgatgaaagctaaagtgagcgaggacgagaagggaggaatcaacttttttgagaaatcgtggttaccatgcacagcatgtactcacgtgacatccacgcaaaataacctgactatgcttataaagctcgcgtaacaaactcgatgtgccacggtgtagcatcgtaaccttcggcgaataagtccgcgcatgaccgaacccagtccattcggtccggggttctctaacatgatcggcctggagattcgatcccggcatgcatcaagactttcggctcgcgtcgtggcggaagcagctggccttcgccgaaatgcttccgggttcagtcggccgcccgggatggcctccgggcccgctcgagttccccggtcggtgcttccttccgcttttttctcagtcaggtttctttgtaaccaaacttctaatgctttctgatcatacccacgcctgaacattagcctagcatacacattcacaaatacttatacactcagcatactcatattcggtttgaccaaaaggatactgaattgttagtggagcgaggtccagcatgggttattctcacaaatccagtttgtgtggtgctcactaagcttgctggagacgtgtcggtcatcatatttatgagactcgttgtttaatcgttcctcttttttttttccttgtcgctccgtactcgcagttttcttcttcagctctccgactatttacctttgcttctcgtccaagtcacatccgattcgtccatgaaaccaaaacaagcaccgactgcacaggatgatcctttgaatgaggaatccgaagaagaagattacgtatgtaaaacttatcttggccatacttgacgttgttgcttaattacgtgtcgcagtatggtttgtatgatcacatatgcggtttaggttgacgaaattaacttttttctttttcttcatcccttacgttatttcccctaggacgaagcctctggatcaacagagaaaacgtcggcagataaaaagaaagaatcggaaaactcatcgaccagaaaagctcagaacaggatagctcaggtaagcccctgatctttgccacttgccctcgcgtcagtcccaactggattctcttgattaatcatcctcttttcgtcttgccctctccttccataatcgactgaatcttagagagagtttcgacaacgcaaacaacaatatatcagagaattagaaacgcgtgtcgaagtgcttagtgccaactctgatcaccgattcagtcatttgaaggatgtcatccaaggtcgaacgatttccttgtgtctcaatctttttctttatccaagccaagtctgtgttctgattgttttctcttttttttccactcgcctcagccctcatggacgaaaaccaacagcttcgacagatgtgttccaacatgggcacattcttcgctgaaggtaagcccttcatcattctccctgtcctttttcggatttccgagccgtgattttcctccctcctgacgcgtctggctttcattcttctctttcataggtctcggtagtgcgctgcctaggataggtatgacacctgagatgtacgatgcagtgatcaccaggtgagtcaaatttctaaaccttctttttaacctcgtgtcatgcaaagtttccactcgtggacgcgttctgaattttctcttattgatattttcgtacagaggaaactctgacaccgctctcgacgcgtatgttatctccaaagaacgactacaaaaacaagaacccgcctctccagccgtccatgattcaccctccgaggctagtactcactcaccttctcaaacgaattcccagaacccgaaacgaaagcgtgggtcgatggtcgaggaggatatcagtagaaagagaaaattgttgtacgagaacgcgttgaaagtaggatctaggccggtcgcccgctcgaaagagtcagactcttggtcacccgttgtggaaggttcgtctgacgggagacaacccacgactgacctcccagccttggactcgccagccgatggaccatcctcgtcctccttcagaccgacaaacgtcttccacacgaaaacattcaccgaacgcgctatgacaaccccctttgattcgaaccttgctggagatccaaatgcgaacaaagatcattcggaaagctccgacgcaaacctttcgagacccaactttgccacgaatactgctcctactagccagatcggtctccgacctctgcttccctacccaccaccgtttccaaattcaggccacaatacgacttcacaacacacatcgtatattccctctactctcaatgtcgaaggagccatgttcggctcccatgaatcctctggctcatcctctgtgtcacaggaattaatatcattcatatcgtccccttccccctcgacaacagctcagtatccaggtgctcaaacgaatcatcagcatcagcgtcaccagcagcagaatctgccacccatcactggaatgaacccgcctggaatgataccagccggatccggaagtttacctgacggaagatcctctctagagttcaacactcttttcaactcaatcggttttccaacctctaaccttggtatacccatcgggagtggtgatggtggcgacggtgggagagactcaagaaactctctcggtggaggggatgtaaggtcgagacctacagatctcggtggaccccttgccagaaacaacatcggaggacggatcggtgctagcgcaggtaaaagttcgggctcgaggttgggtggagaaggaaacagaccagagaattttgcaggcgtgaagactgcaaaacagggtgatgctctggctgtgggttcttttctttgtctttttttttccttatcccttggatgattgagctgatctcttgcttttcgttgggtgtcgatctacagctcatcggatatcatcttacaaactaccggtgtgtactttttccctgcattttccgatcttctcttctcttctcaagcgctaaagatcaaacttttacattggccatacagaaaaaatccatcctatcacctcccaccttcattagtgcctacatatcttcaacaaacagtgcctcacagtaagtttttcttactttgcttttcttgttgtggctatcgcatttcttgtgcaaagaggatatcgaatgttgggtctgatctattggggtctggtcttaggtcacatgattgatggaatcccgatcgccgagctaagagatacgatgatccaatttaaaggtgtgtctttctactctgctttcgatctttttcgcttgttgggctgtttgtcatccttcgtcgactcaacatattcctcttttgttttggttatttcacagaccaatacgatttaggagaagcattatcggaactatgcgaagatgtagagtatgtttctcgttgagattttctatctttaatcagtgtggaaaactgatggatttgaacattgaccgttgatctactgtagaatccatggacaagatgccctttcgggtgattcgtgggagataccagaactatggatgagaaaatacccgttcgtctcttttttttccttaatgtttgatttccctttccttctcttcgttatctgaaactcatactctatgtcttctctcacactttgtttatttttccagaatgttgatcaacgagcaaatcctcagtggagcaaacagatggagatcgagaaggggtgatccaataatcgccatggccgatctcaaagtgtctgttctcgagtgaaggaaagcaaaagcttatctttcattccaatcttttcattctttcatttttttccattctcttttctttttccttggtaatcaaatcgatagtcgtggtcgattttgttttgtccgtagaattgtttatgaatcttccttatgtataccgtgtcaatgcccagatacgttcttctctgcatcatctgttttttcttgttctcattcgtccatctcttttatttatgtatcttcctcttctgctcttttttctttctttttcttggtcattcattcaatctcgtttctcgtttgttctacaacaaatcctgtacgggtccttagaattaaccatcaggtattgccttctggtgtcttacacaagacggatatcatctctctctcctttagaaccgagtaattaatgcaagaggaatgaaaaagaagaagaaaaaggagagaacccttcatacaggagataaaagaaccaactcgactgagcaaactcttctcacttgaggccgttctcaccgtcgatcagccccttcagggtcttgaccctactctggaagctttccttcccgttcccccacacgtctctcacgacacctgccgtccttctcaacctcggtgagcccattcgattgaatgatggatgacgatctgtcgaatcggtgaagagctgaagaagtcgaatgtcgcgcgcgaaggcgtaggtcgggagtggatcggaggggatcaggagcgagtgcagggataggatgatcaagtcggctgttgcgttcgcgatactgaaaattcaatcaaaagagcacacccatcagttcgtgcgctctttctttttctcatcacaggagaagaagagaaaggagagagggctcaactaatcttcaacagcagacaacccgtctacacctctcagatccttggtcgcgaactttctgaccatctcacctgcgagctccaccggtctttccggtggacccgcccttaatgctagtgagatgtcagacattgattttgagaggaacttctctccctcactcatgatgagtacttggaggtaactgctgatcactagaggaatacaaggggtcacgtgcgaccgtcgaggagaacgacagacagatcagctttatagacaggagaagattcaagggaagactaggaggaagaaatcgaacgattggtttgatgactctggagtccaaaatcgatagcagccttcaagttgatgcctacccatggcgagcacaacacacccgagaggaaacataaaatcccatcagtccgtcctcagatttgatctacaaaaagatgagaatggaaaggcacaaagaagaaagtacggacgaagagttttgataatgttcttctgatcgacactgggttcttctgtatcgtccagatgattcacccaacgacttaatgcgccaacaagtaggatcgtcacgtcctcccattttggtccacaacgcatggcatacacgattgctttgtttattagggtttaatacgtatgatcgcccgttcggagccaaaggaaacatcttgggtcgtcagaacagttgaatcaaccggatcggtgatgtgcataggagagagcgagacgtacgaaacactgatcccacaccgggtgatttggtgagaaggagtccaaagttgatgtccctaatggccatgagtgtcatgatgtctttgtcatctatggctcttcagacccaacgatgtcaacgagacctcaagttaggtagaaacaacgaatcattgtgagagataagggaacagacgaggtcagacttacttgtaaacgtcgtgtgtttcgtatgtcctcgctcttgcctttccttttcccgacccagaccctagagtcaaaacaggcaagaacgcccttaaaccaggccaaccaccggctcttccggcaactagcccgagtttctctttctccttttccttctgctgggccagtatcacatccttcctttccttctctgcttcttccaactttttcgcattcacatacgcctccaactcctctctcagattgcgcacgttttccgagcgaacacttaacgacattccccgattccaacagatcttgagcaatcggtcgagtatgagatcaggagggatgaccttgcagggtgtgagaacccactcgaccatgccgtataactggatcaaccggagttccacaggattcgaaggcaaggtctctgcaatctctttcagaacatccaacgactatttgccaggggaagtttttttgttatcatcaaacggttgcatgaccgatcctggtattagcaagagcgccaaatatcggaaaggaccaaaagaaaggaagaacaggaggaaaggaaaccaaaggaaaggtaatgtcaccttctcaaccctggtgatctcacgaacaagatccccgccttcttcgtcctcgtcgcgttgtgaggggccagaggttgaactagcaggccagggtatatattcgcctctcgaaagccatagcttgtagccctcctgtcgtcttacctgagggtcgaagaacgaagggtgatggttcgattcggttacttctgataaaagcactgtttccccgttgtccgtcacgatcgacggtcccggaacatgagaacaggttcggacagaaacgtaagatcagtgtatcggatagcccactgagctgggtgacacctcacctagattgtccattgtagattcacttattcaagctcagagatggggggagagaagatggtcagagaggacgttccatctttgcctgggaaatctaatctttctgaatcgttcggacggaaccgactgcgcggatgacatcttgcctctctctcctcctccttctgctgctttgttgacgaccgtcgatgcgcactcacatacccacacacaacaaaaagagacaggacatcgatagcagaaacgagaagcagagaaaaaatagcccctgagacgataaaggaagatagtggaaagaatgatctgaatgaaggccacacaacggatggcagaagatgacggaacagatgaaagattagatgaaaagaacggtttatctgaatgggcgggggaggggggaggttcgaagtgtgagaacatcaggagggattggaacagttcgaggaaagggaaaaataaatgtctagatgaactgatgctgaggccaaccagaaagcaatcgactgagagaacaggacgatgggagagaagcgcatttgattgaatccttaggtagcaaagataccgctgatgatgcagagttcagaataagaggaagcaaagcaagtcagcaaggattacaggattacaagatatgacaagcagggagaggacgtacaggatctggaattgaggagcctatatcgagtcaacccaagaagagaatatcagcgtgtggtctggatagagaaggagaggaagaaaagaaagacatacaagcttgccctcttcacccagaagctggcactctacgaaatgactacccttttcgacgttgaaatcgatcattgtcaacctgttcaggtgcacaatcatcaaaaacaaatagatgaaactcggtcaggaaggcatgaaagagaaataattattttgctttttcttttggaaatgacgagaccaatactgactttggcccgatttcggatccagcggcagcaccatggatagtctttcctccgccaatgttatcatcgacccagcagagcgcgcttccaagcttggaatccaacggtccggagagatggtacactccaacctggaacgttcggaaaaacaggtcagaagagttgattagcccgagtgatctgccgaaaggttgaagttaatttttttttttaaaaggaactcacatctccggctcctagcttgacaggtactctgagacgagagtaaggagtctcggcgaaccagtagtgtctgtcctcctgatcacccggctttgggtggtgggccatccatccggaaccgtagaagagactgggtggcaatgggttgatcatgtcgtttgccgaggcgcagaacggttcgatctccctgaagccttcgacatccgtaggcaggtggatcaacctggtgctcggcactctgagcgcgtttgtccaagtggtcgaaggatcggtcacagtggtatcgccctcggccttgagctggttgggctctcgcatgccctttcgaaggccaactccaccgagcagctgggctccaccagaattcgtttctgcgagatcaagcgggacaggaacatcgaacccgtggcccatggcggcagcccagccgaggcatacttgagactggatgtaatgaatgagaacgtcagcaatgactgtcaaagattgggtttggaaagagggaaagtgttagctacgaaaaaaggggaagagagcaggtcagcaagtggacgagtacatacgatcgtgaccgtgagggttggcaaggatggggtcggcgtaatagctatttctgacctcctcaggccggttcatgtagtcgtggtagagcaaccccttgacactatgtacacggacaggatgttataaaagaggaatataaaatggcggtgaggactgataaagagatgaaaaacagagcaaacagagaaggctgatacctgatgtgaggaatatcgtagaactgagcgaccgtattgtgaagctgctctggtccggcgtaagcgtgctgggcgacgatctggggagcgaagtgaccgagcgagatgatagcgggcgcgtccggtcgaacgaggatcgatcggacgagaagctcgtagtgagacatccattccttctcgctaagggtgtgaaaagggtagacattagcggagtggcagggtggcagaacggaatatcaaaggaactagagaagagcatagagatcatcagaggagcatttgtgaaaacatactttggatcggcagcgtcaaactcaagaatgacaagatcagtcttatcgggcaagtggtgggatgagcagaatgcaaagtaggaagaatctgttcgcctgtttgcaccgttggtgagctcggaagccgggtgagggaacacgtcgttccaccacgagaaaaacttggacgggtagcatttcggagacacaaggttatcgcccgatccgtggcaggccgagactatttcgagggaatatgcagaggagcggagaatggagtcaatcgatgatcatggtaagacaaaagaggaaagaagaaaggagcgcaagataggatgaaggaagagaagtggaaaagaaaggcaaggcagacgaaagactacatactggaagcaccgagcacactgatggtgaccgggtgaccgctaagagctttcctgatgactttctgtactctggcgccggagccgagatgcatcttgctcttcatgagcgcgagctgacctctcctgttggcaacctcgtctcctggaccatagagtggacagaatgggaagggagctggatcgataagggaggcgttcaggtagtcatgggacgtcaaggccgagtggaaggaggcgtgatgctgggcgacgaggtcgtttgatcggaatgttgggaccactccggtcatgaaaaggatgacgagaaggatggagaaaaagatgatgagtctcggagggaagcctgaagtgaaagagagaaagaaagagcgtcaatccaagcgagaagagaggaaagttgcaccaaggggtttgacgaaaacaaacgagggaacgagggaacgaggagcactcaccaagcacggtaccctctctaccaaagaagccggaagatttcgacttgttgtcttcgtcatcatgcttgtagtgtttctgctcgcgcaacatgccgctgaagatctttgaaaacacggaggactgcttgccggtgggggaacgacctgtggctggctgactggtactagggtcgatggccgagggagctgagctaggcctagggatagtcgaatggacgtctgcgtctgtgtggtgggagtgatagcctggtcggagcatccgctctatggaggatacattggacgaagaggcaaagaacagatcaaacgaaaacaaagtgattagcacaaagaaagtgagcgaacgaaagaaggaatgacgtccgagatgggaagactaaagggcagaaccagaaagaacgaactaaggctgcgatggccagggtttgtccgggagagaagaaaaaaatcaagaaaaataacaagaggaacatggtgagaattccttgaatctgaagaacctgtaacgtgctgctcgagctcaccagagacgacagagaagaagaaaaggaagaaagaagacgacgagtagcgagaagaagacggttgagagcaaaggagaaaaaccgactttgggcgattcgtcccgagagccaaacacgcacggcctagggcgggcgcggggggcaggggggaaggctaaataaccttagttaccgttggataagtggggtatagaatcacttactattcatctatctgtaacaataggccggattggttatcgtgttgctgtgcagctcttgttgtgctacgggtagtcaccggtgtgtcacggcaagataattcattgtggctgaaagtcacgtgcgtaagtcacgtgcctcctcggtcttcttccgactgccctgactctgtctgaaatatgtggtctacttcagaaggagaacagattctgcgcaacgttcttgtctttctttcccactcggcgggtacgagaaggagtgcactgggtcacacatgcaaagtatacgacgtgttctctctctctcacacgcatatcagccgcgtggtcgatggatgtgtgagtcaagacgggcaagcactcagtcgctatatgggacaaaacagctttagagaaacaccatcgaccatacaaagtagtttctgttgactgtaaagtaagcgatagcataaccaatgagaatcctgttgatttcgatacaataaatgtacaaattcaacaagcagtgtggtcaggtttctcggatgtttcaccaaccggtcgcctctgtgtgtgtgtgtatgtgtgtgatacactcttctatatcgatcttctacctcggaaacctccacatgctgatcatcgactgtgttaccttgaatcacctgctctctctatctctatcttcgcgctcttctcagactatctcctccttctctctccctatgcatgctgctgagtgagagttgcaagggttaggaagtacaagcactgtgaacacttaggtaactcgatatcttttcaaatacctacttagtcaactagccgacgcctaagccttctctatctttctcttcatttctttctctcttcactcacaccggcaagaagagaaaaaaaaaacaggaaaggccatcgaacgagcagcttgccttctttgtatccgtacatacagcatacatactcatacaagtgaccttcagctgccatgcgacgctcgctccctccccgattgccaagtttactcaggtcgaccacgccattcgtccatcggccgtccgtccggactactttccccgtggcttccgtcgcccggcacaccctccacgcacacctcggtcgagcagagttctcgacctccaggccacacagagatgacaacgcaccgagatcaccgttcaaggtgttcgtagagaccctcaaggcagagatcgagaagaacagggaacttcaggagaacgtcaaacagttgcagggtgacgtcggcaagatgcaagactcggagagtctcaaaaaagcaaaagatctctacgagcgagccagggtcagtgtttctgtggtgtctttgctctatcttttcggcgtttggtcttactgatctcctctttttcctttgtcgttctccttcttcaacttttctttcttgtccgttccttctcgtctttctctctcgaatctttttctttccatgcgttctccctttggcctttccacccttccttcgctttttcttttctcttcttttcttttttccaattcctagatcacgtcgatcttgaaaaacaacccaaaacttcaagaggcagccgatgagatgaagcgaacaggtgttaaagtcagcgacgccgtcggtgaggcccttcgtcaggtggaagagagcgagtttcttcgagcggtaagccttgccttctacttctctactcattgtcctcggtcttgctttcttcactttaccgtttccctttggactcatcatgtggttcacccacccttctcttctctccgtcagcttgctaaagcaaagaacgccgtctcctcggcagccgccacggccaccgctcccgtccgaaacaccgaagcctataaagcactcgcagagagcgtatcagaagtgtttgatgattcgtccaccctcaagtacggtggattcatggagaaagacatccgacggaagcgaaggcaggcccggttggagaagcttggaagagctggtatgggtgtcggctctagagtcaaagtcaacgaagagtgagtcctttgccaagctcccagtgctttctctctgtctccttacactcatcttcttgtccctctcctcttctggtttctctcacagagctggaaacgcgttggtactgtcgaaagacaacgtcgagccttctaaatgggacgaggtcaaggcaaactcgtctttcttctcctacctgggcgagctcaaggagcgataccacgagtcggaatcacccgtgatctctgccatccgaaccgtcaccgacaagatcggttcgctctcggaagaaaacgagtttgccaaagtcaccaggcagatgagaactctcgacccgagtttcgatgttgagggctttgtcagagacctcaaagagtacattgtgccagaagtgctcgatgcttatctgggtatggataaggaggccttgaaggcttggtgtggagaggctgtcagtagtgatgatttgttttccatcaagtgtcttcgagcgcgccttctttccttttagattctgaccttgttcccttccttccttaccctcccccagtcctactccatgttgtgggcaactatggagcagtatcacaagcagggtcttgtcagtgaatccaaggtagtcactattcagaatgttgacgtgagtaccccccttttttcttctcttgagtgtgtatgtgattttgctcgtttgttccaattttaaacgattggatttgctctctcatcaggtctccacggcaaagttcttggataatgacgtgccggcctacctcgttgcgttctctacccaggagattgttctgttcagacacacaaagaccggagaggttctggtgggtgacccgacgagggttgagagcgtcgcctatgctgctgtgtttgctagggtcgaagaagaattggaagacgagatcactggtggttggaaggtcttggaggttagtaccgttgctgtctcttctttcttgcttttgttctggttggacattcactcatcaacccttgtacttttcgtttctgcctacctcgcatcgtatattctcgctcttctacgtcacattctcgacttgtctactagatcgcccgaaggggagcgacgatataaaaaaaaactattcccctcctcccaagagaaatgatatcacaaataacgagaacacaaagatcaagagcatacaagcacagacacatatacacacactactctacaactctactactctccttgtccgacaaagctatcaatccatgtcgttttccatcttgtcttctgttgattcgttctgtgccgctcatagaaagaaaggaattaatcgggcaaaagatacattcggatggagaccccggggcgctgatgaggtcacttttctttattaccattcccggcggtacttttctgttgtttttttcccctggctttcttctttttgcttcctccttccatcacccatcttccatctctttctcttctcacatccacacccactcaactctaaggataaaaacaatggtctacactatcgtcgttcacatgcgagccaagaagggagaggaggtcaagctctagtatgtcctctttttcgcctctttgttatgctagtcaaacgagatgcagttctttccgatcttccgtactctctggtttcaccgagcttacccatctccggcttgtccttcctttccctcttcttctctctgggtgattgattgaaaacaacagcgaaaagctcaaggaggcttccagggtctacagacaggacaaggagactatcgattggttcgtcatgcaggatcctaaggtatgactttttccgttccctcctttttcggttacaactttcaatttccgagtgtttgttcgagatgttgtccgaactgagtggctgatcttgattgagtttctttccgtgttccgtttttggtactggtccaaactcgaactcgcggatttgtaggactctaccaagttctgcatcgtcgagcgatacgttcgtcatcatttcttctccttcaattcgctgctccttcgatctctcctcatttctatcacttgcccgatcattcatcttttcctcatttttccttcactttctctttgtctgctttctactctgcgtttgaccatattgtcggttgcgatcacaggagcacgagtccagccagaagtaccacctcggtatgaaaaccttctctcctcccccttgcacatgtcccgtctttcgaagaagactgtatcgggcatctttcaacaagttggagaagctgactcgatggtttctctttcttctttactgggtcttggtctttgtctctggcatctctggtatctttatcttctgggtcaatagagaacccgtactggaagactttcgatgtacgtctctttctttcccctgtcctcctcacctctgaactgtatactcaaaggaaggaccatcaggagaaagcaaaggaactaacctcgtccgcgttcctcttgacgtacaatacagccctacgtcatccctctcctcgatggagatatggacttgacccgatggaacgagttctagagaaccctcataggttgtttgattaccactgtatcatgaaatcgtttcttctccctctatcgcgtgcacatcttgagaagatcgtgttctccgcagaaaagagacgtcgtttgttctcaagagagttgacattgagagttgtgttacattaaaattatcagagtacataagtagcttcacctcttgttcttctcgttcttttcaatcttctcggtcctttcactcccaaggccgttcctgttctcttgtcgatcctcctcaacatcaacatcagcaccatcctgagagccagaaccagaatcaggaagagagctgctcgaaggagtctccatgtctgctaaacaaggagcggcgaatatcctcttcgagcctgtgaaacatccttgaatcgtagggaccgaaaccgcaaactgttgttgttgtttaatagttgaaacgttcgggcagagagaagagcaagcatcagcgcgagacgtgcgaacatgagaaatcaaaacgaggcaagagggagacaggaaggcactcacgaccaggaggatcatagtacatgtcatgatcgttcccataacctaagcattcggcgcccccccgtcatcgttaaaaaagagaacaagaatgatgaaaccaaagacaaagataaagacaaaggcccagtaaggattcaattgagattgatgaacgaggtctcccacaaaatcagatagagagggaaatcgcgagaaacgaaccttgaatccatcattgtccagctgttcacctatcagttgagttgatagcgtcaatgaagctaacggctatcacgtccaattcaaacggtattcgaaatcaatctgattagttcaaaggacgctgagctgaaacagagggagtgtggatagcgaatgacgtacgaaagtactggttgaattcaatgcgcagtgtattatggtcagttggcggtctatcgagaagataccgatttggtgaaaagacttgaggactgttcccagggaaagaaaaactcacaagccccaccaacccatctgtatatagtgtattaagatgacaatagaccatattcataagcatcaatcttgagaggagaaatcaagaaatgatagagctcacgttgaacctcatgtctttttccctccatcggaggaagaaacttccaagcgcgatcaacatgaaccagatctgatatgtttttttaggtgtatccgatttaatcaacatccactcgatcaaaatagtcaagtgaaatcttgactataatccaggaagaagaaaaaagaaaaagaaaaaaaagcttacacccaatccccagagaagaattgcgaaccctaaaccaactccccaaagcgcccaacctgccatggctttgcctagttccgtctcagactgtacccctccaccggtgggtttcactaagggaaacaacatcgtagctacgacccctagtttcagtgctgagaaccctgctagacctgttggacctaaaggaaggaatgaggaaacaatgacttcgcgcctgatcattgaagagaacgatgtaagctggtttgaaatagataaaatatgcgtgctgaagggacgaacggagggatatgatggaatatcaaacgctgaagatatagcgtcaatagcatgagcgccactaaaattccaggtccaagcaagacgtaggctatacgcgcaaggaacgaaggtcagtgttccttttctgctaccttcaaatgaaatgatcgcaacttacaagctacccagactacaagtaaacaaaaatgaaacagatatcaattgatgaccccgtgaaacgctagaatgtctgagcacgcgggaacaagaaacgtactgtgcattgcatattgagtatctattggaacgaaattgtacgccagcactgctccaatcgaggccgctgtttgatgtcgagaagaaagtaaaaaatcacttaaaattctattggctccaatatgactcgattgtaagacggaacgcacctgtgatgttaggaacgacgggtagaaggtatgcggccgttgtgttctccggtatgtttgtgtgcgtcgtactttgattagaacccaagaacaatccaccaaagaggattcctctatccgtcagcacatttggcgctgagaaagcaaggtattcgaacaactcactagacattgaacggtactaataaagctactgcgatactgatcacacaactgatccaccacagataactcaacgcccacaaccacccgtctcccaagccccaagcattcttcattcctattcctccagagattagcgtgaaacatgacatgggatagcatcccaagaacagcgaatgcatgggatgcctcatcgttagaggccatatctcgggccaacgaagataacggacagcaaaaatgatggtgaatgttgtgaagaggatcgtatcaacgacgacaaatattgtcgccggtactcgaaggtgatgaacgacgggatatgggatgttcaggatcagtgtacagggaattcctttgtggacgataagaaaagacagatgaagtaacaaaccaggattaaccacagacatagcaatccgtcaatcccaatggaaagaaatgtgcacatacctacacccatggtacatgagaaccaagacggtgagaaatgcttgatcctctccgactgtcatcgaccaaagagcgggcatccatatgaaaatatccatggaatcaacacaacatctcagcttgaagggatcactgtcttccgcttgtactcacaatccccttgaccttgtcctcgaccgtttcctctactacgtctaccacctgagcggctgtggaccctgttgacgagctacttctcttttgagagtcgatcatgttggtagagaggaatcgatgcttgagtattcccatgcaatgggtatgacttgattgggtttgtattacgataggatggcttggagttgataacttttgctcggttgacgaaggataatcgtgatcagtcgacatctggttggtcgcacccggattaggccgaaatgtttaatttgataattacccatttcggtcttttctttctttgactccttctattcatattctcttgctattctgccctcatagagacacgcgtgaacatgttctcagattcaccaaacgtgaattcttgatagaaggaaagagaaggaggaattccatttatttcaatgtaaaaaaccaaccccaaaagcctccttaagcctcttcctgttcagccacccacttctgatactctgcgttccccttgacctggttgtcatactcctttactaactttttgctctttgccttactgatctcaactccctcgccatccaaagtaggtatacctttgtcatcccaagcagagtacgtcttttccggtacgttcggcggtcggaacatctcgcttgcaggtaccttggccttctccatcttcgcgagctgcttaacccgttgggcttccttgttggcagcctgttgggcggctttctgacgagcaagagctagcttggtctctcgagcttcgatcaatgtctcggcaggaacaagcttgaccaacgcccgaccggctttttgtaagatcgtgttctcagatactcaatcagtcttctagtaaactcaagacacactagcgaaagaaaagagtccaaatttaccttcggtatcgtccaaagcgacccctagctctgcaaggtcgtaatctcgaagtcgatcggacaaagctaggatgtccttcgggtcggccttgctgatcgatagctttcggacttcatctcggaaggccgagattactcggagataaggcatcaacagagtctctcgctggggacataattcgacgatcatcgtttcgtcagctcatcttcccatcatctttagcgcgtcgacagagagcgttacgtacgtcagctccgccaccttcttgatctttcaatccccaaccaatatcctttcggtctccttcacccaatccaaacatcctcaacattcgacccatccaatcagcaatggtcaatgccacactcaggtttcgtcgttttagttgaaggtagacgttcgccttggtcgtcaattcaaggagctgttggagggccaatggagtgttgaatgagtcgcagagtgccgcgcggaaatttgcttgagcggccttcaagctatttgtcgataaagaggttcggattagactacgggtggaaagaacgagaaaggagatttcgacacaagaacaggggctcactcaatcgttaactgtttctcttcctcgtcgaaataatgctttccatcgaaggattctcccaaggcttctgcctgagattttcgggcttttacttgggtgaaaaagttctgcaagaccccaaaaaattccatccgcaacaaaacaagttagaaccgccaaaccgaaccaatatatcgagaatataggatgcattaagagggagacagaagacagaagaggcttataaaacaaacattgaaagaagattcgacgctcttggcctcagccatcgtgctctccttgaaatccatcttgttgttccacagctgaagcataaagcctaatcggagttgacgggccgtgttctttgccaaagcttcctgttattcagtgtatcatccgatgaacaagccccaaagatagagacaaataaagatcgaatcagagttcagtaatttgtcacaaggttctacaatctagggatgaattcgtacgtcgatggtgatgaagttcttgagcgactttgacatcttcaatccttcgatatgaagatggccagtgtggaagaagtagttgacccattgcttgcaatcgtggaaggcctgatcccgatcgttgtgagggagagaaatatcagtgttcatgacagtttgtctctgttgcgaacaaaattaaggtaaccgcgatgtaataaaactcacctcgctctgagcgatttcgttatcgtgatgagggaacatcagatccactccgccagaatggatatccatgccgtcacctaggatctcggaagccatcaccgaacactcgatatgccaacccggtcgaccttgaccccagggagaaggccatgagggctctccaggctttgatgatttccagagcgcaaagtcggcgggatgtcgttgggtaccagaggtcagggaacctatgtcgggagtaatatgtcggagcagaacgaaggtggtgagtccttgtaactcgtcgaaacagaagagatagtcctcttaccttctccctcggcaagcaattggctgttccccttactccatggcgcgagcttggcataactatgtttccactcccctccgtcaagtccctttctgacagccccatcgtagccaacggaatcaaagtacaagcttcccttttcgtcatcgtaggcaaatcctcggtcaacgatcccctgaacaaaagagacaacctcaggcacatattcagacacacgcgtcagagtatctgcaggcagaacattcaattgctccatcgaggtcaggaaagatttctcccaatgagcagcaagggcgcgggagatctggggggatgttactgtggaaccgtgctgtttaaggattgggcgattagcaaggatttttttaaaataagccttggctttctcttcgaattaaaccaagatataaaaagaaaactcacgagatcatccagatgcaaagctaacgggtcagaaacaccctcgatcagtgcctgggcgacctccgcttgagttttgttctctgccaaagtcttttcggcgtctctaatcgcagcccttgaagatgtcttgaattgacaaatattttatgacagttagcgacgtgtcgtgtagggtgttccatcctcagaagacacttcaaacctccaactcactaaggtcttccaccatagggtcatcttttcaaacccagcaactagcttgttcctccactcctgatcggtctcccatttaccgacaagtacgtcgtcccagatcttttcctcctgacctttagcaggaatttcactttccggaagcgccttgccaatcgtctttcgaagatagaaagcccaggcctctcgcgcttggttgatgagctcgggagtaagagagatggtagagtctcgaagacggttcagaaggtgctcttgacgcgatcggatgatgatctggagttaagaagaagcaatgaaattcaacagccatcagtgcatgtacatcttctgacatatctttcatcgagcatgctgaactctcaccttatcgtcaatatctgtcacattcatcacgaagtgcacatcgtatccaaagtagtcccgcatgattcgcctcaaaacatcctgagtgacatagttcctgtttaagtaaacagtccaagttagagtttatcatagataggatggtccgatatcggatgagccgtacctggcatgtcccatatgggaagcatcgtagacggtaggaccacagttgtaccaggtgacttggttagcaaccttgggaacaaaaggaacctaagaagattgtaacgagtagaaggagaccagttcaatcgtacgcgttcctcgataaagagctctgttataggtgaaacacaagaaagtgactcactttggacctagtcaacgagttccaaactttgagcaccggctcctccttaggcgtcggctgcaaccattctggttgtcgaacctttgatccagccacagaggcagcagcagctgctgatccttcagtcgactcctgagaaggtatgaccggggtgtttgagctctcaggccgaacggctgacgacgttgacattcttctaagagttataaaatgaagagacgaagtgtgattgctgctactgctgctgttgttatcactatttctgattgaaacgaccagtgaagactgagacttgaaggaacgacggaatgtatgaacgatggatctagaaacaatggatgtttgcatacaacccagatgcgttggcccggttagatgttgtccgtaatgatggtcgttgtgtttcttctcaggagcgaaggtgctgagaaaagaaggacgactgtttgaaattctaagttagggttatcggagagtcacaaattgaaaagctgtacaagcgtgaccttggaacatgtggcgttccttacctgtcagagctttctctgccgttctctcaatcttgctacttacgactgtcaaggcaaaaaaaaggccacctcattctcttgtctttctctctaacagtaacatctccagatgcctcctaaaaagggaaagggtaaaggaaagaaaggagcggacgacgatgatgcctactggttggtctttcatttcaagagtttcttctgtcgttcccttctccgagaagagttgcctttctaggtccaccgtctcagtgcacatatttaatatcgatgtggttctcgtatcgtgtacaacagggactcggttgccaagacggctacgcctccggctgtagctactcccgcagctgccgactctgatgacgaaaagccagctgccacaggatccgccttctccgcgttgcccactgaggatgacgacgaaggagccggctttggtggtctgatgtccgccatcaaaaagtcttcgaataagaaggacaagaagaagaagaacaaagcgactttcgacgacgaggacgatctggcagagtctgtctctgctctcgatatatctaaggccgaacctgagattcaagtcgttggagacgacgagtggcccgaagatgagcccaaaggaaagaagaacaagggcaagaagaataaaaaggttcgtattaatctactgtatacacttttttgccacactggtttatctgatcaatgttcttggtacaacaccacaggggaagaagacctatgatgaggacgatgacgaggtcgagactcccgctgtcgacgaggccccggtcgctgccgagcctgagattcaggttgttggagacgatgagtggcctgaagatgtgaagcccaagaagggcaagggtggcaaaaagggcaagaaggtttgtcccggttttgtttcaagacacttatgattggctcgaagttgacggcctctctgacgaatgtgtaactccacttcttacaacacgatcagggaaagcaggttgacgtccagtcagaagacgatttcgctactcctgagcctgcctctaccgtcgagcctgagattcaggctgtaggcgatgatgagtggcccgaagacgaagtgaaacccaagaaaggtggtaagggaaagaagggaggagcagagcctgctgcgcctactgccgaggaggctgatgagggcaaggaggagggcaatggagaaactaaaattctcagcaagaaggagaaggaaaaactgaagaaggagaaggaaaaggtctgtcctttagcagcaatcaaccgaatgtcaaaggcaagaagctgaatgctaatcgcaacttcttttatcgtggacacgcatgcgcgcatcttgtcatcttctgccttttcgctatcacccttcgcaggcgaagaagaaggctcaacaggctgccaaaaaggcctctgagcccactcctgctgctactcccgagcctaccgccgctgaggatggagaggatgaggacggagaaaatgaggctggcggagctgacaagaagaagaacaagaaaaagaagaagaagacggctgctgatgaagctccggcaccggctccttctaaaccccttaccggtcgaatggccgctctgagggcggcgatggaggcgaagaaggcggcagaggaggaagaagcccgaaagttggcagagattcaagccaagatcgagcaagaggagagggaggctgaagagcgagagcgggcggctgaggaagccaaggcaaaaaagaaggagaaggaacgagtacgttgcgtctacttacaactctccaacatcgaaatggctcatcctaatgtctttattgtcctttttctctgtccataggcaaagaaagagttggccaaaaaagagggtcgactcttgactcccaagcagaaggctgaaaaagctgctgccgaggctcgtctacaggctcttcttgcttctggcgttcagatctctggtctccagaaagatgttgataccagccgacccaagaagccagtatacaacaacaagaagaaggggggcgccaacaaagcggctgttgaggctcaacctactcccaaggttgaagaggtcaagaccgtcaaggaggccgaggagaagaaggtcgaagacgacgatgaggatgattgggacaagagtgacccggagccggagcccgtcaaggtggaagagaagaaggtggaagaggaggacgattgggacgttagtagtgcggaaga

SEQ ID NO: 914 - DNA, 42737 bp, Xanthophyllomyces dendrorhous
cgttagtagtgcggaagaagaggagcccaagcctgcccctcctgcttctaaaagttcgtatctctattctcatcttcttcgcatgttggttcccaaagcctgagtgcatttgttgatatgtaatcttggttattggtcgtgtcctacagccactcctgctgctaagcctgctcctgctgccaaatccattcctgtcaaggctgcccccaaaggagaggctgctcctgttgaggagtcctcttctgaggaggactcggactcggattcggattcagattccggctctgatgatgattctgacgatgactctgatgatgattctgatgacgactcggatgattctgaggaagagctcggtcccggaaagaggcgagcgttggctaaagctgcagaggagaagcgagctgcagagcagcgagctaaagagtcaagggagaagagggaaaagagacaccaggaggctttggctgccagaagtgctgatgatttgaggagtcctatctgctgtatcatgggtcatgtcgataccggaaagaccaagcttctggacaaggttcgcccaaagcccttaagtttgctcaacttttctatgacacaggagacttacctctccctatatcttcgaacttgacagattcgtcaaaccaacgttcaggagggtgaggctggaggtattacccaacagatcggagccacctacttccctactgaagctatcagacagaagacggctgttctcaataaggttagtccaaacacgctcacatttcgatcatccatcggtcgtctaacaatatgctaatctgaattgcttgtgtatcgtagaacaacgaccaagagtacaagatccctggtctcttggtcatcgacactcctggtcacgaatctttctctaacttgagaactcgaggaagttccctctgcaacatcgccatcctggtcgttgatatcatggtatattctagtttttcctttatattcatatcagaagcaaccctgatgtccgttttcttgaacggtttctcaaaagcacggtcttgagcctcagactctcgagtctctcaagatgttgagagacaagaagactcctttcatcgttgctttgaacaaggtacgtaagacagtgactgcttgaaatactttgccccaatcgctcatccgaatatatgttacttggcaaaaaaaatcagattgatcgaatctatggctggaaggctactcccgatggtgctttccaggaatctctcgccaagcagaccacacaagtcaagcgagagttcgatgatcgagttcagaagactatcgtcgcctttgccgagcagggtcttaactcttgcctctactatgagaacaagaaccttggtcgaaatgtttctctcgtgccaacctctgccatcactggtgagggtgtgccggacatgatcatgcttctcgtgaacttgacccagcagaggatgagcgagcgtttgatgtatatctctgagctggagtgtacagtattggaggttaaggtcatcgagggtttaggaacgacaattgatgtcgttttgtcgaacggatacctgagagaaggtgatagaatcgtggtctgtggactgaacggtccaatctttaccactgtccgagccctactcacccctcagcccttgcgagagatgcgaatcaaagtatgtggtgcctttctactacgtatcgttctcgtgttcaggcttgagggtggagtacgtcgtcatataggcacgctaatcatttcattttgtttttatctctccagtccgcctatgttcatcacaaggaggtcaaggctgctcttggagtcaagatcactgctcctgatctcgagaaggctatcgccggatctcgactgctcgttgtcggacccgaagatgacgaagaggatcttggagatgaggtcatgtctgatctccagaacttgcttacgtgggtcgacaaatctggtcgaggagtttccgtccaggcttctactttgggttctcttgaggcgttgttggatttcttgaaggtctccaagatcccagtctcaacgatcaacattggaccggttcataagagagatgtcatgcaggcttcgaccatggtggaaaaagcgaaagagtacgcggtaatgctctgcttcgatgtgactgtcgacaaggatgccgagaagatggctgaagaggctggagtcaagattttcaagggtgtgtaccgtactctttcctactcgctttcattgtatctacatcctcgccttttgaagtgtgactgagcgatgtctggcattctatatccttcctctcttctttctttcagccgaaatcatctaccatctcttcgatgcttttaccgcccacatgaaggcgtgggaagaatctcagcgagctgctgttgccaaccaggcttactggccttgccgacttaagatccttcaggtgttcgcccggcgagatcctatcgttcttggtgttgatatcctcgacggtactctccgcacgggaactcctgtctgtgttgtcaagactgagaccgacaacacgaccagcccgcctacgatcacgaagacgatcgttgacctaggaactatcacgtcgatcgagaagaaccacgagtccttcgataagcttttcaagaagaatattggagctggagcggcaatcaagatcgagtctggaatcaacgcccagaaggttcaggttggacgacacttcgaggagactgacgagatttactctaaaatcactcgaaagagtatagatgtgctcaaagagcacttccgagccgaagctcagccttcggactggaccttaataaagaagcttaagcctcttctcgacatcccctagttatcttactctcctactagtcttgcttttctctctttgtttttctattgcattatatccattacttttctgctccaaatcatctgttgagcatctgtgtcgaatgacagtttaagtcttcgttggcttacttttatatgtgaagagggtcacgtgattgaatttgttttgacgcgtccaaaaggaaagttcgacgcgtcgttgttcttcctgatcaagactgagatatctccaacctttcattctcaaagatcaatccatcagcagtaaactcttgtagattcaagacttgggctagttccagaggaaaaacatggctgctctttcccgtcagctagcaagcttggtggaaactattgtgccggacttagctcaaccccatcatctcgaggatggaccctcgcaaaaagaacgagaggataggcggtcagaactgatcgaatatgtaaaagaagtactaaactcgttcgtctccttcctcttctatcctctcttctgtaccgttatatggtattttgccaatcaagaaatatcattgcatgggatttccctctttgcatcaatgcattggggctaattggatgtgatttgaatgacgttctcatagaagaatagcgacgtctagcaacacaccgtccgatcaacggtctctcatcaatgatatcaagaagagaattctcactgctccctcgtcttcgtctacaactgcatcatcattatcggtgaacactggttcagggacagatagagctatccgattcggaaatctgtggtccaaagtcgagtcttcagttcgttcatcctgtcagaaccccgtcaaagataaccttatgtcatctctactcaacataatctcttgtttgaccatcgatgattaggggctcttaggacttccagctcaacagctccaattcttgctctcactttcaaacttatccgttcccacattctcgtcttcttcctctgttccgactccgatattccccttaccattcgaatcagaacaacccgctcttaaacttcgagttgcacctccctttaaggcaccagaatttggatgggacagagctggagatagactaagaagcgctccttctgtttcagataagaacggacatgctggtaggactgataaaggaaaagagaaagagatagaggagagtgactggagaaagggagcttcaaagtcagatattatgagaagatggatggactccagaggtatgtctatcctgaccgctatatggagatacaaggaatcagcctgatctctgatcaaccgttttctacgttttatccatttcgtaggctcacctgtgccatccacatccgccatactccgagacgcactttacttgattcagggcatcgatggaactttggttaagtttgacgtcccagcggtcgaatcgaacaaatggctgaaggatcaaccaaggcctccaaagggcggtttcaaagttgatgaggaaggagaatatgttggcgtcgagcttgaacagaatcttggactagttggcggattgaagtttgaagaaagtgatggacgggtacgcatcattctatttgttttcttgcctctcgattgtcttcaaggtgtacagagaagtttatttcttactgagagtctaaatttccaccaatcgctttcatccttctagcccagaatcccttttccgattaagaaagagctagcttgtctagcagagattggctggttgtatcgaacagtagattgttttgtcaaagagtgcaacgaaaagaagggtccccgattccaatcgcaattcgggatgatgaaattaccagaggatccggaaatgcaaacacctgagcagaggaaaggcggaatggttgaacaggtttgtgtctcccgatatcatatcgtgtcttttgtatatgtctacactgcagtattgaaccgtctttcacctgtttcggttttgttatgataatatgcttatacgagcagagcgtttgccattttcttgagacccaactaacggcttattctcacttgatatctgtccttcaaactcagttggattcggtggatcaaagtggcggagatggtaaaggatcgatgacgctatctcaattggatgtctggaccagagaggccagactcaagatggagtggatgaactccatggttgatgactgcagaggtttgttgtaaccaatttctacggcctaatctcgcactagttgtttactccgtttgaatgaattggttttaccagtgagtcatggaggtgctttagtttcaagaatacatgtttataccgagaatggagatccattcgcaaggaaattcgcggatgaggttttggaacaggtatgtccaagaatattatggtcctgactacctcattcttggtttgacgaaaatgtctctgtatggttttgtacgggcgttaggtttccaaacccttctttaactccctccaacgatggatttatcacggagagcttaaagacccttattcagagtttttcgttcgtcttaatccagatcttgcctcacatcaatttgtccgtcttcgacctttcactggcgctgaagacgttgggttcgaggactcgctagggatcgagggaaggaatgggattggcagtaatgggcagggtgtggcgagtcatgagctttggaggaagaagtatgagttcaagaaggagatgcttcctagtttcgtaagcgaggcatttggtcggaaggttcgtcatataaacaattgttgttctgtacagttcttgtgagaaggtatgactgaactaagaaggaatctgtcgaaatcaatagatctattccacgggaaaaagtttgaattttattcgctacagttgtcaagatagtgactggatcgcaactcgttccaagctagaagatgctgggaaaggtacgatatctgcttacttttcatgaacgccctttcatgtcttctccatctaacaatccattctgttgcatctgattcagaccttcaatacagcgacattgacggattagagcgttcaatagatgcggcatatgagattgccagtaaaaggctgcttgaggtcttcttcgacaaattcaaacttatggagcatgttaaggcgctcaaacagttccttctgctagggcacggggattttgtggatgacctaatgcgcgctctctcgttcgtttattttccctcttcgattattcgttttagctgttgagcggtttgtcgattcgcacgatctaccttacttacgcgtgtgttgtgcctgcgctttgtgttatcttcaccatggtttgatcagctccgacctgtctcggccggctaatcaactctatcgacatacactcactggtacactagaagctgccattcgaggctccaacgctgtctacgatgcccctgaagttcgacgtcgtttggacgctcgaatgcttccatacgcccatggggagattggctgggattgctttatcctggaatacaaagtggatgctccaattgataccgtgctcgatccaagggctatggaaggctatcagcgaatgttcatccatctttggaagttgaagagggtggagagtacattgaattcaagttggatgagactgacggctggaaataggaatattggaagatcttctggttggtgtccttttccctcgtaaacctttatcatcaatattgacacattatggactgaacgtaccgcgccccaaacacatatccagacactcgcgaagaatggcatcattgtcgaattatccacgccgagatggtacatttcattcgacaattgcaagcattctaccaactcgaggtaatagaatgttcgtggcaggccttcgaagaacttatccagaagaacgaggatgggctagatgggctcatgagtgctcataaggaatacatcggacgattgatcacaagaattctcttggtgacgcattctagatcagggaatgaggtgggattgcttctctctcgaacgtgttaggtagtaggaggaaacgctgatatatcttcaacttgataggaattgttgctcaaacaagttcagcaggcgttccaagttattctggatttcgtagttgccatcgttcgtccttgatgcctgctgttcacttcgtcatttttattttttttgtcattctcttatcagtttacttttgagcttcaggaaactctataccgtttcacccttgaggatgaagtcagactcgactcagcccgggatgcaggaagagtgagcccttttagacaatagttcgatttgacacacttatcctgacgacccatctttctttttaccccagggtgtttacactcgaactgttatagctgctcctagacggaatgaaggagagcttgaccgtttaaaaacccagattcgagatttgagtgggaggtttcaagatctgattggtgggattgttggaagtgcagcaggccgtaagtgctcctctttgtccattgtatcatgatagtgagctaggactgatatctcttatttgttttctcttcaaatgatcaaaacagatcctgacccgtaagttgaagttttcagacatgatccttttcttctcaaacaaggctcatctgttccttcttccttgatctctcgcatcttttagagaaatcaaactatttgccatccgctgttcatacaacgcattttacaaccttcggccgattaaagaaaagaggaaagatcgagctcgagcttagcatgcatagcccataattaatatttcatatcataccctgaaattgtgagctatagatgtaacctattcattggagtgtttgtctcaaggttggtctctccaacacttggaagcataacaataacaggaaggcatcaatcaaattcaagagaattgaaagctatgtatggtccgatctggatgaacttagtccgctctgatgagagttgtcgagttacagcgaacacatccctcaatcaagctgaactccctcttcgctcggccccgaaaaagcagaggtcattgaaaactctggtgtgggccaagaagacaacatctcgtccaatatgtctgtcaagattaatggagaatctgaaggaacaaacggccgaacaggaattggatgatggatttttcgaactttgttttgtccatcgagaggttgggtgggataaggaagtggggctagacgcgcggacgtcctgcatagtagtatgggtttcaatccggcgtatggacgggaattaaaattgtttggagcgttgtaaaatccgagtccaacaggatcgaattcagcttcagaagttgcagctgttgaagcgctgtcacaatcactggtgacagagtcggtggtactggtgtcgctggtgtgaacggaagattcagagatcgaaccgttctcggagagacttctagtccaaatagaccgtttcttcaggagccccttcgtatcgcctctctgatcatcgatccaaggagacactaatcccacgtttccggcaggttcagatgcatctgtttgatcaaacgcgttgagcgctcgaaaaacatgcgagtccatccttttcaaatgagacgatcctgagcctgcttcggcggtgtccaaccttggcgattccgagtggaagcggaactcggaaaatgtacaagttgagtcgagaaggggagacctagacagttgatgtccatgcagagggatcggaactggttgagccagaatggctgatgtcaacggtcggatccatgggtttgcttcgaggatattaaccgatccgctactgagaagtggagaggatgtacacgaggataaaggagagtctgcgaatgcggagaaacacctgagtccatatgaggacggataggatgacagagaagcaaccagagattgaagaggagacagactgtctaccgtgaagaggggtttattcgagctgcaaacaaggtcgtccaatgtacgcgctcgttctccgttcagaacacaaccggatgaagcttgaagaggacagggaagaagacagagtaacaaatgggacaaaccttttggaaccgtcgttttcctttctcgcatccaacaaaagtttgagcgcattcctcctacctaaacttccttctgttgttcccgttccactatattttatattcgcccgcggccctcctatgcgtctccctccagatactcttcgcctgcgagaggttttggagcgagtcacttctactcctgctccttctacttctacttctccttctccttcggactgatgatcagcatgagctccgccagcggaggtcatggccggcaaactagcgtagggtacatgagacactcgaacaggcaactgaagtgttgcctgtcgtctattatgactatggaaagggaccgagacaggatatttcctgatcgcctgccgatctgtttggagaggagcagggtgtagcataggagcaagggccgttgtaaaccggaccgttttttgggaggatgtagattcaggaggagcgcaggacgtcatggcagatatcaaggcggagaggggtgatattcgacaaaagagaagagaaagaagagagactcgaagccgtgtcatcttttaaatcatgttcgaggtcttcctcccgcaattgaaagcatggtatccttgtagaggagaggattcgtaaaacgggtagagatgagtcaacaactagacgtcaatcgtcgcttgtctgctcttcccgcttcggacttgaaacgaaaatgagaaggcaatcatcaagttaattagtatctaaaaaaccatgtatactgaacaaagtctgtccagtgctcatcatcaacataagcaagcgatctatctacaggcacgaaaaaacgcagaggaagaaaaagaaaatctatgctagcaggaacgagaaaagatgaggaacgattacgaggtactagttgagaagtcttctcctcgttcttccgctttctgaacctccaccttccagtttgttcccagtctacatattaagagttctgtgaaagcaaccagactgagagctgctacttgaccccaccagagtccgacgagtcctagattttgatggaaggcgagaaagtagccgaacggcagcccaatgacatagtacgctccgacgtcttttattttatttgtttttacccaggacaggcgaagatgaatattaaaaattgaacgggtcagctgagtccgcaaacagaacaccatgtaggtttacgcacgaagtacagcagctattgattgtctacccgtagccctcagaaccgatgcaccgacattctgaagctgtcagttcgattcgcaaagaagaaggcacatgcgtattgagcgagctttcgtgatgacaaaagagaaaaagaaagaagaagacaaaccccatcggagatttggtaggttgccattggaagaacaacttgtttgataaggctcacagtgtcctaagcaacaaagttggaggagatatttaattccagctctaccaatgacaatactgaacaaaaaaagggagtagaagagcaaaagagcacgtaccttatcatgcgtgaacgcatacccaagacggcccctaaccaagaacaggattaagcctgtaagagccatggtggctgtttccgcaaagacagtagctttgacgagtgatctgatttctgagattgaactctctcctacgcccatctgataaaatcagtagccggtttagagaaacatttagctaaaattgcttcttcttctacatgggggatcaacttgactaggattatcaaggcaagaacgaacaaggttacccaatcgggcggtacaagccaaaccgatcgcataaggaatcatacacaacgctccgtcctgttcggatacacaatttcaacacgtgaagagtcagcatctcaaaccatcttctatccttcccttctgggcgatctaacaagacgagtttagcatgaaagaaccaaagctcaccaaggccgacaacccagcctgtgcggtcacagcagtttctcccaatcttccggcaaggagagcgacgatttcgtaagcccaccattcggtcgagtatgtctgtttaggattttgatgccaaggttgaaggaatatgctgaatgtcaatcaacgtcacgtctgatagagaagattgtcatctaaagagtgaaatggaacgatgaattctcaccatgatcgcaggcgcccaaatctttgtgaacccagcccatccctcgaaagcactccatccccaaccgccccagcattctcccggtccttcccctctgctgttctttgaccatttgatccaggctacaaggcatcctccaaagagccaatatgtgattccaacagaaagtccggttccatatatcccgagcgacgtcttgaaggtgagaagggaggcaagaaggatgtggatgggaaggaggaagataatgatatatgtcgatggggacactgttgaaaaggatatatcagaattttgggtagaagttatgaggaggggaatataggacgtaaggtaaagggaaatacacactcattcctggatgatcattgtgcatataaagagtatcagaaagtatcagatttcggatagttggccaacatggttcacacaaaaagcttgacaaaccttgaacttgaagaaagttcttacaggcctgttgagcacaaacacgcacgatgagaccattagtttcatcactcggtgaatgataatgaattcgaacggtcactagaacgtatgtgaagataaaccaacctccataagagcatatcctacggaaatagtcaaagtaagacagaaaaagtctcagagttagccggctcatccatgagtaagattctttgcgctaagcgtatgcatcttgacatacccggttgactaaacatcataagtcttagatatcccttcagcccgtgagctaacgatggcggttgtcccagcgcgagcatctgaatttgatttcgacgcccatctgtcagcgtatactacatacgagctaacgaagagacaaaacaagaatcagaagataaaactcacaatcggttcaatgaaccaccataccacaaatatgggcaaacatcccaagttagcaagtacgatcgttcgttggaggacgacaccgacgtcggtctttgcgtgggtgggtgatgtgtatagtggagaggagagagtcatctgggtggacgttgcggcgatgacgatcaagttggctagaagtaagatcagagagggtttaggtgtgtgacaaagggatagtaaagatggtcatggtgagtgttcaacctagggcatatagacaaaatctcggatgggactcactggtaacagattgtatcaagaacccttggccgactagtttgcgatcaaaggtgtcagccatataccacccaaagtgtcgcgctgaaaaaggaaagactggtgaatgggaacataccaatagcgagttccagcggcccctttctacctacgatcgctgcactcgttagtcccactgacgactccagtataaagccgagaatgagcgggatggccttcttgaccaagtaggtaaattccttggtaacggacggatctgacttggatacgatctggatcccaacttctggatgaagctcggaccgatctatcaacggctgacgctctgagagagacatgctgtggatatgtatgttgatagagatatggaacaagcgaggttggacggctaaattgatgtgtttatgagaatcctcccaaatattttcgctctagtccggcttttgattacgtcaggaagtttttgagcgaggatttatccgtctttacgttatcttcggatgagctgtccagtcggagacctatcctatgtatcttatgtacagcgagagaacatgtatagaggatagatatctggacgtagcgcaaaaggaacatgaagttattatgttcagggtttctcttagggagccgatgttatcaatccaaatagatgtaaatcgttctggcgcgcagggacccaacgaaacaaggatcagaatcgatcgaatgagatatgttctctcgtctaccggtcggattgctctggaggtggcagttgagggtgcatggttggatgtcatgttcggacatataccttgagactaaacgaaagattatcaaagaagacgaacccccccaaaaaaactgcatgcacacatagaccagaatctctccgtgattcttctctcaagacagcatcaaggtttcactccccatcgatcgcaaagccttagtagctacttcatcataagagtgaagcaaattctgatagtcgatagcgtcaagttccttcttgccagtttgaccttcaacaagtttccatgtaaagacaaccatgatggtaattccaccctcaaaccctgctgaaagacgcaacactactcgcataacgacatagaactagtacacacacttgctgagagtgcactctgtgttcatataccgcccaacgaacgctacatgccatgcgctagatgctgttgatgtatgctgagtgtgttgatatcacgtgacctgccccgaaatacattccccgcccattcgtttgtttatcggtctccatctggctgaaccggttgcatcttaaggccattctccctctgaacgtctctcttcctttcctcctctacttctctcacttagcctccctgtctccgttatacccatccctgtaacatgatctccactcgttctcttgctctcgcagctgtctctcttgctggatcagccaaagccttgtcgtcctgtgtgctcttgtaagtattcagtttctacttcgtcaagtaccaaccttttctgaaccggatactttcgacctttttcttcttcctcttctctcttttccaacactcaatctattctcacttgtagtgataccacctggaacctctatgcattcggaggatcgagtgatgtaggcttgggagcatccccttggtcctgtgagttaatcttcctttcatgcatgaccttcctttctcttcattccatacaactctctcaaagctattcgctgaatcctcgttctcctctttccttctgtacatacgtttgagtacagccatttcggccacaacacttcccacctctggcagaccgtaagctacttgtctttcttcgtcctttcgcataccctgacactttccccatccaatacatccttacgcgccacccatttgcggttctactctagccccttcactggtgaacacctgacgtgccacctgaaccagtacaacaacttgttctacttccttggtgccgatggatccaactcgaatgtcatctacatctatgacccttcaagctcgacttgggcttctcaaacaaccactggtgttcccgatctttctcagacggatacaatcctcgaccacgatacccttgtctttttcaccctctctggatcgactttgtaccaactcgacttttccacaatcacttcggcaacttctggatctggtcttgcctgggacaatgaggttaacaatgctccattcaatagcgtgagtatctttcttctctttgttgttttctcttctttgtttttttttcttctcttcatcgttatttatatctcgctgcggcttttttaaacttcgcttgtttacctggttgattcccaaacgcgcgccatcaacgcccgatgttgcgttccgtacagtcgtacaatcctactatggccctcgcctcgaaccacattcagttctttggagcgcccaatgtggctgctggctctgctgaaatctttgtcattcactgttcgtctttgtcttcgttgtccttctttctttccctccatatgtgtatattaacgtcggtgtttgatgtctgctcggattcaatcccttagactcggatttccaagcggctgcccaggctttccctactttgaacggtggagccgcgttccctgactcccacggacaggctacctcgttcttcctcgacagcggagacgcccagctacagatggcctttgtgccagatgacttctcgagcagtatgttctctatctcttctattcctcatcgcagtccggatcatgcccagtcatctgccgtcctgaccttgtctttcactgtttttcttatttaatcatgcagcctatgtggtcactcattggaccagttcttcgaccgcaggctcggtaagtttattatttggatattctcttcccatactttgttgttcatcactcttattctgatcttcttcgattcctcgttccttatcccttcagacggatggcgccccagatggaatctcaacctacatcaacaccactcagattcttcccgcgccttcctccaaggacacatcttcctcctacgcggcttcggacaccacgctcgtccaactcgactctactggagcgctttaccagcttcaggcgttctcatcttccggtggatacgtggttaactcgtcagcggcttggtccaagataggatataccctcaccggaggtgtttccaccaacgggtcaacctctgcttcttcctccgcctctgctgccgcttcctctgctgcttcttctgcttcggcttcttccaaggcgtcttccgcgagcatgagctctgtcaaagcttctgcctcttcatcgtccaccaaagcttctgcctctgcctctgcttctgcttctgcttccgcttctgggtcgagcaggttggctcagaccgggtggtggggtctagtcggctcgggcttggttggtttgggtgctgttctcttcctttaaatcttgatatttcttctctctctcccacaaggacctcttcattctcttctctcttttcactttccagctacctttttccttctttttccaacaaaaaaatcacatcttggacattagttcttctttcattggacaattcttcttcacatcagacaagcaaacatttcttagccaccaccactcatctaccgtcgacgcgtctccttccactatctcctctcttgatccctttctattctgtccagtatctcgaatatcagccaagtcatcctcctcccgtgtacatgtcatgctttcttgtatgggtagaaatctgagagtgaaagtgtgttcatgtgtgatcgtccttttctttctagtctaccctacgttgtgccgcaccgtggtgcacccagcacgctcctcaatcagtcaaagcgaaagtagaatgtagaggatggaaaatcgaagaaaacagataggaggaaagagaaggagaaggacaagaggaggaagaggaagagaagatcaccgacgaccttcctccacgccgtccgcgccttccctctccaaatctcgttctcgctcccgatccggggtaagatcagtcagtccttgacgttcttcagagaaactggattcgtcgtctccttcgatcgccgattcaggtcttggtgtgccgtagatcgacatttgagcgacgatcactgcgtttgtgagagggtttgggtgaacatgtttggaaagagaaggaaccgtaacggtcaaacgttgagcatgagcgacaacaaagaataaagatgtgatcgtgaagatcagaagagttggaaaacgaaccgaggtcgatagatatggtgatcagaccgcaaatgatgaactgttttggcgatttcttaaagactgacggattttcaaacgaaaatcgagagtgaaagctcaagaacatcagtttcagaatctcaacaggaagaacgtaaagatggataacgaacaaaagtagcaagtccttgaaagagggttgaaaagataaattccctcttcagttgagaggtttagcgatgaagaatgtgacgcgcataatacacttacttgaaaatgtctcctcccaaccagcctattttccgaaggaatgcattgggaagaaaattcagtcacatcagttacatcagaccgttatgtatagatcgtttctcaaagagaggcatctagtgtatcagataaacgccggagatgcgcacccgctaacgtcgatattcgaagtccataacagctccttcgtcgaaaatttgagaatgcttgtggtgttggcagttgagattcgattcccaacgctgtcaagagttaatgcacaaccgggaacaagaggtatgaaagaatcgagaaagcgtcgaagcattcttcaatcagctgctttacttccttccgagtcccgataaagtataagagtacaaaccgataaagcccaagatatcaatgaacgtctcgtgaccaccaaagataagatagagcacgcagagtatgacgatcaatccggcaaggaattcgacatattgtccgaaagaagtcctgtaacatcccaacaatcacgagggtctggatcaggcggagttgcctagaagacggaagaagctgaataggttcaggaatatcactcaccaatcccaaaaatggaacggacggcgggatgattcctcggtatcaacgtcggatttccggtatttgagtagactacaagcgcaagaaacagatggcaggtcaaatgtctggtcactatatgtatcacaatctttcaagaacactcacatgaagagaagcacgagcatcgaaagacataggaagattgattggaacaggagggctggtatgtacagcaggatgatgtgtatgtcagtagctttcccgcatagagcattccaaatcagaagaacgtacctaattcgaatcgattgcccagccagaacacgcatcgtgcgatgttggcaatcaggatgatcgcacacacatctcttgagaagcctgaagacaaccgacatcacgaatgagaatcagctatctccatagaggcgataatagcgggaaagaatgagcacacctgtagaatcctgcttttttatgattgaccatgcctggtctgcatagataagcgggggaccgatcgcaatacctatggatgtaagagctccgataatattacccatgatgtatataagaccgaaaggcaagaaagtgaagatgaaggtgaaggtgagaaagtgaagagtaaagacgcgtaacgtccactctcaattaccaccaccatcatcaacctcgacacccatcatcttccctacgtagcattctctccctcatcttctcttctctccctctttgtttgttctatcgaaccattggtatcaacaatggcttccgctctcgaacgtaaagctactcgcccaaggctagactctcttcggtcaactacttcatccaccgcaggcggcttcgtccgtccaccctcaccaacgttctcacaaacgactatcggatctcttccgccaggagcaaacgcccctcatttactcatcactcgagctgatctgagggagagtctgggaagctatgaagaattgatgagttcgtctaaacagtacagacaggctctgctggcaaagagtgaggcgacggccaggttagcggccgcgatggaagcctgctcaaggtacgtcccgttgtgctctgtgtttttctttctctttctccaacttgatagtattctcatgtcggaaattttgtcggatcttgcagggtgaagggagcagatcactccggtcccggtctgatgtcttgcgcagggttcaatcatgttgtgtctaactctgagcaggtattagcacgttcattttacgaagtacatccttctcttctttgtccaagatgaacccatctctcgatcgtccctgcgcttattttgtttactttgttgtccaaatctataccttccttttcaaacttcaaaggactttgagatacccctgcttcactcactcgatacttaccgccaagaagttagcgaccgtcaagccaattatgaatctaccctggtcgcaaagacaaaggaaattcgacggaccgagtcggagaacattaggcagggcaagcggaagggtaaaggaagagatctgagtagcttccggaagacactaggcattctacagagtcaggtggacgaacttgacaaaatcaaaggagagtactatggagaggttcgtttcatctaaagctttctcttctttcaatgtcgtattcactatatgcatacaacgcgtggtctgttgacgtttacattctctcatttctgccctttcctttcgattcttgcaaccatgtccttcgacacttgctttttcgcaggtactggatgggtgcgcatcgctttgttcatcgcctggtctggagcgcaactcatcgtaattttgcttatcaaccctcttcgtctattatcatcttagggaagacgagatgtgggaatatttgctatcaaaaatcggaatggttgtcaagacacacgttgatgtgtatgaccggttgacgaccaaaggcaatgacccaatactagagcctcttctggccgcaaatccgggtgagaacgtatctctaccaaatatgtctgattgagtctatggaagctcattacatcaatgatccttgcgcttttagatccatttgaggcatatggtcaggcagatcagacagaagggatgtttagtatattacccccgtgcgcgttgtctcattcttttcagtgcaaactctactgtctcttttgataatcgagttcttacattatcttttgcgcgttgatgtccatcagaatcggtatcctccctcctacaggctctacatccaatcttctctcccttcatagtgcagcaataggccgaacgtcccatcccgttctcactggctctaatcaatcgtctcagccgttgactcctaaatcaagtagaccttccacatctgttgctcaagattcgactgatgaaccctccgccgtcaatctatcggcagaggatgacgacgacttcctttcgcctcgtaaagtcgaaagtcagaccgatcggtttgggtggatgatgggctcgaaagctggttctaccaacggggacctactggaggaagaaggtgaagacgaagacgatataactacacctaggaaagatcctagaagaccgatcgatacaactacgggagcagacggaaagacagacctgtccccaaaatctgatcgcgctatagaactaatagagaacggagagaaggataaagaagagagagagaaggatgataccgaggaagaggaagagggtgagggagaagaaggagacgagacaatttcggcacgacaggtcgaggagaggggaaagattccttgggaagccctttcctcttccctagaaggagatgccagccgggttggaagatgggcgactgaggttaacgacgatcgggattgatctgagcaatatgctatccaacttgtacacactggctgtggcctctccttcgatttttctcctcttgtttataccttgggctcctctacctcaagttatattcgcttttttcttcttccttagacaccatcttatagtctgtgcttttcttcgttctctcaagcatgcttgatccttgtttgcccaggaaataaccgtgttcctgtagtttactcattcgagtccggttacctttctcgtatacccgtctcattacatatgtctcgaatggagcgcatatcgtcccgtttttttcttcagactcttcattcctatttcttcgtatacagttttccggttggtcattcccgttctcctctgtattccctatctcgacacctttttcttcagccgtacacctccatccgtttcagggtaaccggaggcgaaatagtcagaatagatctatctgatgtatccgccttttggtctatataaagtgatagacgggaacccgtaacgatcgtgtctgcctcgatgggctggtcgaccaaacagataggcttcttatcgaatcaaggcaagacgcgaagacgtgaggcgtgatcgaaaaagaggtcgaggcgactgaggtgggctgctgttgattcaatagcaacgaagggcgaatgccgaaagcacacaaacaagcgagtcctatgtaccgccgatgtgaaacagaagacaaaaacagattggcatctatgaattgagaccggtccagtcagattgagaaagaagatcacatacattggaccaaatttcggtgaagctcatatcggtttcctcccaatgagaagaaaggccggctctacccgcttgacccaggttttcattaactgtgatattggtaattgagagtttcagtcgaatgaaggtagattgttcgaggcatgtttcaaagaagtctcactgtggacggtgacgatgtacttgaatcctttcggttggatctctgcaacacagaaagaatgatgagtttgaggcgaacctgtgaagattgacgagagagtgacgaacctagcatgcgttctttgacgcgacgtcctatctcgaccgtccagcgtctggttgtgtcggcatcgtcgttccaagcagagcctacaatgatagaagacaagtcaaacgacaagacaccatccatatgagctatgtgtgtatgggatgatcacaaagagagatacggacggaccttgaagtatcgagttcaaaagctttttgaggtacggttgaaaatcttccgagttgaatcctttcgagctgggcatactgttgcttcacacaagtccaagagagggagcgatccaagggtttgactctgctggctgtcttgctggcttgctggatggttggatggttgggttgttggtcggcgtcggttgatcgtttaaccggctggtcggaaattctctgtgcaccttttctcctctgacctccgtatccatcctactcccccatagacacaacaaacatagccggctggataacgatggacgaacattcgatctacagccatcatatctctcaacccactcgtcccatcctggcaacttcttcttcgttctccgtgcctctgagttcatcgggtctcgtcctggcgctcagtagtgatagcagtaaccataacacgccaatcaagactagatctccgcgcactccaaagttggatttgtcgagcagacgatcctatccagaaagtcctctagactcgcgtaatcgtataattcatccagatatggtcgatatcatggcagaatggggtggtatcggaaaaggcaaagagagggtcaggtcagagatcgaggagcagagtatgcgggagcttcatccgaccagagagaatgacagactggttccacaacccatcatcgttccacagaggggaatcaagatagctggatttccgatcgtgtttgaagatgttctgaaaacatctgtaggaagagaaaaagtcctggtaaggtctccgtgatcgactgatctctgttgatgatcatctgtcgtatgctgattctcttttatctgggtcttaaaatgcgtagaaaatcgtacaatacacaatcaagctttacctgtacctacgattttttcgacccaggaagaggccgactgatttagatgttcgtctaaaggcgcttcaggatggactagctatctctcggttcgtttcctcctctcgatgcgtttggatgacagggcgactctaccaggaatgctttcttctcatctctgacattttgtattctcttcagtcgaacattctacttttttggcacattgagccctttcctccgactcgcccgatcagctccgtctaatcagtttcattttcaagacctgatgggcgttctatcgggtgcatcggacgagatttattcgttccatcgattagggttcgtcgggattgaatggggagagagatcaaacaaatgggtcaagttcgtcctcctcttacctgatctgagctgttaaaccataactgaatttcactctcttttcatgtcgattctagcaatctttggctcttgatgacattgattggcctatcaaattactcgatatctactccttcgctcaccagaaggattatctcccttgaaagttcactaagcgatccaaatctcgatgaacagatgagagaagagattgaacgcctgcaaaaggagagagacatggaaagatggtcgactttgaaactttgtgagtgggacgtgtggcgcatctctcttgtttggcaagtccacgactgattcatgtacgcatccatcactatctatcgcgcacgtacatattcagggttcgaccttgtgttcgtgtcgtatgaagtttttggatggaagtcgttgaagaatccgttacagatcctatcaggttttggctcagccctcgtagcgttcgtattgactcccctactttctcaagaagagcgctcgtttttcgtcataaaaatgctgatggtcctcatgagtaattcatttaccgaacagatttaagaaaatctatgtggctcatcaatccaaattcatttcgggataagaaaggcacgcctcaatctgcctgggtccatatcggacacctcgattaagccagatcgttgtatattaactccttgtaaaatctgtacgagacttagttgtagttcctagttattccacttcggcctgacgagcataggcgttccagtgatgtattagggggaaattacatttaattgttactgctgcttgccgatgatcggagcattttgatcacacgttttccacgctttgcctgttcaccttcaactttgagcgcgtcttttgccgttcccattaggtcctgtttgaccgatcgagttacgccagtaattgcaagatcgtagaatgtaatagtttctgattgagttaaggttgaggcaaagtacgaggcagagcgagaaaagactgaccgctcgagcgttgggggctttgatactggataagtaggccaaggcaattgggaagtatttcgatggaagctaaaaagaaatcatacgtaggagtaattagtatggccttctgcatagcatgcatcgtacaggcaagggggtctagagatataaactcacctggacatcatcacatactcgtcgaattaaccacgatctacaagaataaattcaggatgcataatggtatcagcgcacgttaattttctctcaatatttttatgcagagaaacgaagatgactgactctctggctttgttgaaagtccatcgctcattgctgactccgtctcccttctttgcctttcctaaacgctcctgctttttcttctgtgcgtactgcttagcggtaagttcaaactttgcctcggccggggtgtaatccgattgaaacaggtttccagattggatggccgagtaaggatccaacggcagagggtgagcagatttcatagatttcttggggggcgcactgatcggccggtagatgggagaggggttaaacttgagatacagagttgcataaacgagagctgataggcagaggggttagtatcaggaccagatataagaatggagaaagcaaagggagaagagagtgcaagagaagaacctacccagacgagctccttctttcagagtggtatcggcttcgatatcttctttcgtaggggttggctcggaatcctcctcatcctcctcatcctcatcttcatcctcatcttcctcgccttcttcttcgacctgatcaaccgttgcttcacatacagaagcagccgaaacctcggccactcccgaggcctcttcatcgtcctgcccttcttgtccttcagccgaagcttcttccgagtcaacagcagcaacaggagcaggggcaagagcggcagcagtagcaacagccgcggccttggcgtcctctctagctttctcggcctggtcccgctgcttcttctgacgcttcttctcagcccccgtcaacttcttcttggtcgctggttctgaagtcggaccagaactgaaatcttcggcgtcctccctctttcgcttctcgggctgagccctatttaggttagtcgacttggagggcatgctgtttgaatgtgtgtgtgtgtatacttgtacttgatggctgtatacaagtcgtctatgagagagctggttgaaatatttcggccagcagagaaatcgtgcttagtcagctagtcaagcttactttagacgcctcctacttccattccttctctcgttcaatcaaccatcctataccctgtgaagagagtgagagaatggcccatcagcagcatcaaccgaactagtgagtcggacatacatagcttttcgatccaaagaagtaatagctcatcggttttccgctcacttagcatcccgcctcccccaccaacacttccaggtatgcaccagatgccacctcctcaatttggtgtccctctgccccctacatcatcatctttcatgggtcctcctccgctcccaccaggatggactgagcacatcggtgagtctagctgctcacgtctttttcttgcagaatgaaatctgactttatcgacaaatcacttatggtcatgtctgattgctcatgacgtaacagcccaaggaggaaccccctattggtacaacgcctcgacgaatcagtcggtctggacgcgtccactgccttcatatcctcccccaaactacagtgtacctccccctggctatccagcctttcctcctccttcctcccttcagcagccaaccgcttcatcttccaataccgatggcgatggcgatggcggaaagaaaaagaagaaaaagttcaagtccaagacgatcatagagggcacaaaatggacgcgaatcgaaacgctcgaaggggatgtgttttatcttgacaaagagagcaaggaaagtgtttgggaagtgccagaagaaatcaaggtacgtcgattcatttcgcgaggagagtgagacttctttggttttgatgaaactgacttttgaagatgcactaaacacggtactgtctggcgcgaaccgttttatgataggagcaagtagccgaactagaagctgctgagaaagctcgactagctgagattgaagctgccgaaactgcccgcttagcagagaagaaagcagaggaagaacgcgtcgctcagacagagatcgagcgcatccgagcagagttagcggcttccaccgccgactttaactcgaggaaacggaaggtctcaccaacggaagacgaaccaacagctgaaactaagcagcccaagttgaaatcgattccgactggcccttcgatcgctaagaaggcaaatccggaaccagaagtggatattgatttgctttcaaacatgcacaaccaggagagtgactctgaaactgacgagccgactggggatggggaggatggggagggagaacaagacggaattgggcctcaatcggccgaagatgaagaagcttggcagagggctgtggctgccgagatgggaattgaatatcttagtccggaagataggatcaagaaagaaagagaggagaaggaaaagacgaaacgggacgaaaaagagaagctagaaaaggacgaagaagaagcgagaagcaaagtctttagcacaagaggaaagatcgagatgaccgtcgaagaaggtcgagctcttttcaaggttcgtgttgataaaaaaaaatctttctcttcccgtgcgttagaatcttgtcgtgctgatttgttgtctttcgaaatatctctatcaatttcctttatagactctactttacgagaaagaggtttcccctgtagcgccttgggagacatccctccctcatttcatcaacgacccgcgttatgtcctgctatcctcactcaaagacaggaaggaagtgtttgaagagtattgcaaggaaaaggcccgagctattcgtcaagctaaacttgctgctcagcaacagtcatcgaacacgtcaactgcatcggaggagacagagagaaagcttagtccagaagaagcttacagggcgctattgaagaaggaagtcaaaagcacgcgaactaggtgggaagagttccgaaaggggtggaaaaaagacagaagattctttgcgttcggaagggatgacagggagagagaaaaggctttcaaatcatggttgagagaactgggagagggtgagtctttggactttttcctgtatcattttgagttgagtagaacgagagctgatcactagagactttgttttatatttttagttaaacgggcagctgtcaagaaagcggaggaagatttctttgcgctattggctgaatctagtgacctcggacccgattcctcatggaaagatgtgcggctcttcattatttcttcgaccatgtgtacatcgtgtgatgtccattgttctgcagacttacctatatctttgcatcatttgtttctatgatttgacggaactatcccaggtcaagaggaaatttgagcgagacccgcgatacgatgctgttgggtcatcctcattacgagaggaactcttccagtcattcctgaaacgaccttccaagcagacgaccagcgctgagtccaaatcttcgtcggcacctcttacggcagctgaattggaagctcaaaaggcaaaagataaaaaagaacgagcggaagctagtctgagggagcgggaagagaaagtcagggctcagcagggaaagatcaggcttgagaccggtagagctagagggatggttgggagggaagaagcggagagggagttcggaagcttactggtagataccgttaaggagcatgatgtgagttctggatgacccgatctgacttgagcgaatcatgtttcttaccgaacgtttcttttgtatcaggcgtcatggtctcactatgtacctgtcttggaaaaagatgcccggtttaattctccaagtctcaacttgggggacaaacaccgactattcaccacccatctcgccacgctcgaatccaaacgatttgctgcgcttcacgcccttttcctcgctcactcgcccttgctccagacatcgttccaggaaatctacgctcccatttcgggcgagtttgcggtaacaaggttaaacctgacggcagaccaattagaggatgagtacgatcgttggtctcggacgaggttcgaccgagctagagctgaactgaacgagcttctgaaagagaacgctttcgttgggttctgggctgggctaaagaacaaggaggagtctaaaaaagagaaggcgatcgggttagaggaaggatacgaggaggacgaggaggacgaggagggtgatgaaggcggtggaaaggccaatctgaaggagatggcaagtaagatcgacttgagggagatcgaatcggttctcaaggttcgttgaactcttccctttctttcctctcacgatccgaatttagctcaatcacttcattatatatatattttgacttagcacgaccggaggtatcgactgtttgatcatctcccagaggagcgagagagatggatcaaggtatgtgtttgcgcttttgatacctcccacaggcttatgtactcaacaactcgatgtcttgtttcctcccttaggaacatatctctacgttggttgcgcccggtgcttctgtccatgtgaatcactcatagggcaaatcagtagagaagagcaagatagggatgggcggactagtacaaaatgaagaatacaatgtcgcgtacttgttttagccccttttttctttagccccttgttttagactgatctgtgacaaacaggggtaaaatcctagagacgaacaccttctctgctttctttcactttattagccctgaccatcattccttctcgcttgtttatcactttcttctgcgtctcgttcattttgtcttctcataccatatcccccatcgacattcgttccgatactcattcagtattcgctcgctcgcttctgtggtcattttcgttgagaccaaaattcgaccttcacccctctaacagcacctataatcgcctcacgttatttcgtcctatctttcggtttctttgacttcatcagtacccctttctgtgaacaatgtctctcaaattctatgctcatgctcatgaccatgaccaccgacgccaaagaagaggatttcagctgtacgattctgcatcttgtaagataaattcattcatgttcattataataaatatcatcattcgatatatagaaggctttctagtcaataatttgaacgttaggagagaagtctaaaaattcgggattaatcaaaacaacgaaagggacgctaacttcaatctttttctggtctcctttgtattcaattactgtctcgaacgagttagcaaccccttctgcggttatcaccacggcctccgttactctgcctagcactggatcaaccacgccgactgccttagcacttaccactgtcagcctctactctcctctcagcacttccggaacagaaactcatctcatttgcttcttgtgtgtataatcctccgatggacttgatttagactactgctgccgctattactacgtccggtgctccacctagcgcggccctgcttacatcaacggctttaacctccgctcaatcggccatagtttcaagcagtatatcaacctcgtatgctaacatccctccagccagcaatgatagtgagttacagacgtgtacaacctgcctacacataatcctagcttttccaagctaatcgcctttgttcgagaaaccatcagcgatgacaaaggcgagaataacagctatcgaaacggggatgtcaactgcgctgctcgctactcaagaggcagatacttcatcaacaacaactgtgataatgactcagtcgtcatcaaaagtgaaaaaatccagtacttcctctcgttcctcatccgcgacgactcggttaagttcggccagtagcagtgcatcgacagcaatagccaatgctgacagctcctcctctacctcgtgcgaccactttgctttctttgatgatttttgtccacctctcaagatccagtgactgatctttgccccagttgaactgtttgttttagactcggcgtaggatcgattgctggtatcgttgccgccctgtgcgtgttcctgcttgttattggctgtttctttgtcattcgatcgaacgctcgtcagaagcgaaaacgggcggtcgaggttcgttctatctacttatcaaggttgcacatcgtctagactgtccatattgtatttaaacactcacatgtacccttccttttgtgattcactggtgatccgtttggtcctttgacctgttggacaggcctacgcaccctattcggactggaataatggcagaggatcgacattcgaacttcaggacgaggacagtggctcgactggaggaatgattgagcgcaagccgtcttggagagatcaagggcgacctcgagatatgggaggaccccgaccgcctacgatgattgaaagtgggagagctgggatgggtgctattggatctctcgggcgagtgtacgtgatatctgtcgtgcctttctttcatatgaaactgacatgcgctctattttgtgggaaaatgacagtccatctacttcgacaccagtccctcaactctccaaatctgctcagccccaaacttctgatacgaccgttccttcattctctcccggacaaattatccagcctcttttcactgctggcctagctcctcttcctccggtagctatctcttctacttacggtgagccaggaccaaacgacggcacaagatgggaagcacaaggaggagtgggaactggaatgggttaccccgtcggagcggcagggtacgttcaacaacgacagcaacaaccatcaccgcaacaccaggcctatacaaacgggccgatgtaccctcattcccatccgttatctcactctttgcagccgacgctgtcgtctcaacaaccgtatccctatcaaaaccagcaaccattcacagtccagtcaacggtcggccaagtccaaatgcaacagccttcaacgaacaggcagacgatgttcaatccggatgacgcgtacggaggcatgtagcaagaccttctcttcgtccccggattgccttcctatgtgatgtgtgatgtatgatgagtgttgtgcctatctcttaatcttttttctctcataccctacctacatattcttaacactgttccatagtaggcgacctccctctgctggccaaaagggagtcttcatcaaagcgttttacccaacgtggcctttcgcatctcctcctcttctaattccattctttcttgcttactctgataatccacttgctctaccctgtaggaagagagtagacgatccaaccacactgcgcttgctcctggtcagcctgttcctatcttgtcttttctgttctcatcattccgaacctgcttaatgttgccgctatcattatcgctatcaatatacccatggacgatgttatactatactcggttatttccgaagtccatcgtccgtaaagacccgacaagcccgaaccggcatcttccgagacttcacgtgttctgttcctgtttctctttattcctcttctgtcgtctgctcttccataaaaccgtcatcgtacatcgtgcacatccatctcttgctcccgtcgctgcctccttctctcatattgtgctccccttgagaatacgggaaaggaagagaagataaaagaaaggaaacgaagagagaaaaaaaagagaagaagaaaaagagccatgttcctccctcctccacctccactcccgtcagcactcgtgtcgacgctgctctcctacctagtacccaccccaaacccaccgattccaccagacctcatgtcaatagatctccttcaacgccatcagttccttcctccgccgttagacgagccgatcgcccatttcactcctatgtctagcaataccaagcaaggagctgaaatcttgcagatgacgggagatcttgtcgaggaggtcgggcggttaatgggaggcggcgaggtaaatcccttctcctggatattttatcgaggacgtttgttcacgtctatgtcgtggtgtgcttcatatcggcctttgctgacctacaacatttgaacctctggttgctgatactctttccactataagcaccctgtgttgacagcgagctataagcttccagactcacagacacttcaagctcggattcttctatatgcaacccattcgaatcagccttcacttgagattagattcgtatatgagtctgtcgagcgtggatggaggttccacgagcttcggaacatatcgaatgccccacctggcgatcaagttggttgggtcgtcgatcttgaccaggcggcatcttctcggggacagctggccacgtcagaacagggcgaccaggatgatggcgtggaagatgacggggatggcgatgaagaaggtgcagatgacttctggggtggctacgattcacccaaacaggacgactcattccctacgtcacctgagggtaccgctaatggtagtttgcctggagagttagaaaggaaacagtcgtcggcttcgttggacgactactggactagatacgatggagttgaagacggattggcacccaccgcccctccgacacctcatacacatgaccaacctgaagatcctgctcaatcgatcgacaccaacctgttctctttaaattcttcacccagtaccgattcttgcgcagtcgcaaagccttccgattcagttactcatcgaaggacatcatcgacggaggaagatcgagttatttatggaacgggcggagagacgcctataggctggacgccagttcatggaatgacacctgctaccgaatttgaacctgctcctcctacgtctgccacgcaaggctggtatgcccgaggcgctaaacgcgcaagttatggctttccctcatataccgaggaagaaggaacgtaccctaaatttcctgcccctcctttcaaaggtcttactcctgcgtcagagacgttcgagctaccaaacgttgatcatacatatgaagctgattcgcctgaggccgaggaagacgcaaaggtatctgggtccacagttccttccgatccacctccgttcatcggtcgaccaccctccagcaaaatgcaggtctcaccagaccgatcactctctcttttgatatcttcctctgtcacgacaaatgccctacagacccaagcgcttcggtcatccttacaatccatccttcaaatgcatgttctttccactcggaatgagctaacggccactcaggctgccgaagagtttgcacagatcgcgaggcaagtcgttctcgaagctagtacttccagtggaaattcagcaggccaggagaaggagaaagggatcttccaaggattcgcgggatgggttgggaaacagttgggaggaggggatggcgtggatagcgatgagaacacgccggttgaccgaaaattgggcgaatcgggatcgaaacttttccattaatccttttcatctttctcgtgctcttgttttttctacatgctccgattgataccttttgtttgttcagaccgttgtataactaaacgcatatgtttgtatgatgtcacctcgtggttcctcttgaatcaccatgttctgctctagctgctacctttgtgcttgtgccttcaaaaatcagccatatcatattatctccactagatcgttctatgtatctcgcttcttctgcttcatctctacgtgcgtatacattgattcagctactttgcacgatgaaggagagaaggaagatcacatatggataaaaagatagaaagaggaatatacagtcgacttgcttctaattaggaaagccggaaggagtgcgaatgtaagaaggagggtggttattaaaaagtcagagaatattgacatgggaccaagttcaggcaggtgatgttgacgtaggtcgtggtacaagcagaaaacatagctggaaagaatgaaggagagaatgccagagaacagatcgatggttggtattgatgggatgtttggaataattgatacacagaagaagtaaagatatggtaaggacgtcagagaggaagtacaagaagaaaatacgaagtatcccataaaacaaaggttatcatttttcccattttccctttatggaacccaacaagctcgacctagcgcctaataaagacccgacctttcgtctcgaagctaccgattctgacgagctgctatttgatgagactgcagatgccttcctcttcagactggtgacggaagaaccagatcctcccttggcagtgctctgttgagattcatccttggcaaagtcgaggagccgttgacgtttggtagaattagacgatgagttccgtctgttgttgggatcggagtgcgagtaaggattagactcaatctaaggagcgccattacgaaaaatgaagagtacaaggaaatatcagtatgcgacaagatcggaagttctggaagagcgagtgatcacgaagatagcaaagacgaacagagtattcgtcttcgtgttgaacaggctgaggttggggtcgaggtcgaacaggttgtcttcgaatgttggtcacgtttccctggctgtcaaactcatcttcctcatccagatagatcggcaactcgtccttttcctcgtcctgcataggttcaggtgaggcaaccacacgttgaccgggtcgtttcaaggtctacgattaatcgagcataaagcgaagaaggtcagcgcaagaatagacaagcggtctttctttgaggcgggtgacaaaaaaacatactttaatacttgagtcctttctgggttttccgatgccaagcgaatctccatagtgatgctcatcttcggacgcttcatcttcacctccggacatgagtccatcgtaagctgcatcatccttccaggtatcttggtaaagactggcaaacgcttcggtctcaggctcggccgctgatcgacagagaaatcaaggtattcagttagacaagagcgtgttaggtcatgtcaaaccagtattgaaaagaactgaccgagggcatctagtggatcaagcctatcaagttttcgcttccgcctcaactcctttctcatagctgacgttccaaaggactcttcatcttcagagtcatctcccagatcggctccatctttgtgcttctttcgcaatttaccggcagcaacatcctgtgcttgttgtaaccggagggcttcatctgctttggcttgttgtctgtgattattccaaggttaatatgaaacgttaacaagagaaatgaagagaagcaacatgggaatgatgacgtgcctgagaagttcttgtcgagcttcgtcgttcagtcttcgctgtttgtccgtcatctcctcatcattgaccaatccttcaacaatctcatcaggatcatcgtcttcctcttcatcgccatcgccggcagcgccaaacttgaatccaaatccgtctccctcatcgtctgattcgacggcttcggcttcaaagaattccttggcaagctccttgttcctctttgaccgatcacttttctgtttatccagctttggcttggaaggtacacgcttgataggtgaactcaagagttcctgatcgattttagagatcaaaacatcctcaacgtcctcctcctcggcctgggtaagaggcatatcctgacgccgaaccaaccgacgaacagtcgtgttcaacgggctggatagatcagcaggttgtgtgaggagagctggcagatgggatgatattcgggatggcgacgcgggcgtcttggcggaggatgtttcccaaggatcggtgtgcgatttgaaaggagtatccagagtaggcgaatcagtcatataggtagaaggcttatgttgtgtgaaaaatctgaattggtcgagagagaactagatcagcatagcggcattttactcgtagatagtggaaaacaatgcaacacgctgagtcaacaaggaaaacaacacatacccctctttgttaacataacgttgaggagcctgggtaggttcgcgcacttcttctggaagattgttaagagccacaatttcgacgtctcgttcggcttgggtgttggaaacgctgacagagggcaaatacgatgcttgagggacaagaacgctctcgttctttctaagctgatcgagcgctccgacaacaggctaaggaagaagaaggaaagtccagcatgaattcaacacgagaccgagtggcagaataggatcaagaaagtcatactttgtcatgtgcgataggagcctggctatctccatagaactgcgagaatccactatcctctccgcccagatcgagcccagtgttttctcctcctagatcaaacccatccatgctcttggatgattctccagaaatctctgtagggacttgagtggtagtgaacagctggctgaagccaccttggccgaatccttgcgctgcctgagagggttcggatgcttgggtgttttgaaacagttgactgaaaccaccctctccgaagctacctcctccgttttgagattcgtcagagacttcggtaggagcctgggtgttctgaaacaattggctaaatccaccttcgcctccgaaactctcctcgacccctctaactccgaacgaggcttcaggagcgacatcagaatcatgtgtttcggtgatagtaggcacaagatcggaatctttgaatgaaccatcattgctgtatcctagagagggaccggaggaggttgcttggatcgaaggcggaagagacttggcctgtgcactccctggggttggaaacttcttgctgtcctcgttgtcgtcatcctcctcgtcgtcgttgaacttaagaacgttttggcgctttctcgatcttggggccttgggtaaatcgtcttcgtcctcatcttcgtcgtctgatacttgcctcgaaagctgagaggacggaggcggtcgaagcgagcccagctcatcaatagcctcatcgaggttggcctcgtgagaagaagaagaggtctccttgttgctctccatcttgacggtcttgtggttgcctggatctgactcaggttcgagtgatctcctagaaatctcatcctcttcgtccaccagaacacgtcttgacttgattggccgaggtgctggattgagagtttcatccccttcgtcttcgtcctcaacctcggtatcgacttcggagtccgtttgggttggggtctcatcattgttcgatccacctcctagactccagtctttatcttctgcatcgtctacatcgccctcgtcttcactcatatccttcggcactcccttgatgattctgctttcgaccttcttcttgagtccgtctatgtccaactcttgtttttccacgatcgttctcccccgtccaaactttgcttctttcgccattcgttcctcccgagcacgctgattagcttcctccagaagtttctggttgagcatctgttgagtaaccgccacattgtggtggtgcttgactttttggccagataacgtacggatagcagcgggtgtcgtaccatggccgaacgtgcgccctgcgtatgtcacttgagattctgtcggtgctagcgaagtatgtcgtttgtctctcggagggcccacccccgaaggcgtaggcgtctgtccgcgcgataagagagagacgtaacggtccttgtctgcaggtttggccgtgaagatcgtgttggatgtcttgagggcggccgctgtgtcttcggtagagacgggttcgatctctacaccatcctgctcgatctcgccttctttctttactagctcgacgtcgttcaatccgcccttttgtttctccaagaatttcagcttggcctgcctcagcctctcgaagtttgctcgttggacccgctcttcctcctcagccgctttctgaagttgactctcctcgttcagtcgacgtttccgatcttcttcggtagccagggcagcaactcttttggccgcgtcttgagcgaggatcttgtctacgtcttggaagtcgtcgtccgagtccgccacagagtcggttatagaaagcatctcacttaatgctcgtggttttgaagatataggctgagactctgagggaggagaggtaggtaggatggagtcttcggacatcaactctttcggctcggccgtcggcgcacgatgagagttcgtcaagctagagctgccatctgtagtgtcaagagatatttgccggtcaggaagtttgaattgaggggtcatgttcaaaggttttctacatatcatcaaagatagaggtgatgcggcctaggttagcaaaaggacgtttgtcaaagacgactagagatgaattaaaaggagacgtactgaggttttagtgcgcgctccttcttttctttactcattcttgagaggaagagctccattccttgggggcgagcctcaggctttgtaattgcggtcttacgttctggtatatggaagaaaaaacatttgaagaacctcgattctgaatgagcaagtcataggtcacggaaggaaatcggcaagatcaacaacaaagacaaacctcgattcattctcgctctctccttgttcatctcttcgagctctttcttggtcagacccttcaaatagaaagacatgtccagtcagcgttgatcatcaacagcgcaagacgtttcttctaaagatagaaaagagagggcgtaaacgaaccttccttgtaggtcccatcatgagcgaactttcatcttcattctcctcgccgccgtcgccatagttctctagctctaacccatgatgaccgtcttgtctctcctttcccttatccgggtttactggcgagcttataaactcatcgatatcttctgatgacttctgatctgaagaggttttctcaatagaccttcgttttctgaaaacggtcttcacaggaacaggcgtcgatccctgtggaccggtcggatcttcctcgtctgaaaagacaagacgtgcgcgagaggttatcggctcgggagatcggaggggtgaagaaggagaagaagtcgggacttgagatctgaatgaacggcctcgatgtttggctttgataggtcttgcagcgggcggagttgatgaatcaccggtctcggcgtcgtccgagtcttggacaacatgccgtcgatgtgaagtcgtggaagcgacgcgaaccggataggtttcgtcctcgtcgtcatctccgttagctttatctcccgatgtgtcagaagagggtgcggtgacagaagatccggacacaagagttcgggactgagacgttggtggaagcgaggagagagacgtcagggatgaagttaggacaatagcaggagaggggaccgcaacaacgggtgtcttgacgctgagggctgaatgtacaggaggtttctttgttggaacaagtgccggtacagttatagcagatcgaggacgaccgtagacacctcgtttgataggctgcttcttctcggctcctagtatgggttttgttggttttctcaccgccgcctcctccgttgtctcacctctggcctctcgctgcatctctctaaccatccgatctagatcatctacgtcctcctcggaatcttcctcgtcatactctgccaagagatccttgtagttccctctgatccccttgatgggagacatgatggagctctccgagtccgaatccgaatcgagagtgccggttctggaaagagagtgtgtcgtgtctgacgaaagaacggtgctagatgtgtgcgcgtttatggatgtagcctcggaggatgggaacacagagtttacggtgaccgatgcggtatctgacgtagggacagaacccgtatgttttctcgaatagcctaccatgatggggagagagaacgcctagagcaaggcctgatggagatgtgtgggttcgattgtgtgtgtgtgtgtgtgtgtgtgcgtaggagacgttggccagaagtaattagttggatgagccaacaataaccgacgcgtcgagacgcgacgcgtgagatcgtttgacgcatcatcattataccatccggaatcatgaccgtcattgcgcacaggtgagaactcaggatcgaatcaagcaagcagctggggtatacagtgcttttggatataaaaaagaatgtcaagcaaacagacgataaattcggtcgacgagaaggaaggtgcgaggtcgaaaatgaaagtcgagaccagaggaggaagaagagaacagagtagatcaatcagtagagagacaacgagagagtagcatacaagcagatggaaagaatggaaaggctatagaggatagtatgacgagactgatccaaaaaggggcgttgggaagacgaaaggatatcacgagcggccgtcaggagggtcgttaggaaagaaggcgacaaggcaatacagagaagagacgctttgtattagggaaaggcatcagagaagggcattagaaacgcattagaaacgaattagaaatacattagaggcattagaaacgaattagaaatacattagaggcattagaaaaaggcactaggaaaccccgcgggagaaaagcattaggaaaagacagcagacacagtacaaagaaagactagaaaaagaagaaacgttcgaacgagacggcaatagaaatcgattacaaataaagactacaaaattcagcgagagccattagagaaaacgtcgagcgaggtcagacagccgccagcaaaagtcagggccgtcaatccgccctgacttttttgtcgattcttgctctctgggcaattagcagacacgcgtgagaaagcccactacggaaaacttcaagctacaccttcaagatggtacgttcctaatgtctttgttggtcgacagacctggatgggatgtcgtatagaatgggatgttgaaagagacatttcagcgtgcatggacgtaagaagagcgataggctgacctgtctgaacacgtttcccttgactttgatagggatgttagtacgatttttcttctctttgggccgacaaacttttgatcgggcatgatggatcaacgagatgatgtgctggagagcctttgaacagaggagcagtcgagacgggtgtgactggatcagccgcatgggaatggatgctggatagacttgggatacaatggggagccaaggacagaaatcttcaacatacagaacgctgaccaccgaattccctctttcctcctctttgtcttcctgccaaaccccgtactcggcttcacaccaatcgctacgaaacatcgtccaacttgaactctcattctcatcctcatctccaatcgaccctccgtcttttctgacaatctttccaattcctaccgcttctaaaccacgccggttattccttcccccacgcacacgaaatcctatcaaacgtccacttttaaacagctaacaagcctcgtggattgctcgccgcccgaaagctccgaaccagccgaagggagaaccgatgggtatgttttctctggtgacggctgcttgaccacggaatctaagaccacttttctgatcaccacgacaaatcatttttgttcatctttttattctaacactctccgtccttcatcctcgtctgctcttccaaaaactgttcattttttttgcgggctggatggaatccgttgctttgttttgggtcggagggattttaacaggccgataagtcctacaagaagcgagctctcggaaacatctacaagacctcccccaccggaggatcttcccacgccaagggaatcgtgcttgagaaggtcggagttgaggccaagcagcccaactctgccatccgaaagtgcgtccgagtccagctcatcaagaacggaaagaaggtcaccgctttcgttcccaacgatggttgcctcgtgagtaccgcatctctttgctcctgcatgttggatcgattagatcacagtgttcctgttaggggagctcagtaggttcatcttttagaatggtcggctaatgcttctctgtgatttcaacgttcagaacttccttgatgagaacgacgaggttcttatctccggtttcggtcgacgaggaaaggctaagggagatattcccggagtccgattcaaggtcgtcaaggtttccggtgtcggtctcctcgctctctggaaggagaagaaggttcgttctgacccgtaagattaagctgtacttgaaacatcgctgacgagctttctttttaaccctgcgtcgaatctttaggagaagccccgatcgtaaattccacgagcggacctctcagtggcttgtcgatatgataaatgtctccaatgcactttcgacataacacattctcatcaacgcttctggcacaatcttttgacacatgcttgactaagaatgacttgaagatggcatacatacatcaatggaactcggctaacagtctagcttgaacaaacatccttcaccgcacttctctgcccttccattgtcaatatgcatattctatcaaacaaagattaggaagtctgagtgctgctgtagagctgttgtagcgcgtaaatctttctactcgaccaatttccttgccttgaaacttctgtgccgtctccatctgtgtccgacaccaaacagaacgaccatgtacgctcagacatgatctgcgctactcactcagccgacattatctaaagaggttgaactcactagtttcttactactgtaaaacgaagagcttcaaccctcgaaagcccgacttgactgtccggttagtaaccggttgatctttccttgttgggattcatcctcaaacgtaaacgacacaacctcctttcgctccatccatccatcatccagattcgtcgtgcttgtgatctatatctgttcggtctactcttggtccaaacagtttacatgccagaacccaacccaccatcagctgcaacctcggttccacctcgaacgggaggtcttttaaaccctaattcatcgatagctactccttcttctggttcggctctggcgggatctgcatccaacggtatcgctactacttcagccggaccgagtagtgctcctttcgcatctctaaaagctaagccggtagctacagccggactttatacctctgaaagcgttcgggtaggttggcttgatttcgttcatgttctctccccccccccc

SEQ ID NO: 915 - DNA, 42262 bp, Xanthophyllomyces dendrorhous
  misc_feature (8951)..(8960): n is a, c, g, or t
cccccccccccttcttctgcgtaaagttagatcgaaactgaacgcgacgtgctttgcctctacgtgtttgtgatggaaccccttcttttctccctttgggctttttcttcattgacatggacgaatgaactgatggactatcgggttcctagttatcggccgagtcgatagggattgccaagttggatgaaagcgtagcggttgcgttagctggagacgtagagttcagattacatcaagtgatcgaggtgcgtcactttctttctttatatcctcatcttgccgttttcttgatgagaaatgcataggaggaaggccttgtctgacctgtgttatgttgatccgtgtgtctttgttctacctggaaacgtctgtctgattttaggaagcgcacaagtttatgaaacattcaaagcgacagacgatgctcccgtccgatgtgaataatgctctggaaatattgaacgttgaagtatgtttcttcctctttgcaaagactttgctttgaagttttccctcattccagcttcatagatatctaactatgcgagcatatgtaatctcttgcatcctctctatagccaatctacggacatctcccgttaccttcttcatcccacccgacgttcgctcctctccgagcatccgaggtggcttcctctttatccaaaaacaaatcatctgccaacgcttcgtccactacggttgaccaattgtactacctccaagatcaagagatcgattttgcaaaacttctccaggaacgaccgccaggtctagtcaacggaggcgtccgctggacggcccattggttagctgtggaaggcatcatgcctcgtgtgccagagaacgtggcgcctgaccatcacgcctacagggtaaatcctcaactgtccagtgaagatccgtcggcgatggccaatggtgtatctggctcgagcgcgacgacggctggtggaggatcaagcgctggaatcgtgaatggtggtcaaatcccaatcaacaagacgaaaccgaacttgtctcaggaactgcagctctacttctctaggttgaccaaagcgctcttgccgatggatacgggccttccagctggagcggggactggtgcggaaggcgaagcgccggctccagtaccggtgcaaactcatccacctgctgggacaacgggtgaactgactgatctggagagagctcggttggctgcgttggcgagtctgagaggcgatactgggctacaagggctggtggtataccttgtcaggtggatcggtgagagagtacgtcgtctccgagtcttacacgtctatttcttggtttcttctacatcgataacatcatgaccgagctgaccggatgggctttctactcgaatctaggtcatccaaaatcttggaaacttgctacagctatcatatgtgctagatgctatcaacgcaatcttggctaaccagactctgttcctagagcctttcgtgagtctttgggctttgtcattcttcgcaaacaacctctgaataatgcactgaatgttatctcatcttcttttcacctcattcatttgtggctaatagcttcaccaactcttaccccctctgttgacgcctcttcttacatacccgctctaccagcaccatccgaccacgcctgaaggcaaaccgatcagtcatccatccgcttcggacatccgtcgactagcaggtcaagtgctccaggtgttggtgaacgagtttggaaacgtctatgagacccttgtccctcgttcgtatctctcttctttgactttccctccttttgtttcctcgctcatgatttctgttcttctgccccttcctgacccacgagctttccttggtattctatgtaggtttaactaaaactcttctccggtctcttgcgcctccgaacccacccggtcgtgtggaaggtgctctgctgggactggcagccatcgggaaagagggtctccggaaaggattatggggtgatatcgggttccggacatcgaaatctcggactcgagaacctggtggtgtgggtgtcaaggcatggggagaagtttgggagcgagaaccgtggagaccagaagagagagatgccgttattcgtgctggtgttgtacgttcccttgcgtctttcagcactatttatttctttgaaccaggcttctttattgatcgtttgtccgtgcgtgtatgtttggctctcaggctacgctgtcggttcttctcccaactccccgcccacctcccatgccgttgacggacccaaactttattaacacgctaacgatcatcttcggaccaacgttcgctcctatccttgctaccgaccagtggctgtccgaaggactggtcaacattgtaagcagtgctcgtgatcgagcggaccaggcaaagaacgagacggacggaaatgaggatgagctcatcgtcaatctgaggacgtctcgacagcaaccttatcgaccaacgcaacctcaaccgcatcagagtcttccacctctgccttctgttcaaaccggtggagatcaaacagagaaggatgcggacggggatgaagatatggacgaggatatggaagagatcaactagactacactgatgcggcgatgatgacaatgtatgaatgatgatgttatgaaactcggagccgaaatcttggaaaaatcaccgccgggtaaagaaattcagcgtagccgcctaacaagctatccgagaattctttccccttctgcccgtctcgccccaacgtcccattcatctcaacagtttttccccctcccccgtcgcggacgggttcaaaagagatgggcagagggatcagtttcttctttatcgattgaactatcatcccatcctcgtttgtcgttcatatactagtaagattctcacagccatgaccttgttgagccctcccaagacgtatcttttcaaggagattgaaggccattgctccggtggatgttacatcgatgtctatctaccatcggtctctccctccgaaggcgggaagactcccgtaggtaagttggattgttgatcacattcgttgtatctcattgagcccacatccatccgcgcactcacttgttgtcttgtccatgtgttcgttcgaacagcattgttgatccatggcggagctttcatcgtcggagaacgaggagagatacctgatcatcagatcaactatttgttggaaaagggaatcgcagtggttgatgttgattatcggaaagcccctcagtacgtggatctctctgtgttttgatggccgatgcatttgtgttgactgtgtgatggcatctattttgaactacagtgttgggttcgtggagatgattgcggattgtcagagtgcctacgatttcatccgatcggatctgaacgatctgttgaagaaggatggatacgatcagggtgaactcgacaaagacaacattgctttcggcgggtattcgtaaggatgttttctcttttcttcttcttcttcttctgcttgttatcgttcgaatgcacttgcttcgttccacaaaagtctatctgtcagactgatggctcacctctttcttgatctatcagcgccggctcctaccttgctgcaatgctcgttcgtttccttctttctatctagtctgaacatccctacgctccttgctgacgaactctccttctctccatccacaggcattgcaaacaaagccgaaggctctactcctcttctacggtctcttcgacttgttgcagatctcgcccgctccgaaggaggcctacatgttaggatgcaagccggaggagattgcttatatgaaccagcttcgggaccaagagatcgttatcggtgctccgactttgtgagtggatctccatctttatcttcatctttacgtatttctcttatagcctctcctttaattctttgttttgaaccattaattgacaggtcgggttgctgtgtgtgtgcgtgtcgaactatgcagaatgcccgatacgtcggcgaggaaggtttacctgcacgctgtaagtcttcccttacgaaataaatctctccaaggggtggccacctttctctgaacgtgatgctaatcccttgtcctggatgaacttttttttttcgatggatgacatcaaaacacccatctcaaacccacgaaacgttcaccttcagcttttactcgccggttcactcatcgcgaccctgttgcccgctgacttgccagacgatcaagagacccgaacgagcttctcgcccgccttcctagcgacggccgacttcccaccctcgttcttcatcgtcccccagatcgacatgctcgtcccgtgcagtcagtcctggttgtttgccaaacggctcgaagagctcggggtcgaggtgggcaccatgagggtcgacggggcgcctcacgcgtacgatcgaaaggtatgtcggtagcctgtgtgacggccccaagtaagtgagcaaacgagcgagcgatgactgaaactccacctcctttatcttttgccgttgccggatccgatcgatgattggatcgtatagggaggcccacagaacgagttggatggatcgaactggatcaaagggacgttgcccggtttggagttcctcgtggacaagttgggtcgaaagtagaggataagaaagacatattctactttgatcttaatctttgatttctttttttctcctttccctttttctttcttctttcgatagagagcagggaaggaggaaacggaaatggatatagatttgtcgatgtattattctaaatttatcaatggacatcatctacagactcgttgtcgagtagcctgagccctacgcctgactttgtttctttttctttttcaaagcctattttatcctgctttcatcctgtcctttctggttgttctttttgtccatcgtgttctcttttgtatgttctgtctcgttgacgaagaaagaccagggaggttatcggtacattcggataggataacagaaagtgtttccctaagaaatagagagaagaggtaacaagggatatgaacgagacagagaaaagagctcaaagagcaaaaacaacaaggatgaacgcagatggacgacaaagaaggatgagggaagcatgaacgtaggaaagcaaggataaagaaaccaaaaagaaaaaaagaggaaagtcagagacaaaggacctggcacttaggccctggcctcgacagacctcctctccgaggctgctcctcgctgagtcaacgcgctctgaccggagtgaatgtcaacggtagacacgttgtcaaactcgacagagacaacctcagctttgaccttggcaggacccaacaaccggtggaaccttcggagcgcgatctcagctgcgtctagatcggtcaccatcttctttccgtttcggagaacaaccggggctgagccgtcaagaagaccgagctgctcgtttgtccacaacggcttgacctcctcagcagagggtgaaccgacgccggctcgaccaccgatagctgcccaatcggccgttcgcttgagtccaagcttgttgaacacagactcgatcgcacccaaaaggtgggccaactgctcagcggtgtgaccgggggtgggcgtaatcctcaatcgctcctccccaacaggaacggtcgggtagttgattgactgaacgtagattccgtgctcgttgagaagcgtgtccgaggcctgcttggccaggccggcatcaccgacgaggacggggatgatgtgagacggtccaggaacgtaggggatacccttcttatcgagctcagtcttgagagctctggtgttaatctgctggagccttcgatctccgagataggcactctgataggcaacggccgcccgggcacccgccacgtttgccggaggaagcgaggtggtaaagatgaacccagcggcgtaggatcggatgagatcgaccatgtcagcggaaccggcgatgtaaccaccaactccaccccaggccttaccgagggtaccggtgatgatatcgacccgatccataacagacccaggaatagcatggggagagtcaccggcggcgaggtgtgcctcgtaatcaaggtgctcagcgacaccggctcctcggggaccgtacatgccaacggcgtggacctcgtccaggaatgtcaacgctccatacttgtcggccaagtcacaaatggcctcgatcggggcaacactaccacacatagagtacacactctcgaacgcgatgatcttaggggtctctttcgggtacttggcaagctttgcctcgagatcggtcagattgttgtgcttccagatctccttctttgctccagagtgtctgattccctcaatcatggaggcgtggttagatgaatcggagaagtagacacagccgggaagctttgagccgagggtggcgagggtggcgtcgttagcaacgtagcacgaagaaaagacaagagccgagggttttcggtgaagggcggccagttcgtcctcgagtgcaaggtggagagaaccgtttccggcaatgtttcgggttcctcctgcaccgtgaccgtattttgtgagtgttcgcctggggaaaaggaaaggaagataagcaacggaggcgtgtagatgaacagaggggaaaaggagctgtgactgacttcatgatctcaacgaccacagtactcttactcatgccgaggtaatcgttcgagcaccacacatcgacctcatctctggggttggcggtgtgggcaacggggaacttggcagccaatcggttgatgttgttgaagtatcggtaggatctaggagtgaggaagaggaacggagagatggcgatcgattgtcagagaagtgattcatcggatagagcagagtgaaaagagaaagaggaagaagaaaagatactaacttgtccttgtgcttcttgtccagctctttaccatagaaaccctcgtagttgaagctgtccggtgagctggcggcaaccttgtttttattgatggcgtgaacctcggcgacggccttagctgccaggtgggcgtgggggcattttccgccggtaaactggtcggaggcgatcaggacgccttgttgctggagggaaagagaggttgaagggcggggttattgaattagttgaaggtcataacaacatacaacgagggaaatagaaaagggaaggtaacaagacatactcggtgaagttgctcgacatcctcagcggtgacgacgacagtaggtcggctatgagttctgttggcgtaagcatgaatggaacctcgaccaggtgcactctgttgtccagggcatccggtggagaaggatcgagatgaaccagatgggagaggacctccgtttgccttttcgatgaggttgcgaagggagaagggaattaaaaaaagaatagaggaagaaaaaaaaaggagttgagaaaacgaaaccgacgaatgagaggagagtcaataaacaaaggaaaagaattggaaaaaaacggaaattcgggaagagtgagaggaacagtcgagtttagtgtctaccgagagagacggttttcaaaatgggagttgggaacagacgaaatacatgtttgccttggagaaaggcaagacgagtggcaaggcaaaaggaaagggcatttgtatgctgggccgatctcatcggggagaccgattgcaggttgtggtggggggatttctttgactaatttgccctctttgaaaggagggaaaccagcaccaatagctcctccgagcctggatcggaagagaagagagagaacacgcaaagaaaagaagacgaaaggaagaggctaacctgttccaaggcaggacccataacagggcatccgatggcctgagctgtcaaccggttgaatgcgggcgagagcggactaggggttgacgcgaacgatcggagctgggaagtcgatgtcttgctcaagaacgggcagacacctttgaatctggtgaggcaggcagggataggatgcatggtgagagcagacgaggagcagagtgaggatggagaacgagagaaagaaggaagaaagagagaaggaacacgatggatgtgcaagaggaaagaaaaagaaaaaagaaggaagaaaatacatttaaaaaagggacggacaagtgtgtaaattggttgtgactggttacaaaagctcgccggtaattcgtccgtttgatccgtcccgatgatcaggtacgtgtaacctccgaggtacccggccaatcggagcaggcccaggtaggtcggagcaatagattgtggctgtgtggagaccctcatagtcacgtgtggtttacatgtgtcctatgtctcgcctccctattactctgctttgttctctattggcttgagtggtgatgcattggactgctggtggtggtggtggtgggctggtggaactactgctgctgttctctccggtagtgttatctgccactatctgctgctctcttctattatctctctgatgtcttctattggcttgtgtatatgcatgtatgtgtatgtgtgtgtgtgtgtgtgtgcgtgcattttgtccgcttgtttattagatacgtgttgtatcttctctaatgttctgtctattttctttctgtattgtcttttctttttgtctcttcctatgttgttttccaatgtgttgtctcttcaagcccctgtgacttcctcttgctgtcttctaatctcttctttctctctttgtgcgttccttcgagtgttctctccatgtgtatgtatatttattctgttctctctctgtttactctctctgtccattcctccttctgtctctatcgttctacccatccttcttcctatatcttctctatgtttcattctttttctctctctctctttctcacgccaaaaaaatccagaagggttcgggtgtattaaatcatagacatccaattggccaacgcacacacacacacacacacacacacacacannnnnnnnnncgtctcagagatcgagttctcctgactagtcttcttgtcctgctgacgaaacaaagacggccggtaaacccacacgcacacacctacgcgcacacacacgtcacacgcatatagccggatcggctgaaccaagtcgatcgaccatagctaatgttaccaaggcgttatcaccggttacgctcaacttacctccgtccgagctgactactcccatcatatgggcaaacatggggttcttgaccccaactgacttgttagggttagcccatcggaaatgaccgaaacataggaaaaaagctgatcaatcccatcaaacgattcggatacacaacagaaaaagcacgctgacctcgtctatctattcacccatcatctcaacactcacactttcaagcacctcatgcccggcccagtttcgctctcgccagagagggatagagcttttcttgccaattcgatcgatcgttcacaccaagaacctatcgagggagactttacagttcgttcccttctctctcttagtctttatcttcttcatcgtctatccgctcactttttgtcgctcctatcagatcagagctgtctcggtcgggttgcttggtaagagcttgcctctctccaattgcgatttaaaaactttttgctggactcattcttcctccttcttttccagtcgggtcggtcgtagcgctcagcaacctgtactttgtccgtctttatctctgttcgatccgtttgagctcgcgtcgtcctccattatgacattgccttttcttcctcactctgtttcatccaaccagggtctacaaacaggatggatctcgatgatgtctctccagtcggctcttctcggctttggcatattcaaaattctcccgtcttttctcccgttcaagaaaccattcaccatgcaggaaaacgtggtgatgcaaacaacggccgtcgcgacgtgagcttcttggcgtcttcccgttctctctgttttctcatcgatcctgacgtggatagagacctgctcttgccttcccttgcctttctaccccatcttccagagggacacttcctttggcggccggtttggtcgggatcattcccgccctcgaaatgctcgaagagtctattgacggacagtcagtccatccatcctcgagcctttgctcgaagaagctttctacctaactaacgttttcgtcccgtttcgatcgtcttctatccgcttctctctctttttttttctctcacataacgaagaggaccggttatctttacgttctggcagttgattgcctggagtctcgccgttgcgttctttggcgtctttttagctgcccctctgagaaaacaagtcgtcagtagacttgcccaacatttcttttctcctcacccttcctttgtactcttcctccctgaccacatggcgaaaactacagatcgttaaagaaaagcttgcttttccatcagggagtaagtatctttcctcttttccttctttctattcccgctcgcccgctcatccttcctgcctacacttctcaacacagccgcgacagcccaactgatcgccgttctacacgaccaaccaccaccctctgaaccgtctggtggactcagaaataggtataaatccgtacgcacacaagattacacatccgatatctccccctctatatccagatcaccctctcccgagctcccagatctcgaggaagggctggatgaacaggttgaggcaataggtaccaccgcttggagattgttggccagtagtttcgcctcctcggccggcttgacggtttgtctcttccgtctttatccgttcatctgtttgtccagtcatcagcagactcaaacaaaattatctaatctctctctcgcgcccccctcctttctctctggaatcaagttcttgagcatattgtttcctgtcgtgtattccatcccggtgtttgatatctttcctggtcaccttgcagctaaccatttgtggacgttcgtccttccctccctgtcttcttctcctctctcgctttgttcagccatctcttattctgttatctttctgattgccaccttcttcccttctacataggttctccccttcactttcgtacgtaggtcaagggatcatcatgggtttcccaactacactcgctatgaacctaggaatgatcactggctggggaatcctcggtccgttaagtgctcgtatgggctgggcaccaggtgacgtcgggagcagtaaggacggagccagaggttggatcttgtgggttgcgttggctatcatggtaagcgctgttgtctctttatcttaatatgttctctatccatacatatctacaacatatacataactgacaagacgttgttgaaataaaccttccttgctcccgtctgatagatttcagaaagcatgatatctttgattccaattgtgatagctaccattcggccatacatctcgtatcgaaagcaacgatcgtcttcatccgtcttcactcgagtaccagcctctgatcgaggggaagcctatgttgatcctcatatgtttgatgacgacgaggaaggaggcgagggctcggatacaaacaacgaagagtatgaaaccgaagacaggctcgtcccattgaactgggttgtcatcggcctaatgggtagtgccttcctcggcgtggtcctgattcgcgcgctctttggaccggatggaatcaaaccctgggctaccgccctagggttcgttctggcttgtctgttgagtcttcttgggtaagtcgttcttcttcttcttgttgctttccttcctctctgctgtctttcactttggctaatcatcctttctatttacctcttggatcaaagggtaagagcgctgggagagacggatttgaacccggttagtgggattgggaagatctctcaactgctctttgccgttctacagccccacaatggttagtcctcttcttttccttcttgctcctgtcttcttttcttccttttcggttctcaaatcttcttgcgtatattggctcggctttggggtgtgatgttctatggtgtcggaaaacgctccagtggtggcaaacattgtggcaggtacgtaggtttcattatatttgaacttgttgagatgtcaacataggatgttaaactcgaccggctggatcttgacaggtgccgtggccgaagcaggtgctcaacaggccggagatcttatgcaagatctcaagaccggggctctcctccgagcctccccccggttcgtctattccttcttgtcgactacgaggaaagggggaaaacagaaaggaagagtgcggctcacatcggaataatctttcttagatctcagttctacggccaacttgttggttcacttgcctcggtgtttgtcagtacagctgcgttcaaaatgtacaagagcgtttacgtgatccctggacctgccttcccagctcccactgctggtgtttggttcgtcttttgccttccctatttctttttcttctcgttctgtgcatagtcgtcttgattctctttgagctgatcggtcgatttgcatcctactttctctcttcactcaggctcaacctagctcggttgctaaacgatggccatctccctccttatgcaccgacgttcatgatcgcctttggccttcttttcgccctgacatccatcataaagacactaggcccgacgctcttccctgatgcccgtaggttgaacaggctgggcgcaatcttgccctcaggcgtagcctttgccatcggctttttgaacactccttcgttctcgcttgcaaggttcgtcggtgggatcctcgctctctactggtccagtcggccaggtgcccgagctgatgggagcacgaaaggaggtgggcaaggtgcaggcgcgagaggaaaagtacctctggcagcgatcgtcattgcctcgggcttcgtcctcggggaaggtctgatgagcatcgtgggcctcgggatgaaatcggcgggtgtgggtgtcgtcagttgttttggttgtcaccttggaggaggagggtactgttcgtcttgttgaggcctccattcgtttgcatttgtgtttgtgtttctgtattagcgtgttcctgtgttactatcgtccatacgtcctcttgtactttccgatatagaatgagcaacaacctcactcgtcctcgtcccgcctctattggagagctctccaggaaggctatgatagcatgaacagtcgccgataaaaggttcggccaaaccctaccttcggcgggtctcatcggagatgaccgagccggagtttttactctctattttttcattcatatttagcacacgacttgtttttcccccacttgttctttcttccttctttctatttctctcgatcccgcaagaaccatacacacccatctgaatactcatttacaacgcaagaagggagaaaagaagaccaacaagaaccagaacaaggaaaacataaagaatcttggatggcaaacacaccagaaacagcctcgcccacactaaccagggttccgacccctcagacgtcatcgacatcgtcttcggtcgaaaaacctccaaaggagttactaccaccgccgccggtccggtcgtcggtcgatttgaccgatcgtcggctgttggccaaacttgagaacgtcggccgaccggactcgacagtatctgatcctcagaccgataggactgagaacggagaggacctcgttggcgggcacacaccgttggggatggagggcgagaaggatggacatttggccggtcggacggagggcggtgaggaggacgagagaaagaagggtgatctaacagatcaaacgaacctcttgcccttcagacaggtcggtctcctctctctttactttctccttctgtatatgtatatatgtttctgaaacagatggacttaaccacacgggattcttggcttctggatcatgataggtcatcttggtattttttggactgtcgatagctttgttctgtactctagtcgaccaaacgatcggtttgttacttctttccctcaatccctttcaatcgtcaaactgtgctcaaccgatttcttctttacttctcttctccctttcttccttccctctgttgtccttgcatatcgcgctgggaaatcatccgaacagtctcgaccgcgctcccagagatcggagcggtcttccaggactctgaaaagagtggttgggttgccacttcatatttgtcagtctgcctttttctttctttccgacgttgtcttcataatattttcgcagcggttatgttctctctttcttctccccaaacacaagatcgttctggaagctcactgccgtaacccatgttaatatagattgacaagcactgcatttcaaccgctctatgggcgatttagtggtaagacctcgtttctcccctgtcgtctcttcactattcgaactagacatctgatactctgtcttctgttcgctctagatatctttggtcgaaagatcatgctcatcatcgctctcacaatattcttcattggttccctcgcctgtgcactgtcaaagacgatgatccagcttatcgttttcagagcgctctctggaatgggaggaggtgcgatcattacgctggccatgatcatcggtccgttctcttttatttctctcctgcgccggctctgtacgtgttgtacttactcctcttgttctgtaatctttaattcacttgataatctctcgcagtgtcggatatcgtttcgctaaaagtacgtctgatcatctctatctccaccctgtgttatgaatctaaaattctaaatctgactcgtcttgcgctctttactttcataggaccgtggaaaggtatgcgctctgcttcaaatcattcttgtcttcttaaagatatgcacacgtaactgaaagtattggtcctcacgccttctatgtgcatcagttctccggaatcacaggaagtgttgttgttctctcaaactgtatcggtccgctgattggaggtgtctttaccgagcgtctcacttggcgatggtgtttcgtccgttctttttcttcttgaggttcctttgacttgtttttctgtgttttacaaaaacctgaacctctcctcttctttctgtttctatacaattctaccgacagtggatcaacattccattaacggccatctctgtcatcgtcgtcatctttgtgcttcctctgaaaagagtgcagggcagctggaaggaaaagattggaagaatcgactatgcaggcgcaggactcacgttggctggtacaacggtattcctcctaccaatctcttggtgagactcccttcttgcccacagacatgccgtctgttctgaacagggtcaagactgacactatttcctctcctctttccctcttgacgaattaaatcaaaggggaggaacggaacatgcatggaactcagcggccgtgatcgcacctctcgttatcggaatcttgctcttcctgctattcttctggatggagacaagagttgccttgcgtcagtagatctcttcttcttgttcttattttattccgcatcatgatgaagatcttcctcgctgattctctgtccttttaatactttctctgttcaaacccaactcagccatcattccgatgaggatcttccgaaacatcactgtggcgggtatcatgtcgtctacattcttgactggatgcatgtaagcatggtctcacgcctgtcctcttcattttgagaagctattttgacgtaagagatgttcctcctgcttcacagattctatgctcaactgtactacttgccgcagtacttccaggtcgtcctcgacgcatctgctattcggtctggtatccttctcttcccgctcgtatttccacaggtgttcttctctttctcctcgtacgtcccttccttccactcccaccacgtcctctcacagcttgcgcgctctgtttctaacacaaccttgactcgatggttgcagaggatatttggtctccaagacaggagagtacaggatcaatctatgcctagggttctttgtctggacaattggcctcggtcttatctcgacgctggatgagaacacgtcgctggggaagattattggttatcagatcttgtgtggagcaggcgccggtcagacattccagacgggactgatcgctgtgcaggcggcggtatctcgttcggaaagtaagcatcttctctccttctctctctgttttcccatcgtccgttctctctggcgatcatgggctgagcctttcctcttgacgttcttctcctacacaatcgctcgatcctgttccttctctccgtgtacagtggcggtggtgactgcgacccgaaactttgtacgactgctaggaggaacgatcgctctggccgtctgtcaagcactcctcaataacgctgtccgcaactctcttacaggttcttctttaatcagctcgtccgagatttcgaccatcacctccaatccgacaaagatcaatgaccttgatctttcacccgaacaagttgcctttgccttgaaggcttacgtacaaggcttgagacatatctggtacttttgcatcccgtgtgccgggttgagtttcttcttggtcgttttctgtgtgaaacaccgtaagtcttgagaatcccttgctgtctccattgtatacccaaccttcttctcatcatccctttgtcctcttcttttcttcttttcccctctgatctagattccctgacgagggcagatgatgtcgagaggaaacaagagggtcatgcctggatggcaaacaagaacatgacgaaagaccaacggcaggctcttaacctcgagaaaggtatcttgtcaacccctccgtctcgaccgttgtcaccttcgaacggcaagccatctggagtccttgtcgattcgtctgatccgtccgctcggttggaagattcgacaaaggacgacgagagaaggatggaggacgatatcgcgagcaggttggagggtgaacttgtagatggacagggagcaaacaggacgactccgaccaaatgattcggttctttctcccttcccccatctgtgagattctctctaccatttcccgtcacgttgccatctttccctttgttcctacgtagagagtaaatgaataataataagcatacaatagttcgaacctcttgcaattcgatgtatttctatctgatagatagtatcagtttgtctccccggcccatttgttctcctgtcttatcactaaggaaagcatatcaaatatggatacatgttcgagatgaggaaatgagaaagaaaaagagaaagtatttcctcaacaagatgatactccaaatcatctaatcgtccgagccttggaactaaagacatgatgacgatcagcttaggagatcgcgtatatcatagtacaaggatctaaacttacgaataatgggctttcttccgctttccccaaagttaagacatctagaacctcttcctcttcttccgcttcttcttcatcctctacctgttcttcttcttcatctccgtcttctgactccagatccggctctgattctggttctgaatcctcttcttcctcactctctccttccaactcaatcctccgtctccgagcctgttcacacaacatgtccacctcccgctcgacatctggttccgccttcctcgtctccgcgtgggttcttcctcctttcaaccaagcaatctttcgagagtcaccacttggaaggtaccgaaccataccgtttggtactttgacagggtagggatagtcctttaggagaatcaagcgcatcttatctttcagattaacgttcgatcttatcatgacagacaagaaaaagaaaggaaggaagaacattcaaagatgagatgagagtactgtatcttgttcaaaccaagagaatcacataccgtttggaaagaacctgatagagtgtttgatggtgacaggtcagaaaaatcttacaaggagaaattgatcacaaagaggttgatatcgaactcacacggctataccttccttgtgctccatgacgtctgatagaagaaagaaacaaaaaagaaagtgtcagatgcaagtcactgtctgtagagattgatagagatagcgagggaaaaggcaagcctactcaagtatggccgtccagcagttgctcgtgtctagaccaacttcttgagcaacacggacaaactgacagccacaaaggtgagagagcgacatccgcaacacatactcggtcagcatttgtgggccctattcgagactatgcaatcgccagaggacttacaaaccgagtctccactggagaccatccgtttctatgattttcatttccggcgtagctcgaggtgagcgctggggtgtgcgaccgagaactggacgatacgatacgtctttgactcttcgaggaggtgggctgagtagaaggtggggacgaagaaggacatcgtaacgagacgctcgcaggaggagaagacattctggggggcgagagctggcgctggcgtttccttgagaatgagctagtcggtcggaagtgaattggagaggaaggcggggtggtctgacggtagtcagaaggcataggtgacatatgctgcccggatgagcttggatacggagaggtgtcaggaggagcgacagaggacatcactcggctcggccacgaagggggaagaatcttagctgacataggcttccttccggtgcgagcgcgaagaaaagagtcatcgatgctactgtcagactcctcggaatcggtatcgaacatctttcttttgttaaaaggtcgtctgagagatgtgctctgcgatgatacaggaagtatgagggaagacgatggagcagtctcagtctgctccagagcagtattctgaaacgacgaaatagggggatgagcaacttgttccgtaacgtctttttgaaatccgggaacgggctgagcctcagagccaaacggctcaggtgtcaaagtcggaggtcgatagggtatcttggttgtttccttcaaagaatgggcggatggaactgacgtgatatgaacgggtgttggagaggatgggaagatcattggatgggaggctgtatcggttgatggctggggtgttttctcgattaccagcagatctccatcttcttttctcacttcattgccattcaccttctcggtcgaaagcgctggtagttgcctaagcttgagaagctccattgctaattctgtttcctcatcctcattcaggtcattggctagcggagccgccgccttctctgaatcatgtagaagcgaaggcggattaactcctacttgagctaaaaccgtagctacagtatgagtggttgacgcggaagacgatcgggcgtgatctctatgagctttgcttcgtttaagttcagcggttcgagctttcaagctcgctataaattcggcggaaatagaagatgtgggtgaaacctgggcgagcggttgaagctgagagttagattgcgactgtggttgcgactgtgattgtggttgggagaagagaacatcctcccgggtgagcgcaaatgtcgcttcaaggacctcatccgcattgatgtacctagaagaaaagacatagttcacgttgaattttacaatacgtgaacaaatttttcaatctcgttcgaaacgtgcgaaggtatggttcaaaacatacaagcgatcagaggctacatctcgtgctaaagggtcagaggggacgacctggttgatttgagattcacgtaagctatcgaaaggtgaagcggtattgtagaggccatcagtatgtttcaacggccagatgaaagttgaacatataaatgagaagaagggaaagagacaaacaaagatcctgatgattcctctcttggccttctaatcgcccttagatccaactcatccaccaattcgttctcttcaaccttgattgacgttgatgatagccgactctgagctctatccttcccagttgataattcatcttcatcggacccttgtactgaggtcgcatccccatttgcgaagagtgtacgtccttcatccatgacctcttcttcctcgttctttccaagcaaatcttccaactcttcagcatccattgtatcgtttccttcccatcccttgttcgaaggcgactccgacaggacaagtatccttgattcttccaacggagaacggtcctcgaccatcaaaggacttgacggtgcaggcggaatggagagagcagaataacgtggcttggttctactcctcaattcggattgaataggtgggatatcgccgacaccatcgtccggatagtgggcgtagcttccccggcgtcgggagaggccgacgggagtgcgaagcggctctcgttgcggaagaggagcggatacccgacgggaatctggcgcgggtgcatttgggtagcgagagctcagggaagcggagtaagatgttcggacagaaattggaaccgaaggattttggggatatgggcgaatgtgatgtataggctggcgaaaccgggtagataagtatgtcaatgaaaagtgcaaactggagatgtatcagatatatataatgacaagattcattagttactaacctcgctcagtcgaggccgtcttcggaaatcagaccgagcggtttgcagcattgtttgggaattgtctagatctagtcgatccggaatagagggttgggaatgatcgagaaggagagcctgccgagattgaacaaaattgataacttctctttggaaggatgagaatgggaagcgtatttccgagtttgattgcagcacgtttaactaagtaacgatggtgacgaagacacgtatatgcgcgggtgcaaaggaacatggagcatccttgagtttccagcgccatataatcaattaagaaatacaagatagatattagtgctaacctctgctactcgggctctgctcatggttagccagcgctcatcgtccaaagttttgagcgcctttgttcgaaggccctgctggcttgtcctcctggaaacgagagacgacgaaaacaactcatccagtaattgactttgttgaagtagcgacagagcaggtcttttcaatatatagagctagacgttgaatgattgagatggggtgactaattgagtcagaattcaaccttctaatgaacatatcgaaagtgagaccgacctgagtgccaatatcgagcagtaatgttaacaacccatcgtgtctgaaggcagaacccataccgactgctccgcttgttcctttgaaaagctgcaagaacattctccaagactcttgaagctcatcaagttgagcttccgaagcagccgtacccctaatcccggcaatcgcgtgtaagaaaactgcatagtctgataggcgaaaggctgtgagttctgtcgggtcggaggttggtgctattggctgacccgatgaatcaacggatggcgcagaaagcaggaaggacgaaggggagggagaaggaaagagagctcgggttgcttgtaggagttgccagaagatcgcttccctgtgagagtccacaggacggccctggttctttgagtcaatgtagagcgatagaagttgattggaagcgaatacaagagtagtaatctcgcctctggatactgcaggaggcacaaagggtactgtcaatgcagatggaggaggcgtcaaggacggattgaggcgaattgagttgggcgaagatgtattattcgtcgacggagaatcaagcacagaaggctgtcctgaaagagaccttatattgtacactgtggattgttcaaccggcacggatggaggatcgaggatgcctggctcggatctgtgttcacggtcgtcatttgtttcctctggctggaatgagcctgtttgagaagtaatagatgtagatcgaagttctctcctagttcttgaaagaggcgatctaccagccttggtggtagccgtccgtttagcaacagctgcctttcgaggcctaggagtcgtctcgagatcagcgagtcctatctgtgacagtgaaaaagtagagcgggttacccgcctagtagacatctaatctctgactggatatactatctggactggtgggaagccaaaacaagggttgatataaaggatggtggctcagttaggatagaagatggtaactcagttggggttggagagtatggagcctcaaaggcgggaggagaggttgaagcaagacacgacacgacgcgacgcgtcacgcgtcaaaatgagggacacgtgtggagagaaggcgcgtggttatctaagatatatgaaataaccctcgtatgatataatatccaatccgaaaaaaacccttctgatggcgaaagcggcccaggtcgagttgagttgtctacttttctgatcatttttcttcgtcaaacacacacattacatccttagggtatagaatcgcaatatggacatccctgccaactctcagctgcccaacaacgatagcatcaacccggcggactcttctccagcgtctagacatcttgcttccagactcgaacagctcgctctttcggctcgttcgaccgaatcgtctccttctcggcttgagaaagacagacaagatgctcagcagagggtcggcaacctggaaagactgggagatagtagcactggtgcttgggagaagggaagagtaaacagacaggccggtatgtttcaaccaccttgtatcggttaggcgttcggttttggatggtacggctgaattctgattgatatgactggctgcctctatccgtctggtccgaaagcagctcccaaatcatctgctaaagcttctagccagctttctcctatcgactactcccgagctgttcaaccacctggcatgtaccctcatcatgaaggctatggcttccgcccagagaccgttccatcgacgcctaaagacaccgagcccccaatctcggctgagaacggagagaaggagcaggaagagatgcaaatgacggtggtagccggtggaaagaagttggtagtcgacgaagaggggctcggatggccaggtatgtctgttttactatcgcttgtctgtcatccacataatctgttttgactacttactctgatctggtctgttgtcgtgccctcgatagccaagtccactcacgttcgactgaacgcaacgcctgaggaatctgctgccaacgtcgctcgtctctcagaagccgtccgaacactactcgaatgcattggagaagaccctgaccgagaggggctcttgcgaaccccagatagatatgcgaaggctttgctttggatgaccaaggggtacgaagagagattgaccggtgggtttctactatctttgatgatttaagttgccctatatgattgctcacaaccagccttcaacttagatgttatcaacgatgctgtctttgctgaggatcacgaagaactggtccttgttcgagacattcaaatctcctctttgtgcgagcatcaccttgtaccattcgtcggtgtcgtgagtgtcttgtttcatcttttgtcagcccaaaacgtacttcatggctgaaacgtgaaacatcttctctgatttatccatatgcctagattcatatcggatacattcccaacaagcttgtgctaggactttccaagttggctcggatagccgagacgttctcaaggcgtctgcaggttcaggagcgattaaccaagcaggtagcggttgccattcaagaagctatcaagcctaggggcgtagctgtcgtaatggaggcctcgttcgtccggttctctttttgtctgactttctgtcttctgtgttgatgatccgaacatcttctctctttcaattcatctggataaataggcacatgtgcatgtcgatgcgaggtgttcagaaacctggagcatcgactgtgacgtctaccatgctcggttgcttccgagaacaggccaagacgagggaagagttcctcacgctgattcattcccggcgcaattgagtttccttcatttcaattcctccttctcttttgatttctttatctgtttgtttccgttctgttcgtctttctacttttctcatggtctcagctccggtcttgttctctatcttgtcttcgctttggttcattcttcatttttgatgttccatctagaatttgatctcgttgtacagttcatctaatccccgattcaacattgggattctctcatattctcccgatcttcttttcactactatccttctacctatcacagtagtttacgactatcccacaaattttcttccaggtttccacacttgcattctgctcctcttcctccctccggtcattcttaggtcatcatttgtttattttccttttatctacactcctttcccctcttccctgtctagtactcaggtctgcctcctgatgagatttagcaacttttggggttatcttcttttcgacgacgatcataatatgaaacgtatcatgtaaacggcaatgcggccgatcggtgttctcggttgtctagatgctagacagaccaactcgagatttcaccagagggacgatcaagctaacattctccatccggtttgaacatcgactggacaaattcatcggtactgcgctttgtgcttaaccggcgtccgggtaacaaggaacaccgaccggtcaagtggtccatctccaaaagatatttcattcgacatcacttcgagagttcaaccccaaacgatccattcctcatcatagatacctacacctaaccaagtcagccgtgtttgtaaaacgataataaaatccaatctatgcccggccaagaatctacacctatccgagaggctctcgatcttcggtacgcgttcgacatctactgatctcaaactcaatgagcgttcctcagattaacattcttgctggtatcttgttctgaaccactctatcaacaggtcgttggagaagtacttgacggaaaaccttgaagggtttaagggaccattgtcggcaactcagttcagtatgtccctctacaagtcatgttcgtactggacagctaagatggcaggagaagctcactgaagaggatcacgcttgaaccaactcttttcagagagtggccagtctaatccaacctatctccttaaggacggaaagtgggtaacgatacgtgtttaacctttgtaaaaagaaagaaacgggttcagaagaaatggttctcattctgttgatccacttttacatgattcagtggtacccagaccgtcctgcgccgaaaaccgcctggtcagctgctcacccccaccgcgcacaatattgaacgggaataccaaatattgtctgctattcaagcctataatgaatcgttgcctgagaaggatagagcagaggatggaattcccgcacccaaagtttatggagacgtctgtaaggacgagaccgttgttgggagtcaattctacttgatggttcgtagaacgtcccttttactttctaattgtaggactggaaatcggtagagatatgcagtaggcgtcgaccgaatcttctgatacttcagacattttcttaatgacttccggttcgtatttcaggagtttctcaaaggcagaatctttcaagacgtccggattcctgagctggaagagaaggatagacaggaatggtaggccgtttcatcaggttctgattgaagacaacaaagacattgatacatctatgtttctcatcatcgtaaagctggaaggctgctgttaagacactcgctgtaagatctttgtgcaacaaagaacccatatggttcctattcgatactgatatgctcagacccttcaactcgatagaatctttcctccgcgcaacttgatcttcccgcatcgttcaccacgacctcaactaaggctaataagcgaaagccctactttgcccgtcaagtatcttctcttctcaaagtatcttctatccaagcggctgttcagggcgtcggcaacatcctcactgatcctaaggaacaagccgaagttgaagagtttttaagaagttccggcgtggatgtggcggatgagtactattggagaagcgaaggaattgtaagtagatgtttcttctagcggtagtgtcagcatatcctagtcgttcaatagaggaggctgaaggtgtctttgagtgttccattttgatcttgtcttgcgcatgttaaggttcatggggactacaaactagataacttgatcttccatcctacggaaaataaagtcatcggcatcatagattgggagctttgtaccatcggtaggattttgctgtctcactgacgatccaaaacaaacggcctcagcttattctaagcacattggttcccttggttctgttttataatgacggtgacataggatctccactggccgatttatcaaatcttcttttgccgttctccctccctctgaatggcgtgcctcctgctcgttcgtgttgatctcatcagctgtgaattcgttttgtcggtcttgttttgcgctgattctgttgttgtaaccccgagacagaacgaaaaaatctattgatcccccttcaaggcaaacaagctaccgacgcggtcggcctaccgtcccaggtctatctactcaaattatggttagagacaatgggaggttcgactggggttggtgagatggaagacttgagggaggcgttgatttgggtcgaagtcttcacactttggaaggtttgtctttctttcttttcttctctttcctctcctcttcttcttcttcttcatcctcctctctttcttacggctctcttggttcttcgggtaaatataataaaaaacagcttgcgatcatctgtcaagggatcgccgctcgagttcaacgcggccaagcttcttcggctgaagcgaaagaaacaggaagtagacatacaattgatacgctcggtcgaatctgtcttgacaaggcacgcgtctctggatcgggggatggcaatgtcaaggctaagctgtagtttgagctcgtcagcaacgattctctctcttactcttcctttttgtctatttgttctgtatatcagcatgtctatctcttagttgtctacttagcctgtcaatgtgttatatccctgtttgtacgcttgcttcctacagtcccattcctatcaaacaggagataaagacattcgttgtacgcgatatggtatttctgttgactcgctttcccaattttacatgcggacggtcgcgtttcgtgaagatgagagagaggaagtagaacgaggaaaggtcgtcgacaaagacaaacattttaaggaaggaaatctacttctactctttagtatccacggcctcggcccctgtagaaaaagacgcaatgaaagaactaagctaagtcagtctgttctttctcttcaaatcaaagaaaaggaaagaagatactagagaagaacgtaccgataacctcggcccctgggctgctggaacccgtatccgcctcgctggaaaccacgtcctcgccctcgaccccgacctctggctccttctctgaggaaactcggaacgttcgttctcttggcggtgacctatcacggttggttgatgtatccggcaagatcgcgatagcgagttgaataggtgaacgaagtttgaagaagggatatacatgaggaggttgaacatgcatacaagcacagtatggttatcaggatggcaagaaagagaaaaaaaaaggaaaagtcagtaacatatttggcatcgagaccaggaagccatgtacacaaacctttattatacgtcctctgaacacagactcgtccaaaaccaaagcacttgtgatgaatgacggctcagcgaactcgacgtaggcgtatctgttgatgtggcaagggagaaaacaagcatttccatgagtctcggccacgtctcgcaaaggcggactaaagatatgacactatcctaatagcaaaggaggatggtacgctcgaagaccgacttaccctttggggtgaccagtgaatttatcgcacaagatcgttactcggttgatctgtccgcaagcagcgaagtgtccttgaatttcctctggggttgctccgtagtcgacctaatcgatgtatcgatcgtgtatagaaagatgtacggaacagacgcggatgataggatcaagataggtagaggaaagtgaagggcaggcggaacgcgttaagtctatcatcagctcctttcctcagatttcatctggtaaacacagtcgaatatatgctcacgtttccaacgtaaatacttcggccatctacatcctccttgtcctcctccatcggctctcctccttctaacgctgcatcgatacctgcaggcgtggagctacctgctcgcccacctgccgaggaagcctcctccctctccacttcggcttgcaattcacggagctttggtaagaacggatggttggtagcaaataaggtgaagaaagagagaaggtgttgaaagaggagtagaaacaggccaagggaaagagaacgttaggcttctgaaggctggattgaatatgagacaagtagtcccaggcgtaccttggcggcctcagcctccatctccttgacacgttgcttcatagcctcgagctcctgtaaagttacgatccgtaggattccatatggacaaagaggatgggaacgaggagagagaagaagtagaagaatgattgacaagaggagcaattcaagagttgatcagagtcaatccgacagtttttgaggatgacgagacgtgatccaacagaccgacgaaacaacaaaatattcttccaactcacagcggcagcctcatcatcggcgtgcactccttcgttgttctcgtgatcggacattataactaggacgacaagcgagggacaaggatgggatgaggtgtatgtacgagagaaggtgctctgttcgacgtccagcctgcccaagccggcttgtggagggtcagcccgaatgacttcaaattatttttcttgtctgattgagatcttggcctaggatttctcaccttctctcctctctttacccctcaccgtcgttttcctcgtcctctcccttttcacttttccttcctttcccttccatcaatatgtccaagactgccaaggtcgtcgttgtaagtcgtgcagtattgctccatgtcgttttttaggcattttgttgtgtgaaaacagagcgaccggggccacgatggtttttttctttctcttgttctacttcaaaagctcatcagactaacggtctccttctttccgcatccatccgatgaatctaggactggtcccgaatcttctccacctacgggctcggaaagggtgagtggtctgtgtttcctttcagaatagatcccgcatagactctgttcttcgcagcttgaatctttctctctttttctttgaaacaaacaaagatctctaattctgacgaatcctatgactttatcctttccttgcccttcatttcttcattcctgggtcggctgtacatcttttcttgaacactcttccttgaatctgttttctttcactggtttcctgtcctcgctcgtttcctcgatcccaaccattcttgttcgccataaaattcggtccatcgcctttgaatccttgctccctccctttctgtgatcaaacgttacgactatcaactctctctgttctccctgtttttctcctctttcatctcgcctgccggacaacatctgcaaatacacacagagaccgtcactgctttgaacgctttccgaaagcgtgcttccgaagctgctaccgccaacggtcagctcactcagctcgccagctcgagccaggtcgatttcgcccactaccgatcagtcctcaagaactctgccattgttgacgagctcgaggctgccatcaagaacttcaagcctgtgactattgatccttccaaggaaatcaaagccatcgaggctttcgaggccaaggctgtgagtagattttttccccatataccgaagccacgggagtttcttttctatcgagtactaccagcagaaaggcagtatcgaagagggagaagtcataccgagaaggcaactgggctggttcggagagggttgcttagttttgggatcagagacgtgaagaagggatgtgtgagacggcaagtaacggcggagagtctggcgtagatgggaggtaggcatggagctggactaaggctggttagagacgaactgaggattttctgcaccaagataacgggttggatcgacgggtctcaagacagtcccgatgctttggctttttgtcttttttttcgcatctagacgcggataagacgaatcgaacttcacgaaaaacgttgtgtcagagctgacatctcgaattcttttctttctcttgcaggtcgctgatgctgaggccaccaccaccaagatcaagtccgagcttgtcgaccttaaggccacccttgccaacatcgaccaggcccgacctttcgaggagcttgaggttcgttcgccattactgtatcgtgtttcatagcaatgcagatcgctgatgccgtcgtcttctcttttaccttgcctaccatcttgactttaacaaaactcgtcttcgcatcgcaatgcaacagaactctgatttcaccaaggctatgcccgagatcacccgaacggtcgacgtcatggtttccaagggaaagtggaccatccctggttacaaggagaaggtcagtcaggtttccgtttctctctttgccgctcatcctacttctgattgacaaatccgttgttttcttctacatctccaatcagttcggagatctcaacgttctttaagcggctcgatgactttgtttcacctgacctgtcaagaaatcgtttcaaacctgtcgcggaggagagtgggggtagatgggatggtggatggtgtcttttctcttttcaaagcatgacgtcgactctttatctgaacatatagaccgatgccatgttctttcttctctctttctcttcattgtaagattgatcagtttgacatgttgattaaaaaaaaacccggagagacagagaccaagatggggagagcagtcatatatataggaagtaaagccttagcccttctttctcgttcatctcattcgacgtctttttgattctctctcccccgtctcgctatcagccgctgaggaaactttgatcttcctcgctgtcgccgccgctgcttgagttcgagctcgaggttgagacctcgatgggggtagatgcggaggagagatcgaattggtttcgtcctctatgtcgtcctcgtcttcatcctcgtcatcatcgccgccatcgtcatcatcttcgtgctcctcttcgtcgtcttcatcgacgttatcctcgtcctcatcttcttcatccagatcggaacctccttcgtcctcgtcgtcttcgtcctcttgattttctccgtcttcatcaccatcttcgttcccattcgtgttcccgtttgctccgtttccttttcttgctgctcgggaacccgatataggtgcttctccatgatcggacgcctcactatctgtcaattcactctcggcagctagacctagaagatccgactggtcaatctatagagaaaacgtttttgagtgtgcccaattagttatcacatagagcgtcgagagaaggagacgacgacgacgcgctttctcatgggcagagacggaaagctgaaaagatggatgaacgcttacatgaatatcgctcccatcgtcttccacatcatcttcatccctagacccatccacaccttgactaccatgaccgccgttgacgaggctgacttcttgtacagggggtaaaggtggtggagtggttgaccggccgaggtagtataacaaagagggacgatctcggatgtttgtgtatgccgcttgaagaaacgaactaatccagttttgagcgaatagcggaaagagcatgatgctgatatcagcatgtctggctactctgtgagaaagatattaaagaggacgaactcgttctgaagttgcacttggtttagtttatcaagggtgatcgacagttccttcatcctcgttttgttgagcttggtttatcagacaagcgaaggtcagcgaacgagaaaacacgtattttcagtaccagacgtatacgtgtcattagtatttcgtacttgggtgacttcatcaaactgatctcggactgaggaaacggaagaaaaagacacgtagcccatccagatggaaaaatatgtgagctttcaggatcgtctggttgactcttcgatgagatcatcgagctaaacaaagatacatacgcatcatgaacctggttaaacggaaagaacacccccaaaatggaaagaaagcatacagtcagttccaacacattcccaagcaaagtgtcgacctcggatgaaacagatagatctgggatgtacttgtctttgaaccggttgggcgcgtctgcgggaggttgttctgctggtctctagaatcggccgtgttcccaacgaagaaacagtgcaaagcgccagcttcatcagttcttgttcttgctttgtatggctgtacgtcttgaagtacgtgtgaaacagaactcactatcgaagtctttcttccccctccgacacctcgcccaaccccttgcttggaaactctctttcgacctgccgtcggccacgccagctttgattctccctccgccaaggcctctgataacttgctttccttttcctgttccgactctttaccctttcctttcgcccttgatcgtcctgccggttttgccgactctttacccggttcgacagaagtggacttcggatccggtccggactcgtgtatggcgctctgccgagatctacctcctctggaggcggcctttggtttaggcgtggaagatactgcaggttcagggatggggtaaggatctgccgggatgccagcatatatcgatgtactgggcatgtcgatagaaggctctgaagtagcagaaggcgatccatgttgagcgaaaagcgccatggctgatggaagttgctggagagatggtcaacgagaggagggaaaacaagtgaagactgatttttcaggaaatggccgttctcaaactcccaacggccaaccaccagtgatcagccaggcaggccagctagctcaagccttccttcttcaacatcatgacggacaagcagccttcttcatccaatgatatagaagctcctccgacggcggctcagttggcagcgttccaagcacgggcggatctgtcggtagtcatgctgagaaacatgatgggcaagatggtcaaaggttgggttcctccgacggctgaagaactgaatcaaacgtacgtcctctttcttgttctcttgctctcttcttgatgtgatacttcgcttggcttggtttgctctttcattggagaatggagagctagtcctcgtagaccagccggtgtgttatccacacagaattcaaacgggatcactatcaaagatatcaaccctcaggctcctttcattttttcctctcttcaacccttgttcccttcatgttctgtgctcgttccattcgaatagaagaagaaacagtccctcttttctctacagcaagatgctgacctacgtctttgttttacccttgactttccgttcatagcgatcctcaagtcaagccaaacgcaacccgaaaactcatcaacaaactcgtaccgcgctcctctgctgcttcttcttccaccttggccccttcgtcatccgctacgacttcgttcgagcaacatcaacagtcacagcagaacaataaacggtatagatcgtctgctgtagcaaatttgatcaaccaacctgctcccagcgagaaaaacacaaccaacggaacctccaacggcaacggtaacggtacaggctcaaaaagaccggggcgagacaaccaagactcggattcagatgaagacgaggctgaatccaggtctagagctgtagggaagaaggcaaagttgtcgaacacggggatagatcaatttggtggaaagaacaagaagaagaagaaacaacttcagcaacagcaggtgccaccaccaccgtcgtcgacggctgtagctactgacaagggggccggaaacaagtcgaaagacacggagcctggtcccgagtcgagacccgaacaagaacaaatcaatccattccgattgttcgcttctccaaaaacttcactgccgaaaccgaatactgcacccaagcctccgtctagctccacctccatttctaccccagcgtctgcaactgtagctgtgtccaaacctgcgtcgataccggcctcttcgatgtcatcgacatcaaccgtcaccacctcgacaacaggggcaggatcttctccaaagaaacagcaacagcagcagcagcagcagcaacaaaaacaacaacccgctcttctcaatctaggttctccctcggccaacgtttccgaacctggtgacccaaacaccaacgctgagggacaagaaaaaaagaagaggaagcggaagaacaagaacaaaaacaagaataagaacaaggcgggtgtctcaacagaaggcgaggataaggatggggacgaaggggatcaggagcaaagattgttgtttgattgatcgggcctgtcgggataatatgaaactcctgtcgagacgaaaaagcttctctatctcccttggggacaagatactcagtcttactttgaagtgtttcactttctgtctggatgcacatgcaagctcaaagtcactaaagaaggtagaaatgatcattgtatcacattcccttcgaacgaaattgaattaaagaaaggatggcgggggcgaaggaaagagggaggggggagaattcgtgcagaggagcaagcgagagggggcgcttagatggccttggagctgacgagctctgtagaacaaaagaaagagaaccccagatgaggaagcaacgtcagccgaaagagaaacatccaagatgaggaaacccaaaaagagggatagacgcactctccaagtcggcaacggcggaagcgacaagatccttcttgaacttggcgttctcgagctgcttgagaacgttggactcgaccgtcttgacgagatcattctgctgggactctcggacggcctgctcgtgtcggacccaggagtcaaggacagccttagcctcggacgcaagggcggtctgctgtcggagggtgaagttctcggcctcgagtcgagcggtctcctgtgttttttgttgttgttattattattaaagtgagggcatacaagatagaaggtattaacctccggtctttccaagccaaaacacgtatgggaaatgatgttatggatgaagcagaggagggactttttccagtaaagtacaaactactcttcctcgtccactctggagcacgtcaaccagttccatcttctgcctttcctcatcttgcctcgtcgcattcgtcgcaattccccattccgtggtagagcatactcggccgtgttctcaccaaactcatccgtagtcccagtccccatctcaatacatcctccgtctgtgttagaaaagagaacagaagagaaagactcgccttggagagagcgaacatgctcttggtgacgtcaacaacgtcgttcaactctccgacgtggtcgattcgggtctgaacagaggacttgtgtcgctctcgagcgtcgttaaggatgctcttgactttctgttaacgtgaatttttttatgtggtaaaggcaacaagaagatgaagcgtgccgtgttatcgaggggatttgggagatcaacgatgggtgccgaagagaaggtaattatcgatggccgtaggaaagtcagagaagggaaagaagttgaaggataggatgtatagagtggattacaaaaaaccaaacgacaaagaaaaatcgcaagacgtagatcagtatcggtatcgatatcgaaagatattgaccatctttctcgatccgctctccttcaagccaatcttagcaagaacacgaacctcgatgtggctatcagcccaggcggcgtaaggaccgctagcggcctttccgatgtaggtagcaaggatggcgaaagcaacaaggatgacggtctcatcgttgacgacctaatctcggaaagaaagaatagaagacaagaaaaacaggacgaccaggatgaatcggagggcgaatttatcatcagagcgaagagaaatcggatgagcttccagcctgaaaacctaaagagagagaggagagaaagaaaaaaaaagcaagagtgaagaaagagaagaaagaaaaaaaaagatgacgaacgtagatctcctgggagatggcggcagcgaatgctccaacaccggccaagatcgttccggtcttgccgacagaggtcgaagggacagaggcgatgatggacgaagccttctcctcaggagtaggctctataaatcggcaaggacgaatcacgaaaacaaacaaggaggaaacagccgagattaagaagaggagaaagaacaggagggagagagaaccccgagaggaaaacatgcggtcagttctctatgatctacgcttcctctgacgaaacaaccaatcgaccaaagagatcggttggtcgaacgtcgcttgtcccacgtcgccaatgggacgaaggccccatctcttcaagctggatggaaacgaatcacgtactagaggcgtaggatctacaaaaagatggggggaaaacagacgaaagtccaggaagtgatcagtaccgacgtagtatgattcacgtgtccctctcttctttatatccctcgtccaagctgttttccgatcgattgagaacgatcaactcaccgagcgacagtagcccggggaaggacgacggcaggtcggagagctagctcccccccataaaaaaagacacatcgatggaacccatccattcggtttaacaaagaacccccagaaacaaacacccggacacaaaagcaaaagaacaaaagaccatcaacttttttgatgagcttcctcactcccatcatgggattttttttttcaatatatgaatcacgcccatcggtccgaaagctcatcaggtttcaagatcgatagctgatggctctcttctcccgtgattggcctattggccatgaaccggacgagaaaaaaaaagagataaatcctgacgaacctccgactcgaagggacctggaaagaagtttagaagccattgctaaaggacaaggaaagaaccgggggtgtacgaggaaggaggggggatgtaaggtgatgaagcgtttgagacgtaaaaagactaagtgcgtgtacaaggcggaaaatgagatttcttcagggtaggcgatcgtttgtcttagcgacttttttttccttcttgctcgccaagatcgatccggacgatgaaccacaagatacatgcatgcaacaacggaaacacacacacacacacacacacacacacacgaagagagaaggaaagcccaagtaaccaaaagagaggaaacgtgaaaagaaaaaagaagaaagaaaaaaaaaagatgaagagagaaggaaaaaggagaaaagttcattgtacaggtgctagccttgacatccggaaagaccttgtatatgtgtatatgtgtatatgtaagttgatgaaagtgatcagcaataatagacgagagcagatgtactttatctagaaggaagatgattatgaaagctggatgatggactgaaatgagaaagaccgaatcaaaaggaaaatataaaggacgtgagcgacaaagccggataccggaagaacatgaagactgtgtcctctctaactaatgagaatagatgagtgatcaacaggtcgtcaaccgcagagagaaaagaacgacgagagaattcaagagactccggttcagaaaggaacatggggagagagagagtcagaacgtttgttgacgctcagccgttccctttctcgacgacacccgcaggatgtacagaagctcaagagctaccgtctcaagttgatcctggacagggctcgtgtttctctgcatgcttgagtccctcggagtagacgaggagttgatctccgtaacgttgcatctcgtccagagggatcatgagcgaaaagtcattcaggaggaggaattgcagttcgagctggttcagctcggacagaggtaagccgcctactttggcgtatcgagagttggtgtaaaacacatctgagagccaaagatgagaacaagacgcacgaaacatgagaacggaagagatgagtgagtgatccgagcgattgaggcaggtaagaattagagaacggtcgggacataccagagaagaacttgcttgctacagtgacaccagcgatgaccaaccgatggacgttaaaactatcaatcgcaaagcctctaccggtcttgccaatggcgctagccatgttaggatcaactcctatcggaacattcttaccctgggtactaggacctttgccgttaagatggtcgttttcctcagccatctccaaactgaacctactcattcggtcaaagtacaccagtaaggataagaagacctcattcgatgccgggcagtatttgaggatccgaagcagatagacctcgatagagatccctgggacattcctcgcatgaaaggagaggtatgaagaaggggtgtgaagcgaatggagcgaggccgtcaaatgtttctttggatctattccagtttgatggacgttttgagaggaggaagaggaagaggaggaggacagggtgggcatgatggtggccgaggtgggacgagaccgacctgaggacgaggccgctgacgaggatgtcgatccggtcgacatgaaagacgacgtagcatccttccattccatctcgtggttcattcgttgattcgacggatctctgtctccatccgactcggagtctctacttcctcttcgacctcttgtcgacatctcgtcttctatggctgctccgaaagctgctccgttgggggtctcgtttgagccaggatccgaggtccgcaacgcatcgtttgcacttgcaatctgctgcaataggctggccagcagtttgaccagctcctgtggtggatatgttgccaggttgaaccgcgagtcagaaggaccggaagatgacgacgagggcgaggacgaggtggacgatgacctagacgagtggtcgacagagcctggaacgaaggatgctggtggatgtgcggtggacgaagctttgggtgtggagtttaacttcagatttccagtcgatgtggatgacgacgaggatgatgaggatgatgcaggcggaggtgtttgctgtagaatgttggaaggcgaagtgggatgagaaagtggagtgggtggtttgatcgtggacgatgaggatgtagacgaggtggttgacgttgctgagggcgagaagtgattgtgcgcgttgatggaggatgacgaaggaggcgaaggatggtccgtcaggccactagagagtcgccgacgaggatggaacgaagagttggaatgcactggggtggccatgaagggatcgaaggcttgggagggatctggatgaacgtgctggatccggtgggtttggtcaccggtggatcgtccgctggatgagaagcctgacgacgcggcgagcgtggacgactcgagggaagacgtcccgatcggtcgagagacattcgagaacgatgagaacgaagttgacgaggagggtgccagggtcgaagagactatggaggatgaggatgatgaacggagatgttggtggtatcgggccgaagggctccctctgcctgttctgtaaccgtctgccggtccgtccttctcaggaaagggcgagctgtcactttttggtctgcctcctccgagtgagccggcgactaccagacctgcaagagtggtggaacccttgagattcttgtacaactgagctgcactggttgagtttgaggaccgtcttcgaaagtctctgtctgcggattccagcaggtgggctgacgcgacgggaatatctgtccgtggtctgtggaggagggtcggatgggagctgtaggaagaatgcgaaggctgactggaagacggtaccggtataggtccaaccgaggacgacgacgacgatgatgatgaagaagacgacgacgaagacgacgatgacgaaggattagaagcggaagaagacgaagaaacaggagcagaaacagaaacagagttggactcccagttgttgagcgggagatgaaggtgatggcttgacgggcgagacattgtatgaaccgggtgagagtctgcctttagcatggccagcttgaaggcgagggtgcgaacgatgtagtgagacgagaccgaacgaaagaagatgaacgagatgaaagaagagagggaagagaagaagaagagaaggaaagaaagaaaaaagggaaactggcgagatggcaaaaaccaagaacgttggtcgagcgggtggatctttggctgccttgtgagagcctggatggcggtttgtattagggatcgtctgtagtgtggcattagagaagggttctagtcttcgtcaaactacaatgctttcctagtcgtgtactacacatcgattctattactttcgagctcgcccagatgaatacgacacgctgtagtcagtctattgggacagtttgtagtcagcccgtcgtcccacattctctaatgcggatcggtcggacactacaaaagctctctagtcactctatagaataatccatcgcgttcaggcaccatccgtttttttccctgtctccattcccctgtcagcatatacccatccacccacacccgcacaagcagcatgtccatcctccagagatcgtccaggtcgatagcaagcacctcgctcgcctcgtcctccgttctgccgttcgttcggtctatccatgtgctcccaaagtatgctcttgatctcaacaagccagtcaccgccgttacccatggagaggaaaagccgatctttctgtcggcccagaagctcaaggtacgtttttgtgattgtggttttcgtgttcttctcgttcttttcgttcttcttctctccttctctcctccttctttcgtgctcgttacgtccgtatggatcggtctgctcgggtgtgatccgccagctgtgagctctccgtcaacggctctcgagatagacacagacagagaaaaagggaaaaactctgcagagagcgttgctcgtccgatcttgctcaaatagcaggctccctgctctgcacaaccttttgactgcatatacccctccttgcctgttcactctgatcactgactttgcttccctttctctctccctctcctgtaaacgcttcctcccttgccctccaggccctcgccgtcacttaccagcaaggactgttggaccgactgaaccagcaggttaaaggtatgctcccaatcactttcattccagcttcttctttgctagagtcgcctagccaaggagtaggttctctagcgtacatctactgaaacctttcgctgatcgctctctgctttgtgtcatatcctttgacgtgtacccaaaagggaccgaccttgagtctgcccatgtgctccagaccgtgttggcctcggcggccgacccagcgctggcattgacattcaactatgcgagctcagctttgaacaactcgttcttcctcgacggtcttgtaagtggccttctgacctatcctttccaactcagcatcgccttcaaagagtgtctgtttcttactctctgaccgggccttcctacacaaaccgtcagacacaatcctcggcgcctcctccggtcgactttcttcccttgctcctcaaatcatttggctcgtatgacctgttccagcaggctctgttcgacgcaaccgccaagatggaatctacatctggatggatctggcttgtccaggaggttaacgaggacaacaccgtgaaccgattggcctggaagatctcgtacggtgccggctcggtccttgtccgttctcgactccaagacggctctccacgacctctccccccggttccatccgcctcctcatcctcatcatctcgctcacagctagaagccccccaagcaacgaacagccgaacgtgggaagctgctttgcagaccaacccagctgctagaccttccgttcatttcacaaccatccaacaaacaaagtctacctccccgatcaggacgtacccgctcgcctgtctgtcgatgcatgagcgaacgtatctccctctgttcgagacctcttcctcctcctcctcctcctcctcc

SEQ ID NO: 916 - DNA, 25787 bp, Xanthophyllomyces dendrorhous
ctccctctgcgaccggaccgagatcagccgacttttcgatcgaggcaaagaacgcgttcgccggcaaatggctcaactcgttggactggtcgaaactcacgagccgactggccaaggaaaagcagatggtgagctctgaggaaaaagaagacatgcaccgatggagttctctcatcggtcagaggctcggtcagatccaacagcacgcggcggccgtgtcgggatcggagaacgagccaagggtgtttgacaggacgtactttgaaggttggttccagggttgggaccaggcgttgacggacgccgagagatccttcggcgtcgtaaagaagtgaacgaaatctatcgaacgtacaaaaaagagaaagagtagaggtgcagaagaattgattcgttctttctttctttctttttccttccttttgtcacaagaagaggaaaagaaaaaaaaagagagagaaaggagatattagaatgttttgtagataactgtttgtctcggagaacaagaaaagctcctttctatctgccaaaactactcttttcttccgtcatcggacactacaaaaggttcatgcatcttgtccaatcgacagtcaaggctacaaactgagaatccaaacccaatggagagagaacaaagagaaaacgtcgaaaagaaacttttctccctacctttctacacatctttcttagcagagtcgtttcaacacaccaaccacatccttcaaagcgtcccaactttggaaccgttcttcctcaatctcctcctccaacggctctacattcgattccagtcgttccaacgtgtccggtcgccggagagattttatgccttggattactcgtttgaaccttttgatctcacaccagagggggttggtacggagttagtcatcaggttgcaagcaaatacaaaaagagcaggttcgtgcgtgcaaccgttgggggaagaaagacaaaccgttgttcgaaacctaaaggagagaccgagatggacatcaaatctacaaaccgaaagcaagttcacaccccgttcagcgctccgctcccaaagacgtcagaggaaacaagacaaaagaaaaagaaaaagaggggggggagggggggatcgctcggtctcaccaaactcgacttcggatgctgctttatccacgatctctgacctatcagcgtaaaccagacatcagaccaatcaatgccacatattcgcccgagacggtcaagaggtatagggtattcctcactttttatgaatgttcagtttcttttttgtccctttgagtgagagtaaccaggtccagacatgttctccctgatgggtctctagtaggacggcgcgcatagtcttcgcgatagatgctagggccttatctcttagtttcggctgtgtgcgtgttgagggaaaggagagcagtccgattagcttttgaaagaaggtctagaaacaccattgaggaaacctccgtttcataaaacggatagactggccccttacgggtatcttttgagagaacgacacggtgacggcaaggttccgatattttatcttttccaacggcggtaagggctcctctacacgttgtgtaggcgcaggagggggtagcactcgtctctgagaaagcgcgctagagctgagcattgtagctagtttaatccgaaacgaagggaaagagagagagaggaaaaaaagaacttcaggtaaacattttacgagactcttgtaggtatcggtcaacaacaaaaacaaagaaagtcaaccaagaaaaagttgacgaacacttcggtatcgttgactttgcaggttgggaggctttaggtttgataggtagctgaatttgaacctcgtcagattcctcatcagaatcatcgaacccctgggtaagatcaatcatatccacaggatctattctgctcatctttcttgctacaggaggagatacaggccgaggccgttttacagggtttgatgagctcgggacagcacttaatgtcgacgtaggcgatggtagctttcgtctctggatgagaggcggggatgaggggggtgaggatgagacacgttttgatgcagcaaaagcgggagatgcaagatgaaaattggttgtattagatgccgattgtatatccagatcggtcgaccggatgggaaaggaaggtgctaattgacactttgagggagatagattaggttgaacagaattcgacgccgaaggcaacgtggtgttctgttgggctaagtagtctgcgagcggtgcggatgtcactcgtttgaaagggactttgaatggtttctgcaatcggtttgttttggatagtagtcctggtaaggcggctgggagattacattaggaaaaaaaagtgtatcagccgttgaggtacctgccaatctgaacaagtcaaagaatgacttacaagtaagcgagggtgtagcgtttaacgctgagacaactggtctatataccttagatggtctagttgaggggcctgccggaattggctcacgcagttcaccctgctccacatccaccttcttctccgcctccagactgactcttagtccttctgcctcagcctcgattctctgcatggtatccgaagaaaacgggccgagagagcgcgtcttttttatagattgtacagacgacacttggccatctgaacttcgatccgaataagtcgtcgctatcatatttgatgaagccgagcttctcagtgggttggagtcttgcttgctctgtctcaacattgctagagcagacgtcacttctactggatggtcctgcatccggggaagaccatcgacctcatcatctgcgttccagttcgggttcatctcgtactcctcggtctcgaatggttctaagctgtcgtattgagtctgctgagaggcgacaaagtcatcggacgagagaacttgttttcgctgtttgaccttggcaggatctctacagatctacacacatgccatcattcatgaacagatgagccagactgaaatatcaaacgtgtttgtacgacctttatgacagctgtactcacatcgcacatcccattgcagtacgccatcaacatctgaggatctgtctcgtcaatcttttctccaaagaaccgacagatcgagacatgccgacacaatttcgaagtttccgcaaatgcttgcagctatcctccggtacaattgaggtgttaaacctaactcgcgtgatgatttcgaaggaaatagaaaggaaagaaaatcactaacagcttttaaactatcttggcctctgacggctcctcctgggtccctctttctactcttagacgcgtctgcttctctaagcctctcgacttttgcgcaatcctcccgagctgagatgatgatgaagggaaccccacattgtatcaataatgttttgtatatgctatgcacgtgtgatggaaatagtactcacaataatacaataaacatctagagttctaaaggatcgaaaggatcacatcagaaagatgacttttcaaaaataaaaaaataaaaaaaataaaggagaacttgatactcacaaatccatctctaccggctcgacctgggtcaagatgagctcgtatgatgtcagcttatcaattcaacgcgatcaggagccagtcagtggtgaatgcacgactcaccggtttcttggtagaaccctacagtggacaataaaggctatcattagggctctggaatctaaaatgcgcttctgttgatcaggtctcacacaccttcaaaactcttaggtaggtcatagtggacgacatatcggacgtcaggtttatcaatcccctaatcaagcccaaagcaaagctcgccataagtctatctgattcgtacgccatttaacttgaagtttgacagagtcatgcgcttaccatgccaaaagcgatcgtagcacagatcacgtccactctctccgttggtttgtcgtctgcagtttttctagacttcccttgtccgttcgtcttctccttagggcctttacctggaactcccagccactgctccagccctgtacttgcttctaacatcgctccaccagatgctgatcctccaacccatcctttcatatgatcccttagtacgcttgcgctcagacctttatgataggactttgcgcgaacccctttgttgcgaagctgctcggctataaagtcacaggctgctttggttcgggcataaacaatgccgcacacaggttgaggttcgagttctccgttagcattggtgataggaggtgcacgcttctggaaagacagaatgaagttcgtaagatcttggatcctggtctggtcattctcgagtgaagtcggtcggtaccgaacctacaacaggaatacatcctcagagggttaagtaaaaagccaacgatcagcaaatgaatcgatgagaggattgtcgcggttggaagcttacctcgtagtagagattctttctattgaatggctccaccgatttgaatagatgttccttacttaacttgagacttgcgacgatatcgtcttgtacgaacgatgtagcggaggccgtcaaagcctacgtgatgtttggtgaagacaacgtggaggtcacatcaagtcagctcagggtaacagaaagcgtgttagtagcataagtcgatttgaggagactaaccataatgggaacatctggaaactgatctcggaaggacccaagagccctgtactccggtcggaacgtgggacctgttggttgatagccataccatgaacaaatagacagatagatgtatcttagtgaactagatgaatgcgcgctcgttgaatacagcaacttaccccactcggatatacaatgcgcctgttccctcatagatataataaaggttacatcagcatcacgacaaatattcttctggtattcagatcatcagatcaaactggggaagataagaccgacctcatcgacgactagtcgatttaattcaccctgcttccatacgaccatcagattcgtcttgaattggggggtcatgaaagtttccggagtcacgtaaagtagcctcgtccgaggatgaccagaagctagatctttattaatctaatagaaacagaaccaagaatgttcacaagtgtggtcgcgcataagaatatgagtcctcagaaacataggcgcacgtagacgcgctcacctccttcttctgggcgaacgtagattcggacgtaagcatcatgaccgggactcctagctctcgaagctgggcaacctctataacatcatggccgagggtatggagctagtaatcagtctggtgccaggtagatttgtctctctaagcgcaagagatatacgaacgattctgcataagagctaagagaggtgagataacaactgtgaccccatgttcctcggcacatgccggaacttggaaacacatactctatatcatgaaagctgtctcgaagtaagtccctgatacggtatatctaatctgaagaacactgaacgcagatcatacgaaactaacctttcccattcctgtaggggcaatgaccagaacatcggctcctctgaccgcggcatctacgatggatttctgtttccctcggaacgactctttcataaaagctaatagacaggtaggtgatgttacgggataagcgacgcttagcgggatgaggcgcgtcaccgtatgggtggtcggcagaaagttggacatactcttttgaagaattctgtacatacacgagggtgatatcgggcattgagtcagatattatcggctcactatcacatttctagagaggtgtatcttgttcttcgatttcaagaactaacctgagacagtcaacctgaccgctgatcgacctcctgaacgatcgagggaggatcaagttttttgccacctgagtagttgttcaaaacaggattgagccaaagacgtataacacgcaggcgaatgtattcatcagtatatatatcagactgaaagttcgcttacctgagtagccgtgttcaaattaggatatgtacaatccaaaggtagctctcgaacctgatcttcccgttcaggatctaagtcggacgggtgaccctcatcgtccgatcggtagaacaactcttgttcggacatgagagctgccaggaagaggctgtactacaattcttgtcaaaatcctgtgggtctattacgatcaaaccaagggcaacagagtggagagtgtcgctgtttcgagggaggatatgctgctttctctgtgggttccgtcttggagttgggactatttccatagtaggtcatctctgaagcgcgtctccaatggttacgcatacacgcgcgcgcacgcgtatgtgtgacgtgttcgaaaggttactcccctcgccttcacgatctccttcatcttcttcatctttcattcttatccgttgtacctctacaagtcagcatggaagacgctatcggaattgtgagtgatccattctttctcggttttcggtacttcagttggtttgttgcacgtcagaaacatattgcagagggaatagatatacttaccgaatatggatcatcttctcagatcgtcgcagtcgccgtcatatatgtcgcatactcttgggtctctaaacgtttgtctagcttgcgatcatatctattgaatagcgatatcttattgtcgtcttcaatggaacacctctcaaccttctgtctctttgttcttcttcctttcttcctgggcacggactctctttcacgccaggcgcgacatccactcaagtaaggccaagcgggccaccggtcttcggacagggaatcttgagaggagtttcagaacccatggttcgtgttgtttgtccgtctgtcggccgagtttgcgtcaacagactaagctgacctgcaagacacttttaattctgtttttctgtccttcatcatttggcaactttctgtatgccctccggtcctctctatctctcctcatttttgattgtcaccttcttatgaaaggtcgatactgtgtcatctgcgtttccggatattccgagagagaacatcatgtatgacctttcaaagacccggaaccctcagataaccgtcgaaaagatcctcactaccggaattcttccacctgtatgtctgttttaactgatcttcgttttaagcgagctctgtcgctccgtatcgcctctgtctgatggatactcatatcttctctctatcaattcgacctcttcggtagcctcctccgggcatgttccctgcttcagaaccttcacatccgcctgctcgtcccaacgcgaacgtttcatccgccacaacctctcatgccacacccacgccgacgcttctcgagagatacaaccttcaatccagagtgagctccgttaaaggaaaagagcgcgctgtggatgaggtcgatccaatcgacaatcaatcagttgtaggaagtaacgctgccaagtgggagagcacggccaaggagcgggaggacagcttaaagaagaggaaggaagcaatggtcctggaagccaggaggtatgtctcttcttgcttcgtttcttccatccttgtctactgtcatgacagaccgactgatgaaattgtttcatgaatggtaacccgacctttcttcatttatctgatagaaaactgctcgcaaagaaggcgaaagcacaagagttctaaagagaaaagggctacatgtctcggtcgcttgcttatctcttgttcttctcccttgatatatgacctctgatgtctttcgtctccccctcccttccatccctcgtttcgaactatgaatgcgcctacatatgctctaaaccgggacagagacaaacaagaagaaaaacaaggaaatgactgaaatgaagagaatacatgtatatacagaaatacagccaaggcccatgctgccctgataagagcttctcctctccgcctctctgcgtactcaggcacgcgcacgcagatcgaggcaaatcaagatcatcgccagccggcatcagccctgacggctgcacctcttcttcctctaccgttcggagcgagcacgccccccttccaggatcttctgatctgatcgagatcccaatcgacctctgcctcgctcgtcttcaccagctttcccaggtccgccaaacttttcccaggcacgtagttgtagatttgttcggtgattcctccaccgagagatgacccggtggaagaagtgaaggacggtggagttttgtcaaacatcccgttccctggtaacgttgggttttggccattgccggacccatccggatgtccgttcgcgaacccgttagagttgtggttattcgaatttgatgagtttcgggctttcttggatgaaccggatgaagaggaacctgtgggatggccggcgttgccgagagatgaattgaagatgtttgctgaagacgacgttttcgagagcgacgggtgggacaagattgataacgatagatgggcgggtggggctaagatttcatctgtcaggatggagaatccagcactatttgtgccgggagcggaggatgagctggatgaagacgtgccgttgacggcactggagccggaaagagggagcgatgtgaacggaagatggagggcgctgtcgagagcagacgcgtgttgatgtctagacggacgaagctttcggttggcggcagatgaatggtggccggctgagctcgcgctgttcaagggaggaagcggggagaacgagtgaaggtctgaagatttggatgtttagaatggatacgatggtagttcagcacgatcgatcagtttgtgcttaggaacaagattggagaacgagaaaggcgaaggaaagaactgacctgaaccgtcgcctccgtctttttcctctctgagccgcttcctgcgttcctctactttgtccaacaggagattcttcgcaccttcctttgcctttcgatactcttcctctagccggtctttctcgagctcaaacagtctccgactggattcgagtcggtattcatggtgcatctccacttgagatagcagggcgtctcgctcgagtgtaagcaggtagagcgaaaggagatacgactgggacgtcggaggcaaaggaaggagtgaggatgccagatgagataatgattgatgggtgtcgatatacatcctgtgagagcgtgtccatatgtgtgtataggaagagagagcaaaccgatatgatcagttttagatgtaaggatttgtttggatgctcttccaccatccttcaaagtaagccgatatagatctcctagagaaagtctcgaaagctcctcatctctacatcctctttgagaggagactctcaaaaaacaagcacactttcactgccgtaaatctcgacaggacgatctctgctgagcagatatgttcctttatgtttctcgtcccgtccgggttgcctcatctccaaggagtagaagagaccgcgagccggatgactctggaaggcgctctctgacactctatcaagaaaaaaaatagatatggaagaagagagaagggtcgggaacagagagagagatagagagagggaatattcttaggataggatgtagaaagaatggaaacacgaaccgatctctatcatccattcgttccttgtgtttcgcctctaccttgtcgacccattctcttcgtttcttatcacgcttactctccggctgactcccagggttaggaccgttcaattctgatgtccgacttgccatcctctggatgttttctttctttgcaagagatgcgggtacgggatggaacaagagaaagagagatgaggagggatgcgtgatggatcaggaatgtagcgatcaagaatagtaggtgggagtatccgaaaggatttgcttgatgcaggccgttctgtttgttctttcccagctatagaaccggacgggcggggcagaagggggaaagagagaaaagcgcgtggataaataaatagcgtgatgagaaaaggagacgcgatgcatggtaagaataatcgactgcgctttgtccaagacctctgcgacgttgcgtcttgtctcgtccagtcaagagaatatctgttggtccggtctcatctttcgacgtcctctccgtttgttcctctagtcaagttctgtaaagagaaagaaaagagaagggaagaaaactcttgattgaatccgatgtcatttgctccttgtaagtttgatcgttctgtcgctttgatggaatgggtgggatcctcggcaaaagaaggaaaggattcgagtgctgatcgtcctttctctctctgtctcactcttttcccatctcgtctgtttctgtcgcttcttttcggtctcttccgacggctttgggattctttgtctgggcgattcgcaaactgatctctactctgatttcagatcagccgccgcctgatctacctcctcaggatgacttgcctggagggaagggaaagaacaagccgaaacgaccgtggttcaaccgggacgcgagctcattctttgctactagtgccggcgcaggtggaacgaactatcaatctggagggtcaaccaactgtttgtctcgtttgtctttgcctggctctctcatttttatccgtggaatgtactgacgagatgccggaggccttctgatcaaatcaaaacgtcgtcgatgcgtgtgtgtgtgtgtgtatatgcttatgtgtgcgtgagaaccaccagcccaatcgtattcttctgtgcagccatctggaccgatagccagctcaagctcggcccattactctggagggaacggtcaagccccaaattattctgtcgccgaggaaggtggtacggcaaactcgtgggagactcggttcggatggagagtagatttcgaggctggggcgacttatctgttgggcccgttgacgggtacggtgtctttcctcctcttgtttcttcctgcggtcgtgatcgtataggcgtggtgctgatgaacaggagactttttgatgattaaccgaaatagcggtgttgctgttaattctcgagacaacgaatgactttgtccggttccatggttcgttgtctttgtactcattcccaaggcacccagccgagcgatgtattcaatcctcgttttctactttgacttcttcttgtcctctctctacctctcacggaacagcctaccaatctgcccttcttacgacaccactattactcctccacttctttctcaagctgatctttccgtactggcttcagtcggtcatcagctttgggtcgtttggcctggtagtattcatggcctaccgggcgtttgtggacgcgaaccgaggtctcgaacggttctacctacctgtgcttggtgagctagccgagcgatgggttggagatgaatgatccgggcggagcttcctcgattgggctatgtgtggattgtgttcttggcgtctgccttttctgtgtgtatacaactgtgttttcggtttgccggaacgtaccagacggaaacaacaccacatgctgagaggaacatgtacacaaatagcatacatccggggaagcatacactcgaaccaaacaccgatggccactcacatgcccggttagggttccgatgggaaaacgcttacctaaggttgctgaataagggtccgaccacggaacagcgccccttagggctgcccaggcgttgaaccgagaaggaattcaaaaaagaaaaaaggcgaaaaaaaaagcgatccgtgcgtcagagcaccgtcatctggcagccccctaaacatcattccttcccatcgactccacttttcattcccccgacttcgtcacccgactgatccaggtcagagcaccacaacacagacaacacaacagacaacatcaccacacacgtcagtctgttcgtcagcattcgtcgtttggtatccatctcttgttctttatttccctttggttttgacggatggtcgataaatctctcatcggttagcttctttcttcctttttctctcttttcccttcccttccttcttttcgttcctctttctcctttcgggtcacttctttgttctcttcatgttatactaatgctgggtcacatccggtcaatgaacacacacaaacatatgctaaccttcgccatcccatctgttgcctttttctttggttttctctttcactcccggtccactcacccgcttgatatgattccttactcatcacatccttctcagctgatgatactacacgcggctcacctacactggccgcaggtgtgcccacctccaccaacgacgagccaacagtgatcccgcgtgcatcttctgtcggatcgccaccagggtcagaaaaagaagacgcgtcggatgtaaagccagaagacctcgttgacgtcaagccttcggacgcgtcaaaatccaattctctgtctcctcccgcttctttgcctccggccaatccaccggcggatgaatcgtctacaaaggcatccccgcctggaacgttcacatccaatgcgaccgtccagtttagccgtgccgtccgaccgacatttcccggctttcatgaaaggacccgatccaagttggactctgaaccaaacccgtttgagcagtcgttttcaacctcgaagtcatcttacggcgcatcttccgtcgcgtccagacgatcacctcctgatctctcgtccgacaggctctccccgttcgcctacaacggaacgtcttccgtccctcagcccgttctcccaagcgtcagccagatcaccacacctctcggagaggacgatccgttcaaatggccgctcaacacacccgccatctcatccatccggggtgatcccatctcgccatccgttctgtcaaagagccagactacacctgcgtcgagcgtcttggtctcacatgctctcaactttgattgtaacaactttgtccgcaccgggttgactccagggacaggcatgacacccatgtcgggcggaccgactagttttccgcctccctctcctggaacggctgccttcctcgccatggtcaccaacgccaccgcgggagcggccaacacgatggccagctcccagtcgaatgaggaaaactcggtgatgacgcccggcactttcaacgggatgatgaatcatttgaacaatctgagcagccaacagcagcaacaacagcagcaacaacaccaacagttttctcagcccttccctccaactgcacccggtcagacctctactgatggcccacaaaatgcttcccaatcatcccgtccgttggctcctccggccggcaaggattcgtcggacgactacttttcccaccgcccctcaactgattccaagacacatgtccagcaagttattcagaatgatcaggcagatgccatcaagaattcgaccaatgctgccgcccctgctacctccggacctcccccggctgcccacgccgatttgaatggtccgaacgcatcgcatcactcccagtcctaccttaatgcttcatcccatatggctgactccaatcatcaagctggtcccggcggccacccacctttccaccaagcctctccggtgccggctccgttgtcccaccacaatggtggcgtccctccaacagaccgctatctccaacaaggacaagttgctgctagtcaggctgccaacggactgttcttgctcagtcaagcccatcaggcaatcgccaggaaggagcaggatgatcgagttcacgttggttacggaccgggtggcccttatcccggacaatcatatggttcttcccagcagctttctccccctgggccaacacccgttaaagggaaagggaagcgcaagcaagcagccgctactgacggccaatcacctcctcccaataagaagggtgcggccactaaggcgagagcaaagaaggcgatgagtgaagagagtgacgattacgcacagattgacagtatgatggacgagagcatgagtccggtgtcgtcaactggcaagaacggaaagccagaaaccgaagaggaaaagagaaaaaacttcttggaaagaaatcgacaaggttggtcttgatcttctctcttcttttttttgcctccctccctctttttgttatttttatttctatcatctctcgtttgtttatctgtttgtctgtctgtgaacaacactggctaacctgttcctctcttcatcacgcgctcgctatctaccagccgctttgaaatgccgacagcgaaagaaagcctggttgggtcagctccaacaaaaggttgagtatctagagttggaaaatggccagctcacaaatacgatctccaccctccgggacgaggtcaaccgacttcaatcggtcttgtcaaagtctggtcttcttccaggttcaggaccgatgaacaccggccatccaaacatgtacaatcaaccccatcctcctcatcatatacaacaacatcagcagcatcttccccagccgatccattcccatcctggcgctcacccccagcaccacatgcaagctggcccaccggctccccaccaagcattcaacgggtcgaactctgggatgaaccaactgcccctacctccaccgccctccggtggtccttcaggtccttcgtccggacctagctctcaaccaggctcgatctctggaccaccgatcggtgctcaatcatcacctctaggttcatcccgaccaatctcccaagtttctcttggaccaggtcatccgccgtcccaccttcacccccagaggggtctcggcgcgttccagcagacggcgaccgctgggaactattaagagcttcgattgtcttttctcttctttccccctcttttaaggtctcgcttggctggaccgttgtaagatgctttttcttgtgttcgttcttttctttccttcgctttgggggcctcaactggagtttttctcttcatcttttcacttttttcaatctcgttttctctttatacaccgtcttttttcttttcttcttcttctcttccctttcatacactattctgggatttcttctattccttctcttcgcgtgccagatatgttctctaaatctaatactttttcttgatccacttgcctagcccagccatctttttcttccttcatgctcttcccttgcccggagctgttcttgcctttcttcctgtcccccatctgtcattccgttgttttcggtttcttctctttatcctctttgtctttttttcttcttggtttatctctatcttgtccgtttctcttttttctttaattatctccgctaatggatgataactcatggattgtctgttctcccttctcatctcagattcgctcgtaaccagggaagagcaagaaaagaaaaggaaagaaaaaaaacatgtcataaactatgtttattcttcaaagagcgaaaggaaaggaaaggaaagaagaggagagcatgcaaagatggcagcgttcgaagaacgagagaacgtattagcggaaggaagactaggggtgatcgaaagttgatgatctgcacgtcaactagtttgtcatgaatccccacgtggcgagtctttcacattggtagactggagggtgcgagtccgggggcaattcaaactgcttgtttgtaaaaagaaaaagaaaaaatagaggcaaaagaaaccggagccgaaacgaaacgaaacgaaacgaaatgaaatgaaatgaaatgaaatgaaatgaaatgaaatgaactacaggatttgtatccagagctttatttctgcgcgcaacaaggtccatctcgagtagagcgaagcctcatatctcttcgtgttcttcaaagatttctactccgtgagcgatctttcaatacttgagaagaccagagagaatctcggatgggacgtcatccatcaaaaaaacaaaaaacaaaaaacaagtgtgtctcgagaaaagcattgggacattgagcgtatggtctccatgttggccccgtgcacgtgttttgtatcagataagaaaccagacaggcaaagaaaaaaaaaggactaatgtccattaggaaagagaaactaaataaatcactagaaaaagtcgcaaagaatttgtagtatggacactacaaaatggcggaaaaatacaagaaaatggtcgagcaacctgacttttgcttacacccaaaatccatcctgacttttgtcgccaggcaaattcttacccaacaaactgccgaaaacgttttgcgtacgaatctttgttgccgtagccctcatcctcgaaagctaatgtacgtatcgactttctgtgtagatatctgtgttgatcctgcttgtcgtcgtggtagagaacgcgtgctgctagatatcgttaggacaagagaggggaagtatgggagtagggatacgtccagaccgttggagagggcaaatatatgacagtggaacgcgaaaggggttcaagaggaagaggtcacagatgactagcagcacgaacctatctggacgatacagaaggaagcacaactcacatatacatggatcagcaagctgaccgttgcttcatatcccgatgtaatatcttcagtcctcaagatggtaagtcgcctgttgacacccaaactcttccaatcctttgacgaaacacgaaaactgacaatgtctcgtttgcgttcaaacagaccaaagtaagttgccagcctatgatgcggtaatagtaggaagcggaagggtgggactaattctctccctggctccttgtaaacactcttagggtacctcctctttgtacgtggtcttctctacctggtttctttcccccaagcatttgagagctgcgactaatccttgtcttgatctcttctatttcttttgccatttgaattgtcatccttcgctgtccatgtctaattttcacacgaaaacgcgttcctctccatccattcgaccatcatctttgtcctactctcataattcttctacctgcctcacagcggtaagcgacacaccaagacccacaccatctgccgacgatgtggtaacagggctttccacaggcagaagaagtgcgtttgtagtttatgatctaattgaaaaagaaggaagctgggaaatggaaagcttgcatcaagttgtccagaaggtagtattgacctcgcgtactgggtatcaatctcttgtactacaggacctgtgcccagtgtggataccctgccgccaagatgcgaagcttcaactggggagagaaggccaagaggagaaagaccgtacgtcgaccattcttccttgctctctttccaaaaaccctattctaatgattgtcttcattctctaaactcttacttcgctcactttgcatgccatctccagaccggtaccggtcgaatgcagcacctcaaggacgtctctcgacgattcaagaacggcttccgagagggaacttccgccaccaagaaggtcaaggccgagtaatcggtttatccatcacctggtgatcagggcgggtaataatcttttgttagagactatccatgttctgctgccgcatcaaacaattttttttgcacatctcgtcgttcatttgtgcccttcgttcaaacgcctacaaaaaacttgatccttgtgacatcaccgtttatagtgacaatctgttggacttgatacgtcaatactacatcttgaggcacatgagacgatgtggttctccttttctctgtcgcatcgaggaaagtgtaacacgccaatctggctaagaaagctgtcttcctttgtttcatctatcgtttatctctattgttctctaacccaatcctgagcacctctcgcctcctctcttgggtctcgaggttgatcgataatcgggatctcccatctaccgacaccaaggtagacccgaaggatgatcagatctctggccatacagaatgaatcccaggcaagatttatctttgaccctgggatctcttgccacttgatcggcgattctttgatcgggatcgggaactttttggttttcttttgtgggttgtacgtcccaaaaagcaaagaaaacgatgactttagtcagatcacacctctcgcatcatatatgtggatatgttgattttgagaaagaaaagagaagaaagaaagacagaccatggtggatgggtcccagagttgacagtagtctgccaagaccaagagctcaacatcgaaactccatcgttcgagatgcatccgttcgaacaaaattcctgcagtgtccctagtgaatagtttgaacccgcattgggtatctcggatgtttcgaacgccgagcgtacggacaaataggtgaaagccgtgcatcagacagttccgaacgaaggagcgctaatcagatgaaaaaaaaatcccctttcaacataagaattgcgcgctcttctgagggaaaggcagatagaaagctgaaggaaggaaaggccatgagacaaaccttgacaactaggtccgtctctactagatgagctcggctcccgatcgcgactccgtatgatctgtccttctgtgaagcaaccctggcgttcacattgttgggcgcgccccgcttacgcacggttgcaccggatcgatcggatgtcgatgaagctgtggccgtagccgaggcggcatttgaggaggaggatggtgatggagaaagggtaacctcaatcttgtcgaggtcattctggagaagagaaagagaggagaacgtagatgcgccatcggcgtcggcaaagagaacccgagcgccccttgaatgtaagataccctgtgcgagaacgagaaggagagatgattgaatatcagttctctggatgaataccaaaaactgagaaatcaaacagaaggagaagtagcctacatgcttcactgctcctcctttgcctctgttgttttcgagggagataattcttagttctcctctgcctagtccccttttttccgatcccttccaacccttgagttcccatttccttccgatctcgagtgcgaccaaatccgtgccgtctgagctcccatcgtccacaacgataagctcccagttcttcaacctatctttgcctgtcccacctactgatccatagacctcctcgacagtccgggcgtcatccgtcatccagtcatgcacctcctgaagcatcggaggcaatctgagtttctcgttgtaggccgggacgatgatcgatagcgccaaacttggcggttcgtttctccccgagctcgatagagtcgagggcagaggcagcaggctcttgggatccaaggaggaaacatattttcgttcgttcggaaggatttcaggagaagaaggagagagagaaagaagcaagccgtacgcaaacaggaagagcgggcagaggagggagatgaaaaagaaaaatgtatctgtcggggagagttccgagaattgctgacgggccgaaaggatcatcgggtccatgaaagacggtgacatgatgacctgtatgccctgctgacctggtggtctaacaagagagatagagaaacaggaagggaaaggaaagaaaagaggtcgatggtgatgggaggacgaatgaatagctgatgatgcagatggtgaagaatattataaaatactatgaacgtttgtagtgtgttattcggatttttgtagtttcaatttccaatagaactctcgatcatttcctctccgttctctccttctctccatcctcttcgtcctcttccaagatgtcagatcagtccttgctaactcgttatgatagacggacaagaggttgcatttgctaaccgtgatgacgttaatttctaactcccatcaacagccaagatgggtgtttttgagctttcttttccaacgctctcgatcggactgttcattctcactctgatagtaagcctcttctaccaatcaacccgcacgtgttgcaactaaacagacaatcaaacttggcgctcttctttggcttcatcaaagctctaccgtttagttctttggcctgccgaatcatcggttgctacgattcctggcccacttctcgcaagatatagcccattttggttagctcggtcggcttggaacgggacgagaagtctgcaggttcatgaagcacaccggacatacggttcggctctttccgctttcaccagctgttctctattctcgatgacgaagaaccaccatctctcaacagaatgttatttggtccgaacgtatggtgatgctctacaggaaaattcgtgcgtttggctcccaaccatgtgtcgattgcagacccggcagctattcctatagtccttggacatggaacaggttttcttaaatccgagtaagtagctctgatctgcgcttcgacttaaatcgcgtctaactatcgactgagagcatctttctacatacccatctttgtctcttcctcctgcatgctttctaaatgattaaatcatctaaacggataaataaaaaacttcacagattctacgacgccttcgtttctatccgtagaggtgttttcaatacgagagatcggaaagaacatacaagaaagaggaagcttatctccaacgtcttctctcaagtaagccatccattgtccatcctcttgtgttgcttccttctagctttcggggacttttccagctcactgtcctctctatcatgcgtctcttcctccgtttatttgtaaagaaaaacgttctggattttacctcctatgttcacgaatccctgtacttgctgatcactcgatggaacgccctgctagaccacccttcttctccttcatcggacctggaaaacacagaaactgtgttcgacaccctaccgtggttcaacttcttagctttcgatatcattggcgcactcgccttcggaagacctttcggcatgcttgagactgggaaggacgccgcgcctatcccgagttctacccagaatcaagcagaaggaaaggagggaaaatatgtcgaagctatcaagtaggtcacgatcaagaagccgagattcttgtccgagaagggcgcgctgttcaagatgactaaatcagtctcacatctctcggatttttggaatagagtcttgaacgaaaggggagatgtgtcagccacacttggctgtctgactccttggatgaggtataccctctcggttgtgacttatctttgcgatgcgcacacataactgatacatccgtaatcggggtttacgtgcttctctgctcattcgtcgtaccaagaccctacgcagcatatcatccctggtttgttcaacgccttaaaagtgtcaagcatctcgccggcgtaagctttcttccacatacaaattcatgatctattttctcgtctgttggattcgaactgaatcatacgattttacactcgacggtagattgctacagcggcggtgtcccatcgattggaaaaccctccttcttctgatccacgagatctgctaagtctcttacaaaaaggaaaggacgggaacggaaacgagctgggaagagaagagttgattgcagaggcgatgactcagttgatcgctggtccgtccagatgtctctatagagaacaaagttttccccaaaagcgctagtgagctgacagcctaggattcttctttgtttttttgtaatctctttaggaagcgacacaacttcgaattcgtcttgtgctatcttttactacttagccactaacccttcgacccttgagaaactccagcaggagttagacgaagcgctctttaatcttgacccctcttctccatcggtccctacctatgatgatgttcgtcttatcactttcgttctctcccggtcttaccaccttcatcagctcatattttatccaaacgtctccaacacgtactcttaggtcaaatctcttccgtatcttgaagcagtgattaatgaggcgcttcggatccactgtacctccggaatcggtctacccagagtagtacccgaaggaggggcgtttgtatccggaacgttcttcaaacagggcactgtactgagtgtacctacgtatactgttcaccgggacccggatatatggggagatgatattgaggcctttaggtgagtcagcttaaccggctccgataaacgccgaaggcggctataaagagtctgatcatctgtaaatcggtgaactacaacaggccggagaggtggtacgagttagataaggctacgatgcattctgctttcatgcctttctcaacaggtcctcggttcgtttctctcctttacaggttgatcaatactgagtgtctcttgattctgatagactgatttgttttatgcgcttctttatatgcttgcttgtaatagaggatgcgttggaaaaaagtatggccaaccctttctctcttctatccgatccgctttgtcttgttaacgagtttacatattggatttaaacactcctgtcgacgtccctatttggtttccacggagaaacagtctggctgctaccgagctcctactcatcgtctcatccttggcatggaggtataacttccagccatctatcaaaaaccaaaccgtccgtatcctcccttcattacgcattgcgacttgatgcttctccaggatcatcctgctttgtcatttcactcttgatccctgactgtacttccataaattcgctcgatagcttcctgtgcgcgaagggttccttcgaaagccaaccgagtgcttcctcaaaatatcacgaaggcagcatactaacaccgctgacgatccgtaagagacgggagagacaaaagttgataagggggaagattagcagtagctaaatcgaatagggctgagtgatatgcatgttataactctttggttcaaaaaaattgactgtaagaaggacgaacaagagacaaagaccagaagtctagagggagcaagattcttttacaagaaaagtagaacaaagagggaaggagaagggcgaggaagaagttgagtcgaaatgagaaccgaggtgtgtatgtttgatacatgttcataaaaaagataaagtaatgtaggtgtgagaggagagcggtatgaagaggatgtgttgtgaagaaagagaagaaaaaacaagatttgatttttgtgcagaagaaacaacaatcaaaggatgtgactgatagtagaattgaccggaaaaacgaaacaggaacccattgagaagagaacagcacaagacaaggagcaagaaaagaacacgagggacaaagagagacggagaaggaaaaaaaaactaaagagccagatcgcgcttggccgcaatattcactccagaacaaactcgtcaacatcacctgtctctcttctcgacctttttttcccgcctggctttcttgactttctctcccctctttgcacagaatcaaacggcaacatgaccgggctcgtcaatgtcctcgccgttccctgggattggacggtcaggtggcttccacccactccgacctcgccagctgctgaggtcctaaagatcgagccgtttccaggcgaaaagttgtatccttgacttgccccaggacggacgaccatggcggatgagctcccatgggcttgctggtgtttgtaagcggcggctgacgtccgaccacggaacgtgccgatcggaatccgatcccatctggacaagtttcgaagcgacttgtcgtggagtgagttcggggcttgatcagacgcggatgacatcggttgctcggcattggtagagtgatagagaaatgaagaatcaacgacatcttccaagttgataggagggagttcaggctcgggtgaagaaggagtttcttctcggagtgaagggtgtcggcggagagacgaagagttattggcaggcgcaggggctgaaccaaatcgggcccgtttggtggggccaggcgagaacgggttgtgtgtctgatcagatagagagcgaaagtgatagaacacggattacaatcgtgaagttagtttcaggaagaaggaaagaaagaaccgaggagaaaaagaaacattcgtaccttggcttcctgcttgatcctcttctttccacttgtcgtcgatccaccccgacctcttcctcttcctctgtctctacctcggatcgagcctcttcctcgaccgcctcttctctcgaacggactgggcgtctgaacacccgttctagacaccccatcgataatcacgttcgtcaatccgcccacaggagccgaagttggaaagaacgagcccattactggtggtttccttgtgctttccattgcaattccaacgcctttggatgtcgacggaggaggcgtccgatgggaatccacatctgtagctgtggcacctgtggcagtggttgaggcgggaggggttggaccgttgttgatgacgggcggcaaagggggtgattcgaatgaggctgggatcgaggaatgatgatcggtagagtgggagggcatgatgggtgaaaccatgatgtgcgaaggaaacggggtcgtactgacgaaatcagtcgatgtatcccctacgggcgaaccgatatcttcttcctcatcatcctcaacatgctgaatgattactgtcacaggtgaaggagcttttggagcatccaactcgttatccttgggcgaagggaacgaagcaggcgatggaatcggtatcggaatcgacattgaatggacaggaatccgaggggcggggatgacatcttcgtcatctggaagggaatccgtggtgtcgccctcttcgtcccctaagtacaggtcctcatcgtcaacttcgtcatccctacaaggaaaagaaaggaagaacattcattgagattaatactatggcctctgaatgagaaaaagtacaacacaaatcacataccaaagtccttcccatttctctgcgtctctggcaccgtcactatctccctcgctctctgttgcgaattcgaatgctcctccgctacccgcgcttccaagtggatcctctaagttcatgctacctccgtctcctaaagcacccaacgctccgaaacagagctgaccatcgagatcctcaatgatcatcatcccaggagacgttccctcagctggtgttccgacggaatcctcgttctgagcaaaacttgctagggcctcttcaagtgaaagtacagagagcgggagcgcattttcgtgtggagacaataagttatgagcggcggatgtccgacgaaggagcgagttcagagtccatcctcgttgatgatcagactctgatccttcgcacacctcgctctctgtttcgtcgccttggccctgtccgtctgggaatccctcgtttgaagcagagaccggtcggccgtcggacggagttccagccgatcgggttccagaagtacttcctttcaaagcggctccgaatattcgttcttcctcacccgaatcaaaatcgctgaggccttcgaaccaaagagcttcgacatcatcttcgtcgctcgagtcttcgctccatggttcaccatccccaggtttgatactcgaacctaggccatggtggttggaacccgggccgggtagtctggctccatgggaatcgaaagcgaggatgtggagatcctcttcttcttgatacgaggacgaagggtgaggttggttggttgttgacgaccggcgatggtggctggaccgatgatcgttagtggaatgatgatgatatagatgggcaccggtgggatgggatgaaaagtgtggagggagaatatgatgacccagctggagctcgcctacgtcagagtttaacgcttcgctgtcttcttcgtcgtcatcatcctcatcgtccgctgctgaacttgaggccgaatcaaggccatcttgagaatcgtacgctcctcctccgttattcccaccagacatccctccaggttttctctgctcccacc

SEQ ID NO: 917 - DNA, 26354 bp, Xanthophyllomyces dendrorhous
cgtcttcgcttctcccaatcttcctttctcatgaaatcatcatcctccgccaccatcgatgaatcgtcattctcgtcatcgtcaccctcggtagtggtcgagaacgatgttgagctctccgatccggactctgtggtagaagatgaagcccgcatgaaaacccctccatcgttcatgaacgaagcttcttcctcgtcgtcatcgtcaaactcgtcaggtaacgacgtcaagcttccatcactctccattcccggcatatcgacgaggatgggcgtaggcgggagtgcggtggaagatgaggccgttgtctttttcttattggtagtggtctgagctctggcggaagaactgggcggtaaagccgaagtaggggtagcagcggtggatgtgatagtatgtctatgagctaagctcttcatcaaaggcttgtcatcctctcctgaggacgagagtgaactctctgactgggatacgtcctctacccatcgtttcgttgatacctttctctggaccgacaagccgtccgatttcttgcgctgatgcgatttggactttgacttgactttgtcttgaattggcgcgcttaaaggggcggagatgtcatcatttatggcgatcggaaaagatgaatcggcagaggtagagccggaagggtaggccgagatggacacagtagcagacggtccggtcggtccgttgaaggcataggttgagggaggagcatgtttgggtggtttcgaaaatggattggttaatgccgatggtcctgtcggaatgggcttagacccgtcccgatgggtgaacgacgacaaggccgcagccgattggctcggtttcattggtttcgatccggccgagaccgtcttgagcttgtgggctttcggaccagtcggaattggtttgctatatggcgagttactggcagaagagggcgccgagagagtatcaccatagttaaatccgggttcgtgcgccttcgctttccctttgtccttagctgtcatcgatttcggaccggtgggtggattaaaggctctctctttgactgctcctaagctgtttttctccctagatttgccactcgtactgctcccgctgggcccagactttgtcgatgtcggagccgagtactgagaagccttcttcttgaagctcggaagaggaccgccactggtagtggaactcgcgcccagatttgatagcggtggcggcggaaagactcggtggacgttaggccgggaagatgttcctgctgtcaagagaccatgttgagcgggaggaggcgaaccaagaggaaccttagtgatctttggtttcgatgagccgagctttggtttcggttttgctgcagtcttgccgggcttctctggtttagtgaagaacggggagacagatcttgatggaccggcggggataggtctggaggcatatggatggaccgctgcgggagatgtaatgggtgcggaagaagagccgagtgtgggcgtgctagcggacgcgcccagccggagtttgatcgttggcagccggggggagttggaaggagagttttgggcggaacccggtgggttagggtgataaggatgagaggacatgagttctgcccacagtatggtttatgcggtctgatatgagtgacgagttgatgtatcaagaagcaggttggaaggggcgattgagtcttaagtttatgaatgtgtgcgggtgagcgtgtttgaatcggtagtagtgtattttctaaaggaacgatgagaggacattgatcagctccgaatgtcgctggcctcagggtagtcctggcgaaagtagagcttaccagagtttgagccaaatctgtctgcagatttggacgtgcgtatcaggttgtaatttgaagaggagaaattggttggttcttcaaggtgtgaaggtgtgtgtagtttgggcgatagagttgtgaatctaagaccataggcgttcaacaagacaatagtcagccaacagaatctagtgtgcggacaagaaagagaagcacgaagtgaacttacagcgatggacaaaacgagggacgagctgaaggaggctatcttgaagtgttgaaaatgagaatgaggatgtgaatcgcaggagggcacaggcatcgtctttggtgtcagggtccggatgtaggcaaggggaataagaggagagggaatataagatagggtgtgtaatcgggctaccacaaggatgtgtgcagctgttgaaacaaagagaaggcaaacgagatctgtcaagggaatatgacggaagccaggctgaagattatcggtcctgtgcgattgggaagttggcccaaagctatcagggaagttgctattgatgttttggagaaaacaactaaggaagcagacaaatcggtatgtctggctgagtgtatgctatagttccaagctggatcgatcgaagggagaggatagaacgtttcaggtgtgggtgagagaccgagggagagaacgaacaggaaggttatcaggaaaactcttcttaaagctgtgcattcagccgccacagcgatctttgcccgtgacgcgttctgggtttcgacgcgtcagagcgcgcgtcagccctcagccagccaggcagttgggtaggtagccaggtagctaggtagctaggttgacggatagcagcgcctaggaaagactagtcaggagtgccttcttggtctaaccaacaagctcttatgtacaagtaaatcctataggccagaccacagatgacaagaagctcggccacgtgaacagacagaatgattagagtgcattgcattagaaaacgaacgaaactcattacagaattttctttctagtgaactacagaaatatccaacagagaccatcactcccatcaatcttctcttgagttctggccggtaagcttcttcctcgtcgtttagcttgtaagtgtgaatcaaagtatgagaacacaaccgagagagtatgggtagaatgcgcttgagaggaacgtctgtaggaagcaactgagcgtgctctccttcttcccttgcttagacttttgtctcttggcatctttgccttcttttttcttgtcctgttgtccaatcatcttttgatcaccgtgaacatctctccatctttctttggaacacatctcttccatcaatctagatttctcgagctgttttattgtctagaggcttccaagtcaaggcatcgtctctcccttgcctaccacctcgtctgtttttctcttcggaccctgctctctgtgagaggtcgactaatccgtagtagcaaaaagtcccgatcgctcgttcgtatctggccctttttttaaaaaaaatcctcctttgcctttctaccttgcatgcttgatcgctaaaacaggtagcacccactggcctttgttctttgacctcatcttcctatcagcgtgtggcccatccttccctttcttctgcagctcgtacagaacatggtccaaccatcccccactccagtgtcgtacccaatatattccccgccccgacagtcactccactttcttcgttatctgacaaaatcaagcacgtcccctctgccatctaacctggcggtcgtggctctgttgacattgttattcgccacctaccacgtcacccgattcgtgaaatatcagcaagtgaaacgtcgttggcgagcgagtgaacgtgcacggagagagctaatcaagaaagagtcggagcgatcgtccgcttccggcgttgcctcttcgtctacccttcccaacggaggctcaagttcttctgttggcaagagttccgtcagcccctatatcggagaacgacctagcaggagtgagctaggtgcaaagaagagaaaaaagtccaaggcgtcaatgacggcgacgacgacaacagcggccgtggtcgatacaaatcggtcctcttctgtagcaaccacaatatccccggcttcctcgatcacaccctttcccaaagagattgacgagcctgtgatcgttacaacaaagccggcatctcagtcgagtggcctgtcactccggatagataccaaagcttcagaagacacaagcagagacagttccgactcgaaatttcaggtcgttctccccttcacatccaagcgacggaataaaataaaccggtcgacgtcctcgccaaactcgtcctcaacacctactgttggttcaaactcacaaagtagagacaactccaccgacccatcctctcctcctgcctctactaccaccgtcatcgacagcagtaacaacaatgatcacgatgaaatcgtagaaaagttcgctgccgatggtcaatcgactgcaagttcctgctcgggtctaactgggcaggacggagatttctcgccggcatcctccatccagacgacaccgactacatccattaactcgtctacccagtccctcgctatatctagtgcaaagactcacccggtctggccttcgtcccccctggatcaagcaggcccaccaaaagagacctcgccttcccttgagcacgaggtcgagtccctccgagcgtctctctccactgcgctctcgaccttgtccagcatgcagtccacacttgcctccagccagtcatctctcctcgggtcccacgcccaattgtcagatgtgacggccgagagagacacccttgctcgctcggccaccactttcaagtctgagctggctgatctgacaacatcgatcgcccggtcagaatccagagcggtctcggccgaggaaaagcagacagagctaagtgcagaggtcgagcagctcagaaaagacctcgagagagcgagaagggaggtcgaagatggtagaagatggggcgaggagcgaagaaaggagagcgaggatctgagaaggaaagaaaaggcaggcaggagggagatcgaaaagttcaaggaggaaggccgaaagtgggaagtctacgaacgagaatttagaagaagagaatacgaagtttgtcctttctcttgctctctgggcttgtcgtttgaacatgcataatcagatctaacgaagcacttgctcccgctcttctttgtcgaaactagttgaggtttcaacttcatcatttatctaccatgcacactactctgcttcaccacgcccggcaacttgaggctcatctccgagagaccaactatgcgttcgccccgatgcctgtccagacgccgatggccattcctcctgcatcttccggctcttcttcatcaacttccgtttcgactttagccggagcctctattccagcgtatcctgcttcgccatctccttcatctcaagtaggttctctgcaaagcccaagacagccaagaagcccgatgggattccctgttggggtttttgtttccatcgccgaccctatgtcggccccgactgcttcgagccaacctcatccttatcaatatccacattcccacgcgcatgtccagacgcattctggacgtggaaagcccagacgaggcatgtcatcttctgcccacgaggagagttccccaggtccatcgtctggctctgtttctgtgccagtctcgggatcggatccttcgccagcaccaccggcatcatcgtcgtcgtcgtcagaggaagtgacgaaagacgtattaacttcgatccttaagacatcttcgactttacataacggttcaagccatccaccgttgaggccaccgcctttgatctcgtccacctcgtctttccttggtcatcctacctctcagactcaacccactgttggaatgagcaaggagggatctaccgaaaacggtgatgaaggaaaaggaagagagagtgaagaagatgaagatcaggaaatcagctttgcatctatcatgtcatatgacgccaatgccagtccattgcctcgacctgaaggagatgatatcgaggatggtcaaatcggtagcggaggtgggttctttggtgatcaatcgtccagaaaagagcaggacgaggacgagaggtttgcgatcggtttagaccttccccagccgacgtctgggtcagaagtagtgaatgataggaaaaaggaagcggacgaagagtcggtagcgacgccgacagtggaagcgcctataggctcaaatgggacttgattttttttccttcttttttccctctattgcctctattcaaccctcatgtggttgtttgttttctttgcgctcgctttacctcagtcctccgttgattgccccaaggcctatatatcgatccggaacttatctccctgcttactctctttttctttctcttttcttccctataatcgcctttctcttcactacttgaaaggaactagtgctctcctcgtagtttcttagcataaccccatccgtctttctttcctctattccacttcattcgttagctatcggatgataaaccatgccgaacctaagagaatcattctcttcgccggctattgataatggtatattctgacgtctgcactcggctgaaatccatttacaacggactgaattccatttataccacgtggctttctttctccctcggttcggttagacgggtgaattcattaagaagtaaacaaacgaacaatcagataacgaaattgaaaagtacgagcgatcgatcgatctacctctgtcctctctccttcttatgaactggacacgttggttcttttcatccggaatggagcctcatcttccgatccaactgacttgggagatacgagtaagagaagacaactgcgggtgtgggtgcgaaagaagggcgggtaatcgtaaaacacgataaggcaagacataggccttacagaggagaattatgccatgataaacttcgaagatgagatgatgacaagggacgatacaagaacaagcaggagcagagtatgtttgttttgtgttctcgcttcaagttgtccttaaactccgacctaacaaagagaaggaatggttatcccatacatccatctctctctctcctaatcagacgagacaagatgatagcttgacacatagaggtaaaggaaaagaaacaagaacatgattccaaaaaatccaaagtgacagtaagagagaaggaagaaagaaaaccaggtgaagaaaaggacagattcttgaaatacacagataagatcaggcgtaggcataaagaaaaaaatggcctcttgaagaggctataaaacgggcctcaagaatgagatagaagaagacaaaatgaagcgaacgatatatataacgaaaccagagagaaaagggggaaagggaaagaaagagtggaagaaaaggaaacaaagaaagaagagctcttccacacaacaagtacactactcctctttttatatattaagaaatatcaaagaaatatagaaaagaagaaccgaattatgaactccctttcccttcctccccttccaaacatccatcttttatctagccagtagtctcgagcccgtcgagagcggtgactccggagtcatcctgctctcccagattagtaatgtactggtcgaaatcaaactctggtaattcatccatccccaaaagactgtcaaatccgtgagtaccaaggtctgtcgatccaggtccgtttgcagaagcacccgtcaacccggggttaccgcttccactcgatggatccacctgagccgacggagcccattgttgatggtgttgctgctgctgctgctgctgctgctgctgagggtgagactgctgaggtccgaccgcattagatccagacgaaggttcaaacccgtcgatcatcggtgtactgaccccacctgggttattcatagacagcggaagaggtgaggtagaattcggatgtgatgatagactaggatgtgggtaaggtgaatggcccgtggatgaaaatggttggttcgtcggggtagaagcggaatgatgaggggaaggcgcggtaggtgcctgaagagaattcatatattgctgttgctgttgttgaagtgacatcggtgtgggctgtctgctcggtccaggtgaaggtccatccttcggagtagatgccggtggtctctgctgtgtctgtcaaagcgtacatggaaagaggaagaggaagagggagaggtcaaaaactccggaggaaagacgcgatggtataggggcagtcgctatatagtagcgtgcacaaagagaagggagaaaataagagaaaggaaggggctacgaacaggaagagcaaccggaatgggttgaccggattgaattggtgtcgaaggtggaggcatcatcgttgaatctctcggggtattacctgcgacatttggttgatttctcggactaggggccgtcattggtccagctggaccaccacccgtaacgttactcgcagatgacccattagattccccttgggtgccactttgcgcggttcctcgtcgtttgggacctgtcgaacgagcagagttgggcattccatttacgagatgcccaccgccccctcctcctcccgctccaccggaagacgggtctccattggaaagccgagccatggcttgcatctgctggtcttggagactaggaaacggagagtagtggggatccggaggaggctgcatgaagcttcctggactacctgcatgaggagacccacccaaaggctgctgggctagctgcatctgacgctaacaagaaaatccgacagataaggaaattatcggcaataggacaccaaagacgaaggcgagaaaagacacatacaagcgcgccattagaagggcttttcttcatctttttcccttctacaggctgaccgtcatcagtcgggctcgagctccgtttctgatgttgcccattctgttagagacacaaaggagcaaattcggtggattagactcagatggacattaaaacaggtagaaagaaggaagaagaaaaaaggaggtaaagataacgtactaagaactgttgctgttgctggataagttgcgcctgctgctgagaattcattatctgtcgctgttcgtggatctgctgaggtgttagcccttgaacgctatatcaacagaggcacccaagaaggaaggagtaaagtaagtgatcaagcaagcaggacgatgaatgagaaagaaggaaaggaccactcacccagacctcggctgagcctgaccaggtgcccttccaggtggttgattcattcctagctgcatgccttgctgttgggcaaggctttgccggtgttgggcaagagcatacgtgtaccgaccttggacaagggcctatcgtaaagacaacgacagaaagagaagagaagatcgataagctacatgatcgaatgccagagagcaagaaaactaaggaaactgaccttttcctcagctgtgagggttgccagatctctagctgccaagccaagatagttcaagacctgtacgatcaacccggtgtctaacacgcctctgatgccgagtaactcaaacgggtgctgttgtcctgatgagagttgttggagctgcccgccctgcggaccttgtgttggagcgcctgatgctccacctggacctccaggaccagcctgcatcggtggctgtcctcctactgctccaccagaaccaccaggttgaccaggctgagagtgagagttatgtgtcctgatgagttgaggttggagctgggtcgattgagctgggtgaggatgaagatgctgttgatacgatccggctggagagggccgctgaccgggatgagatccgtcttgagtgggatgtcccatcagcccattcggactaggggactgcatctggatctggggaggtccttggttgtggaaccgctgctgctgctgctgctgctgctgctgctgttgctgttgttgctgttgttgctgttgttgctgctgctgaggaggaggcatcgctccgttgtaggccggagattgatggtagggtccacccgtggtgggtggctcagtaggatggggatcacttggtgcgagcggatgtgccgaaggaggctgcatgtgatttgttcgtggggagggatgagctgatggatggaacggttgagcgaatgaaggttgctgctgctgctgttgtgggccaccagccgattgaggagtctgagatggcggtagtgggagcccgttcggatcttggaaaaaccgatgatgagtctgtgggtatggtggttgaccgcctgtcatttgagcggttctcggtctacttgcaccggccgagccggctggaattggagcctgtccgggttgaccgcctggttgttgagcgattcgggataacacgcccgatggtggatggccaccggcagcagcggcagcagcagcggcggaagacataaagcccgattgttgttgttgctgctgatttggatggttgatcgtgtcctgaccgagcgattggccatggacgtacactctagcgtccttcccgccttctctacttgtcctcgcgctaaagacctcccagaacacggtccaccattcatagagtaaaccctgtctcgcatctatcggtaccttgacgtccgataattttccgagaccagcctcctgggccaacgcgttggcggaggcgaggaagcgtcttttggcaagatagtctgcgatgtacatgtcgagcatcgagcttccttcccataccgggctcgaaggggatggcgagagcgacggatgcatcgtcgactttggtgacggacgaggtcgattcgatgtatttgatggatacgtcggaggtgccaggttggatggttggccgagttgttgttgaggaggttgctgctgttggcctagtggttgctggccagtagaagcgtccgtcgacgcgacgggttgacccgaatgaggatgtggatgggaaggaatccctggcccagaagggtaataggactcctctgggggtagaaactgaggattgatcggtctgtatggatgctgctgttgctgctgctgctgctgctgctgttgcttttgctgctgctgttgttgttgctgctgctgctgctgctgttgttgctgctgttgttgctgttgcagttgagatggtggtggtggttgagaatggggaggccgttgttgggaatgaggttgaggttgctgttgatagaacacgggaggggcggaagggtatgacatccggtcgtgttctttcagtgttctttgatgccggtcgtattcgtcgttctttttttcgtctcgtgtctttcaggatcggggacggagagcgggagcgagggaacggaaagatgaattgaatggagaagaaagatgggagaacgagaaaaggagaaaggagaaaaaccgggtgaacacaaaacacggaggatgtatatgtgcttggctgattagatgacgatgggatggacaagaagggagagatcaaagagaaagaaagaaaggaaagtgaacagggtatcaaacaaacgatgtaaaaagaaagagaaaaagggaaagagaaaaacgagaaaaacgagaaggagcgacggacaaaacagataaactgtccgaggcggcgagcgacagagaaagtcattagagaatgtttgtattgtggtactacgatttgatagtgagtttcctaatcagaccgaaacattacacttttatcccaatctttctaatggacaactacgacgtttttgtagtctccttcattttttttccttcttgttctccttctgcgttttctcgtctacttgatcggacattctcgccctctgacgcttcgaggagacgcttcgaaatcgttcattcaattcattcctccatctgcctttttctctctctctcttttcgtttcgacatatgcgttccatctggcatgtctcctctcctcttcacatccgcactcgcactcgcactcacgccttagaattttcctctcatcaccttgcgatagaatatcaggccagcagctatcccacctagatgagcggctccgtcgatcgttcggttctgtggagacaaaccaaacgaaatcagtttttgtcagaatctcactctacatccttgtaaaaaatattttctagacttacaccctgccagtatacttcagatacaagctcaaactgaagttttttgttttttttgttttttgttttttgttttttaaaagaatgaaaaaaaacacgaaaccaagagaacaagagaagaatagatgaggatggccaagttccagatttagtgtttgaaataaagcagagggaaaagaaagattaggaaaggatttagtctctcctgctgtcatcacaccatttacactcaaatctgaacgcaccaacgaccatccagcaagcgcatatcgagcgttcacagggaccacaaagaacaataaaagctccagactaggcatagccgctgccgtaaactgacatcactcagacagaaggaaacaaacggtcagatccaacatttttagatacttgattcgacagatgaatcatgtcaatcacgaacagcagttaacccaaacatgctcccggacgctcctactcctggagccttgggccaaatcgtccgtgtcaacgcgctagccacgttccctgccactcctgcaaatgcgtatagtgccaagaaccgagcgttgcctatcgagctgtaggtgaatggatgtgttcaagaggaatgttcgtatacgagttcaggaaaggtgtgcatgtatcagcaaggaagcatacatgcacacgtcagaggagcatctaaccgagttatgttcgaaacgtacctgatgatctgaggcgcgaattgatagacaatcaccatgttgaacaagagatgcaacggagcttcgtgagagaacgtagacgtgaataacgtccatcttgtgttgttgttcgtacacccgattattccagtcgattagccatcatagactctcttcaataaaaattaaatgacgatgaaacgatgacgaaaggaaagaacaaaacatacattcgaccctccttcaagttaccaagagaaagcgcccagttctttctcatccagactaacatcggtgcctcgttaaaattcgagtacttcatccaagctatctgccatacaccgcacactgccacgttggctattgcgatggccccgaccaggaaaggagcatgttctcagttagctagctcttcttcccatccttcctttgcagacatattaaacacaaaaggactgcacttacctccgatgattccatacaccttccattcgaaatcgtttacaatgtcagcagtcaaagccttctccgagagagcagaccaaaagagcattgatcactcacgatctgttttgttgagagcctatcccaaggtgctctcttgcctcctccaccacctcgaccggtataaccataacttcctcgaccaccacttcgtccagttcctgtaccccgataatagctgtctctgatcgcccttgatacatttgatgttgaaaacgatcgaactgagaagcattttggtgccgtcggcggtcggaaggacgatcggagaacgtccagagacgggcgagccgttctggtcgagtgggaaaaagaacggaaggctgcgcatggggtcggtgatgaacagagtgatctcgaacggagagatccgagtacatatagagcgctcataggtatatgtgtgtaagtgtgagtgtgagtgtgagtgtgagtgtgtatatgcgtatatgcgtgtatgtttgtgatgataatcgatggctctcttgacgagaaattccggaaggagagaaagagagagagaagctgatgaagcggcttcaaacgcccgatcagccgatgttagggttcaattgagtgtaatatcttcatctcattgttgacccttgctgtccatcctttctcggatgactcccggctcgatctacgttcgtccttctttcttatagaatcggctcaaggaaggatatcatcaaggtgtcatgctcgcagttcgatttcatccaaaacatcttggagctctgtacaaaccggtagcaactgccgtcgtaaaagtaccaaatctttcatccctcaccttccgatcaatctctacaactccaatcacaccgtctcctcctccggatatccccaaacacaacaagcctgatcggccaggctcatcagatgcttcaggctcgagcttgagctcgagctcaaacctggtcaaagcaaatgatggatcagtacctgttgtgaagaagataaggaaacgcaaggtggatatgatgcctagtcaacgaaaggtagatggtgaagatcatctctacgattttagtgtgtccctttggcttctttcttttctgctctccttcgcacatgtttagaatagaaagactgatggattcaatcggtctgatacttcttgtggatctttttttccttctctgaaataagaccctcctaatccgttctttggtgagctcgattcgacattgacgagccatcggagggtaacagcaaaggatatcgcggcgcgagaggagcctccaacgcaagtcaaaatgctcgtccgagattacattgatgatcacctctacaacgttcgttctgttcttgatatcacaagcccgtctagtctgtcggtttcaggagtctgggaaaaagctaaacaaaggactcctctgtgagggaaaatatatatagccacaatacggatacttctcctccccacaactcgagatctttaccacggccaccaaagacggctatgactttacctctttccaatcaagtttcgacttcgaaaacaccgtgtctcaccgatacgctgagtacgtccagttggagagagagaaacagaaggcaagggtgagtatgggggaatacgaagatgagatcgggaaagggggccaacagctttggcatacacctaccgagcttttcaaggcgagtgatgctatcatatccaaagaatctgcctcgttgcctagtttgatgaggagagcaaaaatcagtctgtgcgctgaccgttgttcctctgtctgaacacaaaaacagccgtggtacggccgggctatcgcgtcgtgcctcgtccaagactataagcttaatcattttccgtaccacgatatgatcatctacgagatgggagccggaaacggaacactcatgaccaatatattggattacatcgaagaagttcatcccgatgtctacgagcggacaaggtgaggcagttggttctttgatatgccatttacctagtgcagtcggaagaagagaccttctactaaaccgacttccttctctttgaccgaaagttatcgaatcattgaaatttctaaaaaactagcagataagcaaaaggtggttgctagagagaatggccacttgtcaaaagtgaatatcataaataagagtatattcgactggaacgagcgggtgcttgaacccaactactttgtagccatggaagttctcgtcagttggccttcctcctctctgatatacccccactcacaacagatgtgctgatgagtggcatcttcttcgggtggcctttccttaacaggacaattttgcccatgacttgatccgatatgatctggagaccggtctgcctgtgcaggcactggtggtgacggactacaccggagggtttcatatgatatatgaacccgtgacggatccatacattctccaataccttcacctccgagcattgcttcctcagccgctgtgccagtcaccttcgttacccgatatgtacacccggtttcctcttcttcggtccatcagagccggactgccgttcgcgccgaatctaacgaaaccagaatacgtgccgacaaaagcaatgatgctgatgggtatccttcgggattatttcccacatcatcggatgctgtttagtgattttcacaagctcccagacgcggtcgaagggttcaatgcacccgtcgtccagaccaggtacaacggagagatgattccggtctcgacgatcatggttcgacaagggttctttgatatcttcttccccaccagtgcgcccctatctctctatctgttctctttccttgcatttgatcaagtgttgactgtgttatcgtgtctcttctctctgctgaaagactttcgattgttccgagcgatgtacgctcttattcaatctctaccctcactaaccgaacctccggcccatctccggttcaccccgctaaacaacccaaccgaactatcgttcatttcctccaacccgacggcgatcccgccgacgttctttgcttctaacccacctgtctatccgggtttaccgatcccttcgcctgaatcacttgtcagaccggtgaggaacggaagtaagatcgagatttatacccacgaggagttcttgacgatgtttgctgaggatccgagtaggacgagagtgaaggatggaacgaacgtcatgttcaagtggtgtatgtcctttctttcttttgttgaaagagcgagacgcgaatcctcctgacaatcatgttcaatctatcaaaacagtcgagaacgcatccttcatcttctgaacccaaaaaaagagaaaagaaaagaacaggaaacttgatagcccggcacttgaatccccgaacaatcaagtctcccagtatttctaaatgttgtccaaccccatatccgcgttcatacacacattctaagttcggcttcagagtgaattgtccatgtctcgatctcaattgacaagggagaaaacgagatcatgcgctcgttcacagttgtataccatacgtcgtgacctatgtatattcatcgatttcaacataaccaggaagaagaaagagagacagaacatgcgtttccatgcgtatctggagaggttagggtatactgttaaaaaaactgagatttgtacaaccaccagacgaacgaatcgagaaggaagaaaactaaccttcctccagatgagaagggagggaaggaaagagagaatgggagaaggatggtatcaaaacaaagaaactcgggtgtaagagtaaagctaggagtagtggtaacgatgaaagcagaagcgatgatcatgcatgatcgcagacgggccgatcaaagaggatggatatcaaaaagaaagaaagaacgaacagtggaaaagatgactcaagagggaatatgttgaatgaatgcaggccgttgatgatgtcatgctgttgctgctgtctgttgatgctaagggaaccgtgatagtgatactgctgatgattgtgatgccaaagatgatgataatgatagagacgaatgcatcacacatatgtccctctcaagaagtcttcgtgtgttgttcgaatggttgtcgtttttgtctgctgccacagagaggacgatcagtagagatcagtcaagagaacgcatagaagttcaagaagaagacagagaaaaagtataatgagatgagacaaacctcaaagtcttccatagcttttctaaatccgtctagttctgtcctcataacggccttcaaattgactctcttttccttctggtcctcccaactctggatctcctctcttgatctttcccacgaagcctcctctgcctttatacctcccagagtggttctaatggaccttaaccgtcttccggcctcggtcgctccggagagtgtgatctgggaggtatctcccacggtggagagtgagctgatcaagctgtccgttagaaaccgaagttcttccacccggcgaatggtcgattgaacgtaggaagacgaggagggcgagggacgggagggagaggagaaaggtgagggcgagtcacctaggatgagaggatcggcagagtggttgattggctgtgcaggtgtaggcggagactgaatgggagccagaaatgtttggtgaacagcgggactcgagaacccatccaaagttgagctcgagctggagaaatcatcgagaatagacgggcaaggatcagtgtatccggccaattttttggccagacttgaaaagtcgactgaacggtgatcgagtccgcccgcaaatcgtttccgttcatctttattatacgtgttccgctcagtgttcatcccctccctctgtctggctgatgcctcgatcttgagcgcgaaagctttcaaggcgctctcgagtacaaagctctgatcgtccttccgcaagagaggtaggaacgatgggggtaaaatgatttgagagaggagtgtagatagagaagaagaggcagagaagggagtggagctagcagagtccaaagaagatgaggaggacgagattggagagcaagggggagaagtgggttcatgaaaagggtacatgctgtcgccaaaggagtctcggggagccatgtgttcttgattgtcaattccgtttttactgtcagttcctagattgaattcgtccaaaagaaaagatgtcggatagtccgatatacatggatcaaacgcgccataggcgagctcatcacctaggctctgaccttgaactgggagagaactaggatcgagatcgaacggatccgcgaggtccaagtcgagttgagctgataggcgagcgggcgtgtaggtatcaaagagtggttgtgagataaaggatgaggtgttgatttctggtcaagaacttactgtccaatctatctatcatgaagtcaacactccgatcgactacgtgttcgtcatcatcaccaccactgtcgtggtcaccctcgcgtccatcgctaccatatcgtccatcggcatcactctcttgatcatctatgtcgagtccaaactcgtcgaccaacgtccttgcggttctcccgctgtgggtcgggtcgagactggaggatatctcgtggtcaagggagatcataatcactgatggcgatgagtccgaagcagaatccggatggtccggacgagaccgagcgagccgaggatgcgaccggggttttcggaactggccgggctggcccatcttgatgtttgaagcttggttgtctgaggaatcgatcaagtctgattgccagacgtgagaacgaatgggatgttgatgtaaccaaatcggagtgcgatgggaggaaaaagtaaccatacgtttacgccagcgcacgtgacgtaagtgcattgttgcgcagcagctatgcttgtttcgatcgctgccggattaactgagagcgaataaacagagggatgagtgagttgaaacctcggaaggggccgcggagtaaggagcagtcgagtgattgtctgaggatcccttgtgttctggaacagtcagccatcaaatggcgagtagaccctcagcctccgctattcctgttcctgttcctcactcacaatttacattgtcagtttcaggtctgctttccgggcctgggaaccggagcttgagaccacacagtcatcgacctggctccaaaggagacaatcagacgagagctagggatgagagggtgttgagaagaataacaaataatcagagacccgggattcatcccgcgttgattgcccgtgtgagataggatacacagccgcactttgatacatctcttagcctactccgtggctgagccgtctcgatcgactctattctttctgttactctttgtgtctctctttccatccgaagcggcaccatcttcccctcttttttgcccgttcccaccgcttctctgcccgtcctcacttacatttccctctcctttcattcccgtttgctcgcttttttgttgtctttgattgactcgatgaagactaatctcggtacagaaagagagagctgcgaaggatatacacactgatggatcgcagctatagcccattcacacagcctactcgacggcttattcgctaatgaccattctgtgttcgtctccgattaaaattcggtcgctctctcggggtttactcgcactcactcactcactcacattctgttctgttctatccaccgctccttcacacgtgggacacgtaaggcagacagagggatcgacaaaacgggagagacacactcccgacacccgtaatctaatgttcttactcttcgccccttttgccctttgctctcttagtccttgccctttgctcatctgagtcttcaacagactgtgcatacatcatcttttcaattcatatcggagtgtgtgtacactctggactgtgtgaatatgtactccctctaagcaaaggcagctcttctctttttcttcttcgtcccacagcttccttcctatcttcttctttcctttcttttctctctcgcctcttagttctcttggaagaagcagaaagacggcaacatacatacacacacagcacacacagcatactcactcattcactcggtcgctcacttgtagacacacatacacatacacatacttactcacttacacactcacatccacaccaggatctcttgtgccttaaatcaaccctacccagttctaaacctcacgatcccgttcttccgtggaaggttgtctcgcctatcctctcagctgatcatgcatccgtccaatcacccgaccaccgttgtggacaacactcttgcaccagaaatcacccgcacactctctttctcctctttcgactcgatttcgtcttgtgaggccacacagagtaccactcagaattcaatgtgctcttggtcggcccgtcgaccatttagctcaagagaacgctataccaattcaacttctacgccgacctctaagccgatctcgttccagaacacaaactccagaagggtggacgaatcgacaaaaccactctcagacacccattccgttccttcgccgacagagctcgtctctacggccacagacacggaccagaccgacgggtttactcaacagggtcgagctggtagcgagcacaactcgaatcaggacgggcaacccgaccgagagctatcgaccactggtcagttctatcttgcttccctttctgatttgaatggcaatagtcatgaatcttttgcatggaatgccagcacatacttgcatgccctcccgcctacatcaatgaaagtgctttccaaatgacgtatgatcacgcggttgactgttttctaccttttttttgctccttttgatgtttggaaacatgtacatcccttgtttatagtatcttcagcatcaacagtacacacctttagaacatcctctgtctcacctgtctcgactcatttgacaccttcgttctcatctccatctccatcatctcatgagcccttgatctgcacgacatcaacccctcgagcggagaacgatctgtttcccctcggacaaccaactctcaaaattcggttcagctcggaagagagagaccatgatgttcctccttgcttttacgttcgttcaattcactcatccgtccgactatctaatcatgtttctaaagctttctgaccaaaattgtgatgtgcttcttcgtggcacctcttctatctcatctatagcctggtcaaagtattccgacaatgttggcgttcgagcttccccgacatacttccctccctcacgcactcaacccacgcctgtcaatgaatctcattggtacatggagaggtccttcgatggacagtttatctgaaaatgacagcgagattgaagagagaatgctcgttaacatgggcgtcagcttggacaaaggacttgacctttggaagaaggacgccggattaggtatgtttcttcctccagatctgtcttgatccttgaggaccatctcgaattaatattcctttcttgcagcctggaaccagatgagcgaacagaaaagaagaggtcgacagaaccctcgcatcggactacctggcggaaagtatacccttccgttgacggttcaggtgcctgtcaactcaaaattcccagcaacgttcaacctaccatacgcctcgtttcaagtatcctatcatctagaagccaccctgacgattgataccccaaaaaacccgtttccactgtcagatccttctatcgcccagcctgtcggacgagttacccttgtcaaagccctcatcgggttcactctccttccagacactctgcctaccgttgaaccttgtcttccgccgatcgaggcatttgttcctgcttcgtccatgtcttccatcacaaaccagaacagagatatagaatattcatccgttagatctgcttcggaattgttgaaggacagattctgtcacgcactgggaccgaaaaaagttggcctcggggatagatccgaaggcgatctgaaggcatcatcggtagaggacgcgtggtcggttgatgttcgggccccgaccacaacattctcccctacatctatcgtgcctatcgatctagtactaagccagcagagcctgacgggatactctgctaccaattcatctaccagacccatccgaccaacgggtgaaattattgtaaaagcgattgtgtctagacgagaagctttccttcagtcacatagcatccccactatggaagaggtcgacatgtcgggcatcgtgggggaggaggagatcatcgcttcgtggggtcgtttcgatctggcgtttctgtcttgttcggaggatggcaagcagttgatgctacctagattgaatatcccgcttggatatgatcataatcatccatcttcctcctcgccgacaggttggacacatggtttcaccacctcgctcactgtatctgccgcacaagacgactcggatatgtctttcgcgcccatctacacccactgttcctctaggttttacgtctctctccacatcgcctactcccctaccccgacatcttccactcgggcgcctccaaacatgttccggacattaagtcctctgtcgagaacgcacatcccatcccaattcttgtccagatcactcgtcttccctatcaccatcggttctgtaggcgaacctcaaggagcgagacaccagagaacatggagagaactttacatcgaccgcaccgaatctgatggccagagtgacgaaagaccgagaatggttcgtggctccgctatcgacgaagacggttcatggatcgtccctccgcctccttatcaggtcgccaaaaaccaagagatctacgtcatttagacaactaaagtttcattcaaactctacttttggttcctcctcttttgtgagcacgacgaaaggaaaaaccaattaaatcttcacaacgttcgattccttcactccactctcgaaaaatatcgtctcattcagattgatcgctcgattatctgtaatcaaatacgtcccccgtcagccccgatatgatgcctatgagctctcaacaatcctcttttggcttatttaatttcttgtacttcactaggcttcatacatcactattttggatgttcatgccctttcgacttgctgtaccaactaggttcgatcgttttgccttgcttcttacctttgtttctgttttgcttttcctcctcattgcttccgttctgcttctatctctttttgtgcttggatcttgcttcctatcttcccccttttcctctgctttccctctgctttccctactcctgcttaacttgctttcccaatttgctttactccaattcatcttgtccatcctttatatccccacttctttcaaatgatatcatgaggttttcaaattcacacacgcacatacacagatatatacacgtatgtgttacttgtacacaagaaacttgagaggagagagaaagaagggaaggaaagtgataaacgacatgttcatttttttttgatagaaacgttcgagccgtggaaataattaagattgagcaagtgggaaagccatgaacggtgaacattgaacaaggacaaagttagggaaggtggaaagtgggagagtcaagacgctggagtccgtgactacggccgtgaccacaaaaagaagaaagaagaaaataaaggacagaaaaaaaaagaatataaaggaaaaaacagaaacagttcgtctatagatcaaggggatcatacaggacaagagacagcaatggtgacgatagagaaaaagggtcagaaagatgaagcagaggagagaaggagaagggaggagaggaagagggaaagatacattcttcggatgaggaacacgatcggtgagccgataaatgaataaacacagtaaaacagaacggaaagatggatataatgtgtggtataagtaggagagcaagtaattgaacgaggaaaaaagaatgtgaatgacaagataaggaggattcaatgcgtgtgtatgggtgtgcgtgggacatgaggatctatgagtcgagagcgtacacaaagaagaacaatcagtaccagttgaagaggttttagacctcatacacgatgtgaataacaagtagtataagaaaagagaggaggaaactatactaacacaatgtcccaaagatcatcatgataagcaggacaagatgtcgatgggatttgagatatatgcatgactgagcaccaagacaagaagaggacgagtacacaattgaaggaaaggaaagagaagatccgtttttggggatcgattttgttcaagcctctgcatttttttaatatcttgaggaatttgcggcgtgtaagaaaagattgtgatcggaatttagagggtatgtatatgacagaaatgtatgttttgatcgattgcaagtaaagcagagcgaacgtgggaagatctagattcaactagggatatgttgagtctttttctgttcgtgtgactcccacttagatttctagtcgctcaggtgcatcaacaggttcgcgaggcatcgcttcgtggccatatcaccctgtgataggcccgaaatcaaaagagtggtcaaacggtgtattacgctgcagaaagtaagaacagaacgcaccttgagaagagcagaaaagctagcatcccgaagaggttccggcaaacacgcacgtagcgcttctcgagctctgcagatgtgtcaaaaatgttttacatgaaccgttaggttgaatgataagacgcgtaaggtttaaaaaaacactcataaaaggggaagaaacaacgtacctcgggttatcactcagcctcaaataacatctcacaacatgtttcaatagtctcacagcctggctttctaccaactggtttaccatgttactaagtactgtcccgaccgcgtaaaatcgctcatatgtctgacagatataagccaacccgaggtcgtctaaaagaatcttctgaacaatgaagattgcgaccgtcttggaaagttcggagccggtctccataattcgaagacagagagggataatttcagtcgagaggaggaagttgatcacatccgagttatcattttgctagataattcgaagaaagcagaggagaaagacacaggataggaatgttcagtttgcctaggtcactgcagcgtaccgggcaacacgtacaaaaaacacaacataccttgaccagggctcctatgactcctaaacttgtcaatcgaaggtactcgaacggtcgagtcttactagtcgtattaagaaaagggtagagaaaaagcggaatgtgggctaacatggttggaagaaccaagatagagtgagtcagtacacgttctcaaaacctttcccaaaagaaaaaaagattaaatcaatcaactgctgtctcaccattgaggaaaagggatctagtctctgcatgcgaggccacgcattgtaagagagcgagggcattgcatacgcggttggacgcgtgggcggagagcgtggcaggaagaaggtaaggatagacttgagtgatctcctgaagaagggccgacatgatacctacatgcggaagtgttgagaggagaggcatagaaaatcagcaaggtaatcttcgtcaattaaaccacgcgatagacctaacatctatgaaagtgtatggaaccaaaaaagaggtgaaaaaggcctagaaacttaccaaacgagtgccaaaggacaagagcgagatcgtcatacatttcccgtttcttactcaactcctggagggccccttctctcatcttcgagtctagtaactctttgatgagctccataatctcaccctcctcgttccctgctccagcttgcaaaagaaacaacttgtgttggctttggcttccgctccctccaccttggctggttaaagcactcggtgaaggtagtaggttgttggatgacatgccattgttcacattgacgagactgttaccagctgggttgaggatggatgtagggatgagagcttgttggtttgaagactgggacaaaggaggcatggacgaccatgcggagcgattcatgcctaattgttgttgttgttgctgctgctgctgctgatgttgctgttgctgttgaggttgttgctgctggtgctgctgttggtgttgttgttgctgacgctgctgatgatgttgctggtgttgctgttgctgttgtcgatgaaggatctccatctgaggatcgggattaagcggcgatggaagaggcacggatcgatcggttcacgcaccagg

SEQ ID NO: 918 - DNA, 13363 bp, Xanthophyllomyces dendrorhous
caccaggtctgctagctatacgtattaatcgacaggcgttgttggaagaagtctcgagtgattgagaagaaggaaagtatatgtagcaaggttggaaattcttaaaggaagaggatcgtctacgaggggttaaaaggaggaagagaggagagagacgaaataactaagagtaagaaaggaccaaagccggagcgacctgaatatttgaatatttgagtattttatctaagtgcaactgaatacgtatgtgcgtacagcatggtgccacttgtgtgtacaccttctccacccagcgacctgcttttatcagatttggctagatgaatgagtgcgcttgcattgtccttgcttagaaaagcttgagatgaagctttatcatgagacgtatagttgtgtggtaagaatcgcgttgaggtctgtggactatgatcactccatcagtgtaaatctccggcaggcagtcggaccctaccggcattaaacggatagatgctactaaactctaaaacgtcctaagcttgaaacccgatggtggaagcatactggtcctcaactttctatatttgttttcttgccaactcaacaatcaacgttcggtcatcttgagaccagcacattaagaactcgagtgcagccaaatcatttcagcccttgtgtaaactatctcggtttcaatctgcctgaacgcagtccatacttctccctctttttgtataccaatcagatcctcagcttgaataatcaccctcggctcggacaaccaccttcagcacataggatccggctttgtatcggacaatcagacaacaatactgttggttagctcttttgtttgttctacttggttgttatcgctttccgagagagagatgtatacagatgggcgccatccgaggagaatagggaagagactccgtttgttgaccgaaagggtattcaacacataagacacttcggatcggtcaacacttatcctatccataagaactgaccaaactcatctgtattctctcctgatctctgtactgacttccgaatatgcctctcttttcgaatagcttcttctacttggattatactcttttcgaccagccctgtctcatacatcggtcgcccgacatatatacctctgcttcacttagaatatgaccacacgctcctcccctgcatcagctccgatcatcatcaaatcgatacctatcttacaaccgtcacgatttacatcctcatatgttcctcctcaatctcctcctaggagtggagaatccagtacaactagctcagagtctcctggagtagattcagaagacccgaggatgcatagggccggaaacaggttcgggaaccacatacaatcgtcatctaggtcgtcgtcagttgattctgtgaacgacatatccaactttctttctcagtctccccgcggcaagaagtccatcttgccatccttccatgctggagttaaagactcgagttctcttcagaacagaacatcgcgtcatttttttggccagcctcaacgctctatgacaacgtccttcaaacacttatcagactcaatatattctggcttggctctgaaccccggattgatcaggaaactcttcaactctgccccattctggctggcagtatacttttgtttcaatttgagcttgacactgttcaacaagattgttctcgttcgctttccgtttccttatgtttgtatttgtccagtcttccttacgtgcctctacaaagacttgcacatccttgactgaatcgagagggtttccatcatcatcagactcttacaggtatacatgcgctcagctgttgtgtagggtgctacatcgctatagaacgacgagcattcgtgagctccttccttgaatatctgaatatacaaccttcacgttcactcacgttcccgaatgcattatctctatgattcctctgaaggtcccggcaaaaactactccttcagacaacctgatcctcatcgggttttccatcctatacaccatcaatatatctgtttcaaatttatctcttcaactcgtaaccgtgcctgtgagtatttctttactgcagtcttgaaactagcgcgcaccctcttagtcaatggctgtttctattctttcctatctttttgctcatctcgatagttccatcaagttgttcgggcggccacgccccttttcaccattatcatctctactttacttctcaaaacaacgtttagcaaatataagatttttagtttgcttcccgtaataatcggtgtaggcctcgcgtaagtttttttctttcgttctttagacgacaactttcaagaatttgatcgaagcatcttaaattggtaattgcggtattctgtagcacatatggagactaccagttagtctgctatctatcagtatctcacaaataaacagcctgattcgggtctcacctgatcttcttctcttctgataggttcacaatatggggtcttacactgaccttgctgggtacattgctcgctgccgtcaagacggtggtgacaaacttgatccaaacaggggtcggaggccggacaaaattacaccctctcgatcttctgatgagaatgagcccgctcgcgttcgttcaatgtgtcatctacggatggctgagtggagagttgggcatagtctggacattcggaacgactgagatgacaaagagtcaggcattagcgcttacggtaaacggaatggtcgctttcgggttgaacatcgtaagctttacggcaaacaagaagacgagcgcgttaacaagtacgtcatctttcacccaataaaatctcttctccaagctagattgtgttcttaccgtttgtcttgtccatgctctcagtgactgtcgccggtacttctctcctttttgttcttatttttatcttcttgtttgcttttgatgagcactacatactcacacaggccatcttctctcttgttttctcacagctaatgttaaacaagtcctcactattgtgctctccatcgtcatatttgatctctccatcaacgtaagttgtttctcggtcagttttatgttccacaaggctgtcatttttaatcatttatcgatataccaactcctgcagcccataaacggactagggattttcctaacactatgcggaggaggagcctatgcctagtgagtttcacactatctagatacatcatgcctcggacgtgtcgccgactttcttgttttgatgcttcgtgtattcttccaacagtattgaacaccaggaaaaagccaaagtcaagaggaagttgcgatttagatagtcataaagatatagacatgcacgtaatcaactagtatcagctagtatggttcactctcttgagaataaccttttcaactcattctcgtgctattgggactgttctcatgcttaccatgtatcacgaagtcttccagtttttgaactaatgatcattaaggttgcccggcttgacccatgaggttttgtcttgtgtccttatctggactggcctgaggaattatgttgggtcggacttgcttctgctcgacacaagcagatggatcaacatattttcctgtctcaatcaaatcatatgttttcagtcgtgacagcttctcctctctaactctggcctttcaaccgtcaccttcgtatcaaagaggaaagaacatgtccaccgtatattctgacaccttcgcttcgttctcttcaatcacccgaccatcgactgctcaatctagtcgacgaggatctacgccggcaaaaaactgggcgagagcatcagtatccaataaaatcgtcgttgacgacgatgagagtaggtgggtagtggctatcatcgaaggaaaaggcaagtctgtcttctcagggagttttttctacctgttcgcttattcggccatttcgatctgtcatgataaccatcaaactctctttgtgcattgtcataaaaataaaatgaaaacccaccaagtaggggtaggaagagaaatcggaatcgccggtacactacttttcttcttcaagacaggatacgatcagcaactgctaacttcgatattgggtttgcacctttctacatacggatatctttgtagcttatgaccagctgacaggaatgattgccctcactcaagtactctccatttttcaatcgttatatgcgcgcatatacctactcaactcattttcatattgactttgtcgttatttaaagatatctgattctctctcgtttgtcaagacatcccatcacctctcgcttcatgttcctaccgtcattttggtcaccgataccgcttatccgactcctgatcaattcatacctcgagggaagacgtcatcgaagaaacagccagctcagaccaccctgcttgttcaaacactgagagatcaatgggtagatactcaaatcgtacccttggcgagaaagtactggaatgacgaggtcggcaaagatttcatctcacgactcatcattgatgtacgtatctgttccggttatatgaatctcgaattctataatctgatgatcaagacccttaccaatgttatggaaaatgaacaacacaggacgaatctcgaccggcaatgcatgtagcaatggacggcaagtaggtttgatgatgtcttcaccgtccttaagcgcatatactggctcatcgaacttggttcgcttctctagatatcttgcgctatgtgcatcatctgctctgttcaagtttcttcagacctcgatgtctctcgaatttgctcctggaagtttaaaattcgaatggaaagcgtccgaaggtgagtcagatgttcgagcttacatacgatatagtgatcgctgtgtagcttacagtcagtcatatctcggtctgaatcataaggaacaatgtagtgcgtcaggctttatcaaagcaatgggtttcatactcctctcctgatccagattctctcatcgaccaacagtatcgatcctgaaacagcgcgcgatttagagctggtcaataacagagccagcacaaagtctcctatgagtctcttcggtgagcaaagaaagcgtatcctttatagtgactgtgtcaagaattattgatgtgctccttatgatattcaacatacaaggggtactgaatcggacgcatacacccatggcgtcaagactcctccgttcgaatattcttcagcctattcaggtggttaatatcctaaataaacggttggacgctgtcgaaggtatgcagcgattctgaagatagagctctcgaaaggtccctaaaatattctacaatttataactagaacttatttctgaccgagagcgttttgagcgagtcaagaaagctctaaaacctatgactaatgtacgtatttgaattaagtctcttggccatgtacaatcgtgtctaattgagaattatggcataaacagatcgatctcgacaagctcattgcagtcgtatgtaagctcacatacacaaatcccgaacgttcattgttattgacacgggctttctgttcagctcactcaccaagataacaagaccgatgtgcgcagttcagatttgacttgtaactctactaatcacataaacatgtgcaaatgcgaaagatcactgaaaatgctcggcctctaacgaacataggtaactcgagcagagaggcgtgtcactcagatcctcaccctaagggtcgctgtgcgctcacttatagcagtttgtgatgctgttaagggatgtagaagcgaccttctgagcaagattcatatggtatggatcttttcttggctgaacatacacagtcgttccgttgctgacagtgtgaatgaatccgctgtcaccagattctgtctgatgatagacttagggccattgaggctgtcatatctgacagactggaggatgattttggggtcgtggagcgtaagagaggaagtctttcgatgaggttggtattgtttcaaccttaatccaagttaatttgattatcgttacgctaaatgtgcctcgcgttcccttagaaatgccaaaatatatgcggtcaaggctaatcataataggcttctggacgtagctcgtgagacgtaagttcttattcctttgatgagaagttcagactatagtgccgaatatggacctaacaatatatatatcgcaatagctacaaagaggttaattgtctccattcataccagaagagattctcaacagaacatcattcatatagtctttgctacttccagaacgtacacgacattctagaacttgttcgagggtatcaaggttagtgtgtactcttcgagaaactgagcatcacgctgagttcgagatcgatattatgctactcagaggtgcatgatatgccctcacttacagttgctttccaagagagcggaatgaccatgtcattcgacgtggacgatgtaccgtcagacgggcttccaccaatttttaaaaatgtgaacaagaagaacaggaacaagttggtccagtctatttcctcgataattcaatttgaggctgcatatctgactataccttgacgttagattcatctgtaccaccttggaattggtgattggcccaatgtctagacatgatgctaaaccaaatcttgactgacatctttgatatattctcgttctggactcttaagaagaagcgccaacagcgtaagactaagacatccaattctttccttctccatctgttgaactgacaatttctgaagtattgtataattcgcaggttacactgatacactcaacgagatatttctgctgagtgacacgttcgtttatcccttttggagggtagagtcgctgactgataagctgacttcaaggcggtacatctttagcatcattcaggagctggttcaacaggtgctatccaatataggtttgtcgtccatgcgctcaggttttaatgaacgagagcagctaaaccaccgtaccttcccaaggcgcactctaccgctcttctgaagctgtaagccgacgccgcttttcttcacgaaaaaaaaaacaaagctgatgtttacattctgtttaagattgcgatgctcgacttgttctgggtgagtcaggtgtcttgtgaactcatgctcagatgtactgaaacagcctctgttatatgttttggtagagcttttcacatgttgcctcagcattgaactaccagaggcccgagttcaccaaaacaatggcaataaaagggggtcgacatccaatacttgacaaatttaccccttctggtccagttgtgtcaaatgatgtttatgctagcgatacctctaatttccaaattattcaaggacctaagtgagcattatcttttttttattaatcaacaatgcatgcttgaaaaattgaatggttctcctcatgaatatagcatgtcgggttcgtggagtttcaatcgattcaaatccgcgcttctagtctaatcatttccgatctaatggtttaggcaaaacaacgtacatctgttcgatcgggcttttggtaggatatctctctatcgatatagcgtatgatggatcaatctccttatatgccgtatgctcttcagactgttcaagctatgataggttcatacgtctcggcagagtatgcttctttcacactcaacgacgcactccttgctcgtctctcaaatgatgatgatatgtcagagtaagtctcttcattatgaccccttcctctctctttctgagctactttgacccattgtgaattgttaatggtattatatcgatttagatcactttcaacctttgctgtagagatggttagtagtgatacgtctgaccatcaggtcaagacaaacttactcatcttgattatacaatcagcgcacgactggcggaatcttatcactggcgaccagcaagagcttagtcttgatcgatgagctaggacgcgggtatgtattcagagaaattgctccttcgatagaaacttcttctaaatccttcatttattaacagaacatcaactgttgaaggaactgcaatatcacatagcatcgctgaagagctcatcaaatctaaagtcagtcgaataacgtgatgttccacccataaaatctaatttctttggtcaagccaatatctcttgctgatcaagactgtttcatccaggcatgtgtcttcttctcgactcacttcagagatcttagtatgttcaatttacacgttgtatgttaaggcatccgaaatcctccacgattccgattgaactcaagcgcgtcagtatacactatgtatccttcaattgtggcctaggtctcacactttcaggcttcccctctgttcagaagtgagtgttttatgaacgcgactgatacagccatgtgaactgacctgtgaacggcccgtatagtcttcatcttcaagcacaagttcgccctcttactgcttatcttttggttcctcagatatcaagcctctaataatacctgctggatctgcatcttcagatgcacaggaaagggcccttggcgatctctttcaattacagatgccttcaaggaacatcagaagaagaacattatggattgaacgttgctcatctagcatctttgcctgcagacgtattgaggttggtcctgaattctcacaataccccttagtaaatgtaccgccaatactgaaatatgttctgttgatatatgaaacagtgttgcgactggtagtagatctcaatctgttcgagcctcgtcgaacattgccacctgacatgaatgcctttgtatattgtttcaaactagacattgcttctaggctaggaagtatggaacaagaaggcagagctgcctctcgatctaacaaggtcaatattcgccggaaggccatcttttctatacgggaaaagataagacatgcagtcagtagtgagcttgatgtaaatgaacaagcagactacctcaaatttctccagatggaggccgttaatgagttgatgggcgcaaagtagtttcagttttacctagaaattcttctctgtttactctttttttcacagttctctacattttatgtctatcttcatgctcttcgcgtctctcgtagagaattttctagacagcatttatccagacgcgtgtgatagttaatctcattctaatgaaacagaaaaatataaacacacaaatgagtgcgaaagaaaatagaaatatgttcgtatacggaggcgtgaagtttctaggttccgggtaaacacgaatgctgtcagtgtctgtcaggcaattacatagagatgaaggaaaaaacccgactaactatttctcaaagtgaagggtccaagttgaaagaagttttctgttcataacctgattgggttggagtctaagaaagaaaagagaggggagggttatcacggacgcaagacaaggtcagaaaagtcacatgcaaggccaaacaggaaaagaaccaacccagtagacccgtaggtgaacggagaaaggaatccaaacattcccacaacagccaaactcaaaattcccaagaccaccgccgctctctttgttatcactgccctcaaccttggtcttaatctagtcgtagttcctgccaccgagactgggtaattgatcgtctcggtcaagatgaagttgaggatcgaaccagcaacgagggcagacgatagatgggcgggaaggtaatgatgtatgaagagttgacgggacatcatgtaaaaggggaagtaatggaacatccaagaaacgaggaaaaacccagtgttgttgtacagcctgtttcgaagatctatacatgacaaccaccatggcgagacttgatgagtacacggaacagaggaaaagagatgagaacagagaaacttacgatcctcgatcggttggatacctctcctcctagctagcgcatctgctcccacaatacccacaaagacgctcaagccaagcacgcaaatccaccaaccgagcaagtttccgatagcatacacctgttggttgtccacattatccgtccagaaactaattccggacaaatcgaatggccagtcaatgggttgagaagcatatggatgatcggccgttagaccggcattgtgttgaagcatgagcacttgaagctcaaagaacttcttgaagaagttcatcgggacgaccttcttcacctctttctcgcccgttcggttagcaactaagcctaattttttaaagtaccatccgataaacattgtcagattgctgtaagtcgatgaagggttggacgaagagaaagagggacaacgtactttcatctgaaatgatttcatccgcaaaccatgttgaacttctttcctgatgagccttgtttccgttgatctcctgctgcttgtacccccaatcaggtagagttcccaatccggtccacatcttgacacttgtcggaacgtgaaccaactgaaaccacccgctctttgttttccatggttctccctcgaagccctcgacaaggacaacttcaaacagggtgtcattatatctagaattgatgtcggccttaggccaagtcgtgaattcttgattggtcgtcgttaagggtgaagcgacgtcatgagtaagcaggtaagaatccgtcatggggtgatacaattgaataatgtccttgtgccgacagattcgaccgcggccgctgtcaggaatatcatgagtggggataatttgccaattgttgttggtatcattgaagggatacccagtaacctgttgacctgtcatggggagagatgtgatgaaaacaactttttacagatgagaacagctgaactcgggcaaccgaggaagcaaaatatatgatgacatgccttgactcgatattcgaccatcatcatatcgaagagggtaacggtcaacatgtgaatgaagaaacatgttggtttccttgtgtcggatagtgatcgtgtctaaatatctaagttctattttttccaatagagtacggccaagaaaaagaagtttgtaagaacagagggttgagtcaagacagatagcgttatgttgattagcgagacaatgtatttaccctgtgagttcatcaacaattcgtttcccatcaaagtctcttggaaagcggcactcatgaaggtatcaccggtaccagtacggttgagaattttgaagtgaagccagaagaaagataggtaaactccaaaggggaccacaataagacagatggttcgagccaagaagtgttttgagaaatgttcctttgagaagaaggaaaaaagattgtcggatcaaaatcatttctgaacattcagtcgtatatgggcataaacctaccatcgtaagaggatgtgatctcttgatatctaacagtccccataggtcccaaacgactgccgttccgatcgtgcagaatgtcaataatccaaccattttgcatccaagagtgcaagccaggaaaaatccagtggaagacagccaggcccaccaggctgttgagaaaggccggtagcgaagctggtggaacttgatgtaggaaagtagagagagtgacatgaacaaaatgagcgcgccgtccaaaaggatgagcctagtctcaacgacgtgtaagttgtctagggaaggaaacgtgcaagaaccagaattgagcctcaactgagaccattacattgcgatgaaagcgtcattaaagaaagcgtaccgaatagaatcaacccagctgaaaaagcagagatagcaaccgggtagccgctctccctcatgatccagtaaaccactcccacagtcaaacttccaaaaacggcgggcatgcttctcattcctttgaaaggaacgttaaggcctgctgccgggtcgacgtacttgtctccgatattttcgaaatcaaataggccgtcaaaccctgaaagataaccagctagaccgagcagcatcttggacaacggtgggtgaacatcaaagtagtattctcgaagtatataatacgaagcgaactaaaaagtcggaatgaggcaagtgtcagcgtttggtttgcaaggcagttgcgaagcgacctgtcatcatgcgagaaaacggtgttgcagacatacttttccaaaatgcacttcgtcgaatctacgaagcgagatgatggatgcatccccagtatatcgatcatgtatgttagcatagaggatcagtcttcgagaaatccgttccaggaatatgatagcaataatactcacacaacaccatcagggaagccaataccccagaaacgaacgatggcggccaacgcgaccagcagacctcccgttgtccaagaccagagtgtttccttctttttccaatatggctttctagcctcttcagaatctttcttgagtgcaagagcatcgtaagagctccttgaataatccacgtttgtctgaggaagagactatttgtttgccagatggttgatcagattggatggggaggacaagcaaattgaaaggtaaacgaactgtgttttgagaacgagaagaaactggatagagaggaatctgttcacaatcctccttgggattcacagccctccttcgaggagcctgggacatatgaacgatagaaagaacggggaaggggcaagagagagagctaggtgatggaacgagggagggacaagggcgagatcaatccatacgagaaaaagctagatcaggcggcgcgggcgaatcaaggcaaaagcttatcttgcaatgcgatataagatacaactcgtcattattgatttgtgtttatggctcttgttttgttcattcatccattcctgttcagctcaacaccatccaatcactctcatcatgtcgcagccataccgctcatccatggccaagccaaatcaaacaaattcaacccctcgtatacgtcatctcgcagccctcgttggatctctcaagactcttcagtattctcttgttgagacagaagaacagatggtcaagttgaagagactgactttggccatgcagactttgagtggtggacaggctgctcagtatgttctattgatctcagtctcttgatcaaggcttttcacagcatgatgaagatgatagatgaggctaataggtctctctgatgtctttggtctcctttctgaatggtgttttttgctgttactgcttctgtcgttatcatcatgggtgtgcgtagattcatggcaacctcccaggtagttggaaaagaactggacgatctcggaagaatggaagaacaaacttcacatcaccgcgagacatcttgttcaaccccagcagcatacccgacggaagtaggggatgatagtctggtttcaaatggtctatgaacccagttatcgagcatatagaggataatatctttgtctcgtagttcgatagttctttgttatttcatatgtataatataatga

SEQ ID NO: 919 - DNA, 20610 bp, Xanthophyllomyces dendrorhous
gtataatataatgatcatttcttagtaatcttcttccattataagaataatttgatctgttcttcacaacttgatatcgttatgtttacttagaaagacagttcactaaatatgaataacgagtaccatctaagaaattgaagagagtgacatcgacaagaatgaaaaaaaagctcaagctctatctttcttcttcttcttcctttccctgttctctccatccccaccacgttgctttccttctcgtttggtcatcacccgctggagtgttcgcttggtctctccatcaggaaaaccgttgagatcgtagtactgaggcgcaaactcgaggagccattcaggtcggatctcggtgaccgttcggatgaactgtattaattcaaacaaattgtacaacccaaacgaaagcccattagctttgaatttttaactattgtcctcataaggaaaccgaaggcaagaaaatagaactcttacgttagcagtggttaatacaaattcgttgaaaacaacccactcaggggaagtctccaatccagaccccttgtgaagttggacaatctacacgaaaccaacagaaaactggtgaaccccaacgaccatttacatgtacgcacgaaatcaaactatgtataacttacttggttgtctttcaccgttagatactgtcctttgcttccctccttgtgggcgacctgcataaagaatccagcggtcaaagcctttcggatattgacgtaatagttcttgtcatcaaacggcacagacaccaagtcgagatcaaatcgctccatcgatcgtttcagctggtttcggacattgtcggcctgctgtaaagctcgctgggagaggaaattattccaagcccaattcttgtcgtgttcgttggatttgtaggcgtgatagacatttaagagggtaatatgatccccatctgggtgaacaaactgagccttggcagcatcagcctccctccgagcgtttagcggtcttaagaacacgttgggcactgtttttggaattaaaagagggatgtttgtttgaactcattgggatcaacaaaaagaaagaagaagatgactatgagagagcagagtagtggaacataccagaaagcatggctgttaaactgagcatctcattactgcacctcaactcgggagagacgatgagcatctttgccagttgtggatctaacgggaactcggccatgatagctcccagaggtgtcatatctccttcatcgtccaaagcgccaatgtagttgagcagctcgagagctcgcatgatcgtttccggagcgggagcatccatataatcgctggagaaatagagtagaacgacgtccaagtatgcatttagattttctatgcatacttcgaaacaaagaagatacacgtgaaacttacaagtgaaccaaatccttgatgccaagcttgacaagctccaagaccgtgtttgcgagattacttctaagaatctctgggtgagtctgctcctccagctcgttgataaagtccttctcagtgtacagtctgaagcactttcctggtctcgttcgacctgctcgtcccgctctctgttgagcacttgcctttgagattggagaaacgagcaaactctcgaccctaattctcggattgtatactttttgcttgaagaaaccagggtcgaccacatacacaattccgtcgattgtcaacgacgtctcggcgatgttggtcgagataacaacttttcgaccaggcgcgccaccaggcacagttgccggcggagccggatcgaaaattcgttgttgctgttgcggaggcaacgaagagtagaggggaacaacgagtattggaccgacagcacctccagatgatttcgccaactcatctccttctgacttgatttttcgacaagaatcctcgatttcctcctcaccagtcaagaagagtagaatatctcccgggtcttccgcctgatggatcatcaacaccgttcggatcgcagcttcgacgtagttcgtttccggctcttgagtgtagaatgtctcgacggggaaagttcgtccagaaactttgagcagtggcgccttgccagcgtcggttccgtctccgaagtacttctggaacttgagtgagtcaagggtggcagacatgatgatgatcttaagatcttttcgacgagtggcgatctatgatgcaggaggagagtgcggttgacatagaaaaggattggcatctggtatgagaacgggtgtatctgagagaagatatgacggcaaaactgacctctttaagcagacccatcagaatatcagtagagagcgtcctttcgtgagcctcgtccaaaatgatggtagagtatctcgacaaggtgttatcgttcatagcttccctaagaagcataccatcagtcatgtacttgagaaaagtattgggagatgtcatgtcttcaaatcggatagaatatccgacctcctggccaagtgaaactgcatagacaagaaaagttgttaggagaacgaaaggttaaccatagaagcgttgacggaaactgaccatccatctcgtccgccacacgctttgctacactcatagcagccactcgacgcggctgagtacaggccaccattttccccttcaactgaggaaggtcagagtaggcaacaaattggggaatcctgaaatcatattaacaatgaatgtaagaacaaggcggtcgggaacaacttaaactttactccgagcaaaattgtacactcactgagtagtctttcctgatccggtctctccaaccatgaccagaatctggttgttgttgaactgaattgatttgcacacccacaaattgatgatacagagacataagcacgtgtcgctaaatgtggaaagcgtttaactaagccttcagacataccagatcatagaactgctccatcttctcgtaaactggaagttttttcctggactccaagatcttttggtacgaggtcgagaaagatttcttggtaaaagggttgatttctccatcctggttgattgaaacaaccatgatgtgttcgattgaatcggactcgatcagcagcagactcgacgcgaacagatgcctaaccggctacaagttttacctaccatgagtcttcgagcgattttgacatcggtttttccaggaacgactccgttcaaggggtcgctagccccactctatcgctcaaacagatcagtacaagaaaagagtatcagcaaacctcttgtgaagatcggtggtgctaataaactttcgcacttgaggagcccattcgaactgagaatagagcgagaactcactaggtaaggattaaatgttccagacatatcaaacgagccgaaaaagaacacgtcctagtcaagcaaaagagagtgaaagagagaagaacagtcgaaagctcttcaaggatggatggacctcggaaggatgtgttctattgtggtgagcagaagtaaatcctgaaattcttatcgaaccgtggttaccgtgccatgaaatatatgtaaccaaaaatcatagaatgatgagctagtatcttgggaagcaaaaaacaacttaacacatattcgatcatgagaatttccataattgtcattgcagaaaagaacaatagtatatttatatcctgcgccatcaagtatgaaattgataggtctacgtgaagatggttccatggtttcctgggggaaaaacaagaaaaaaatacatttgacactcttgtttccttattctcatccctttttgaatctaatcgcatgatgatatttacagtgcccacttctcgagcactttttgctcaactccttcacccatccacttgtacatccctccagctagctccaagttctcagcttcctgtttgaagaacttattgaagtctcctgttggaggagctccacctgcagggagggcgcctgcaacttgggcgagatttacggtggatcggggatctacgatttgagccgacggatcgtggagtatgtaccggaaaagtccgttcaaacctataatgggatgtatgtttgtaagaatacaagaggtcaagataattgttagcagagattgagcagaagtgaaacttatgacagagtgatacgtaccaaaccaattgagaaaataccacgagagggcggaaacccatctgacatctacgatccatacatcacacgatcaagtcaatatataataacaaaactggtatcgacaaatagatagacaattacatacccatatcaggggcagcgatatctctttgaagcatggacttaaatccgtgtgtaagggggaagggcaatttgacttttggattaagaataaggaacatggtcctgtatgttaactctgtgcgagaaacgccgggaataaaagtatctgccatacgaatgaatactcactgagaagaaatccggagaagaaaaagttgatctaacaaacgacgaggcggcaaagaaaacgaattaagttgttatctttgaagctcaacgaaaattgatataataaaagtctaaactcacccatcccatgatcgcaaagttgggtaccatcattactgcctgcttcttcatgttctccatcatgccatccatcgcgccagggtcggtcaaggggttgggcggcgcgccggcggactggtcctcaatcacatttccgttctcgtcacgcttcaaaggagtcttgagaaaatctccgttctggaaaccttctgttaatcgagcggatagtgcctggaaagaggagggaggcaacggtgagaatgtcgaggtggtacgaagaatttgtgattgattcagagctcgtctaaatgagtacacacatgttagagagttagaagacttgattgatgaaatgtacgctgtagccgcagtgatatagaacatatgagagattgacgacgaactgttcgcgaaccgctgcttcgggttgctttttgggggatccatcaagaagttgtgtcacgtagattcggagaagtcctacaaggatctgtcaagtttgaaggcggaccttttcagtgtctgcacacgctgatgttgccgatgacttccggtatagaactgatcagaccaaacgactcaccatcctgaagatcacatcagggagtcaagcagtaccgagaagattggtaagtccaaatcctgacacgaccacgaagtatgggacgtaaacttacaccaaagtgattggaaacaaaacccaatcctttttcgtatattggatataacgtcagcagacgtatttgagggattctaagttaatttcaggactaactcttatctgaggatccaaatacaggttaggagcaggcatttttcagaatatgtctctctcagagagaagatgtttgtagatggttgagaggtcaactcggacgaactgcaacgcgggtgaatatgctaaggtggttacggtagaggattatcagcacggcgggatcacgtgagatgtgaactcaacccagctaattactctcttttctgctctccttttttcttcttttttttcctaagagattcgacgtttctccttcaatcaaacaccaaccgctcatctatacactcaagatggattcctatcaaactccccttagctcgtaagtgttccatcattttgattgaatgcgtttataatgatgcatgtcttaagaaggttgatgaaaattcttcgatggacgagtacagtcgatatgcctcggccgaaatgtcgagccttttctccaactctgtatgtcaaattattaatcaaatgtcatgtatatcatgtacttcttcggattttgatatctcaacccatctaaacgtctgttatgttaaataattccttgaacttcaacagacgcggtttggaacatggcgaaaggtttgtaccagaatatctgcctgacgcggctcacatgtcgacacgtttccctaatccaaacccgactctatgaaccttacgtatcgcaacgaatagctctggctcaacctagccattgctgagaaagagcttggactccctatctccgacgatgccattgagcagatgaagaacaaccttgtgagaaaacgattctgtagaactatctcggtttctctactttcgtcacggttttaatgactcgatatcaaacacgttctttctctgatcgtgtccaattcagacgcttgatgctgaacagttcaagcttgctgctgaggaagagaagaagaggaggcacgatgtcatgtatgttctttgaatctgctgttcaggaaagcatgtctctaatactccgcgatgcatatccagggcccacgtccacaccttcggtttggtcgctcccgccgccgctggtattatccagtaagtaaacgttcttgatactgctggtaaatccaactgaatggctgattcattctgcattgtctttagtcttggagctacctcttgctacgtcactgagtgagtatgccttcttctaaccgagattcaagccatgcgctcacgttttgatctgatgcttgtgcgcgctttgcctccacctacatttacagcaacgctgatcttatcttcctccgagatggactcactcttgttatcaacaagcttgccgtcgttatttcacgattggctgactttgccgagcagtacaaggctctgcctactcttggattcacccacttccagcctgctcagcttaccactgttggtaagcgagccaccctctggcttcaagtaagctttcatttttcctaatatcggtaggcgtcagctcgaacgtctatcttatatcgctttgttttgttctgccttgtttgcgtcaaatttttgtaggagcttctttgggatctccgaaacttgacccgagctcgagccgatctcggtttccgaggagtcaagggaactaccggaacccaagcttctttcttggccttgttcgatggagaccacgctaaggttgaggctcttgacaagcgagttaccgaactcctcggctttccttacgcctacccggttactggtcagacctactcgaggaagattgattgcgatgtgttgagccctatggccagtttcggatcgaccgcccataagatcgccactgacagtcagtatatcattccacggctgcctcaacgagttgtttttgctatatcaaacttcccatttatcaataccgttactcttctctgcgcttcccaaatcaagtccgacttcttgctaacttgaaggagattgaggagccttttgagaaggaccagattggaaggtgagattttgcatttctttattacgctggtggggtggaaactgatgctttcctctttcttttggcacgtatttaatagttccgctatggcttacaagcgagtgagttggcgagctttacagctattcaaactgttatattctcgctgaaatacgctttgttctgcgttttccttgttctcagaacccgatgcgatgcgagcgagtgtgctcccttgctcgacaccttatggttcttccccagaatgctctcatgaccaacagtgttcaatggtttgagcggactctcgatgacagtgccaacagacgtgtctccatccccgaagctttccttactaccgatatcgttctctccacccttcagaacatcatggagggtttggtcgtctaccccaaggttattggccgacgaatttctcaggagcttcctttcatgtatgtctctgtgctctttcgttatacgaatccttttatttgctctgaaatctgatcttgcttttgtgttgacttccagggctactgaaaacatcattatggccgtcgttaaggctggcggagatcgacaggaggttcacgagaagatccgagttctctctcaccaggctggtcgagtcgtcaaggaggagggaggagacaacgatttgatcgagcgaatcaagaaggacgatttcttcaagggtatcctgcctatcctcgatgagctgtacgtgaaaccggcatctctgttccatcatcttcggcttgatgccgagtttttgttcctagtgtgcgggtatgtttacaatcctgaccttgtaatggtttccaaactctgtcctctccagcttggacccgaagagtttcgtcgggcgagcgcccgagcaggtcgattctttcctcaaggaatgggtcacgcctgctttggcgcccttccaggatgccatcaagggagccaagggagtacagctttcggtttgagaagggaggaagagaagagcaagaggaatgaagatgattatgaggttttcggcacgtttgtagatgaaattgtgatacatagtttgccaaggcgatgcacatgccgtaggatatcgtgtggtcggagaagaatgcccgaagagatgttgtcgaagacggaacaaagtactgtgtttgagatgaatcgcagtgtaattagatgaaaggctcaaaatcattacgtcattttcacgtgtagatttcttggcgaaacagctagatgccgaactgccggacaagaatagaggccagtccggcaagttccgttctgtttttccgtgtatatcagccaaagccgatcctatcgccacttgatctttcgtccgcatcgatatcgaaatcacacaacctcatccaccttgatatcagcaacctcaaagaaaacagattaacaatgtctaacgctttcgattccaagcttgctacaaccgacatgaacacccatcttagagcaactcgcagctcaagcgaagatgaggctcaaagatttgtagctgatgattctcctcctcacggtggatcaagagcaaagcaggcggttattgttagttttgtccaattcttgacggctttgaatcgaccgatggtttgcctgatgcgcttgttcgttcttctcttgactcgttctcgttcgatcgtcctggatggttagcctccccagcaaggcttgattgtagttcagcctctgaagaaatgtgagtggtccggtttccagttgaggcctgtactctagtctcgatgattctctgatcacttcctgtcacttccgatttatcagccgagatgcaaccctcatatggtctgtggcttactccgcgtttagatcttctgaattggttctcaattttcaatttgtttctgcgcgatacacatccttgcatactatagctcaggacttgggagctgagaacatcagtcacggagtatatggatcgttcactcatggcttgggaatatgcatgggtttacttggttcgtgctagtcttctctatctgagctctgtcgggaaactatgctcaaagtttgtaaacgtccgttcctcattaggtgctatcccttgctgccctcttcctaatccctacaagagcgtgccccagggacaggtcggacttgtcagcgtgagtattgctctcaatcagttgattttcgcgaaagactaaatgctgagaatttctgccgcatgatattgttcatatagcgattcggatccttcttcaaagctgttgatcctggtttggtcaagtaagttatctggatcgctcatacttcttcctttggtgattggcgcttatacagtctatcttggtcttagtgtaaatgtctgtaccgaaagtatcaagactgttgacgtgcgaatccgaatggacgggatccctcgacagacggtcatgaccaaagagtatgtgtcccatattgagcgtcaaacctcttatacgttgtactgatttaactcacaatcaccccctcttcaagtaatgtttctgtgggactcgactcagtaatttgctggcacatcatctcgccttgttcgttccctcaacttctaccaccagacaccatccgagacttaccaattttcgacttgcatacttgcaacaatagaccaagctacttatggaatcgccgatgtaagggagaccctcatcgagcgagcgcaaactaccttgcgacacgttattggagctcgaactcttcaatccgtcgtcactgaaagagaggctatcgcgaatgagtgggtcctcgtttttggtatatcttctgcaacttccgcaacctagctgaatttttctctggttttcaatcttgtgcaggattgctgaaattgttgaggctgtatgtctttgtttctttgtaaccgtctcctattcacatatcccctctaacttgatgatcactttttcgtcttcatctagcctgctcgaaactggggtgtgactgtcgagtctatcctgatcaaggatattgtattctcccaagagctgcagcagtcgctttcttctgctgctcaggctaagagagtaggagagagtaaggtcattgctgctcgagccgaggttgatagtgctcgacttatgcgagaggtctgtgttctcctatctttgagattgttttattcaatgacctcgtttcaagatggttttattgactcatgctcatgttttcttgttgcgaactaggccgctgatattctcgcctcgccagccgctatgtcgatccgaacgcttgaggctcttcagaatatggcaaagacctccaattccaaggtcatctttggtaggtcttatcgttttttcttttatattttctagttcgaggcctaatttgatttgatttgaattgtgttttcttcctcgcgcacataattcaacagttcctatgaaccttcccaacatgggctcttccgctcctgggtctgcagcgggtaacgagaacttgaatactcagtctggaccttcattccaggctattgctgagcatgcagatgagggtcacgagtttatcggtgccagatcgtctgttggtcaggccggtttgctcaatactacttcacagatctaaactgcacagtcgatctggatcagccaggtgaatgcctaggctccgatatgtctgtttgggcttgttgtcctactttattccgttttaattcttcctggatgtcctttcagttaatggtctttctattcaattctaggttttgtctaagtgtgaatgtccttcaaagttttcgtttttgtccgtgtttgaactagtatcggttgttattggaattattatttttgttagcttttaatcgaatttgtaattttacagtttgtctgtacaaatggataaccaatatgacctcataatctcggtgttaggctcgcaatctacaatcctatttcaacaagactagcgcaaaacagaaagacccttttgttctacagtaacgacatccggtcaaagatacggaagggattatctcatacgaaagagagacagagaaagaggtctgaaggcggcgcaaggggaggaagaagaagagagacggttatctgatcatcggtctgtgccataaactaccctcgtccaatcacctaatacttctacccctccttttcttccaaaactacttttccattctgcctctgctttcacctcgtcataatcatcctcgtcctcactctcgatccgatcttcgtcacctctatctcttttcaacaaaccggcctctttccaaatctttcgacgtccttcccgaccctcatcccacttttctcttcctatttcccttttagcagaaattttcaaacagcctgtcagactaccgcctatccaagccaagagtgacggtgagaaatcgggtgatgagatcatatgttgcgctggggttgagtctagagcgaccgatgtttggagtatcgctgacgatgacgacgacgatgatgatactagacttgcgttgttaatgatagagatatgttgacgaagggagattaccgatgcatatggatgcattggcctacgaatatatgcatatgatccgggacgagagttcggttgagactcggtcagagatgaggggttgattgacggtggtggttcgagagcggcaagtagggtcgatcgtaaacgagggatgaaattcggaagcatgggtgttccacctgtgagaaggatggaagatgccatagggattcgaaggtctattggaagctgtaacaattaaatagccattgtcaaaatgtatgctcaaccgagacaccaagtcttagtatcattcgatgttgtaagactgagagattcaaaggaatggagggagggagaaggactaaccttcattagacactccaagatgacatccaccactcctctctcttcttctacctccccatgattttctcctgtctttctgtatgagaaaagctcctctaccacccgctctctaatccatcccgggattacgagcgtcccacttgctattccctctccgggaagtgttggaatgggcacgaataatgttttgacgttcgagctgtttgcatacctgttgtgtaacatccggagagacctgggcaagggcggaggagcatatccgttgtctgttttttgcccttcaggatcttcttgcggcaatagctcttgggtctctgtgatctcatcggtgtccatccgagaattctcggcctcttcatccaactgtgggtttctgacttcacggtccaaacggcctacaaaacatccctcgctcaatactcgctctagcaagccctttcgtctcagaatcgaaggggtcaatctcagtcttggggtccgaaccatccgggatgagcttccttggctgagagttgagataggtggaatgtattgaccgaaatgaagaagaagtagcgcgagtgttcgtcggatatgggctgaggctagagacgatgaacgcaggtgagtatataaagggcgggatagctgaatctgtcattgtaatcatcaggtttttcgaaatgtgatgggatggcaagtgaactcgcacagaattagttataggatgttgtaattcaaagtagtataggaagttgacgaacaggaagagcgactatctccaagttgcccacgtctattactaaaccagatgtacgtccaactgcgaggagcgctaacaagtgagggggtacgaaagatatcgaagggacctagaatttttattcggtcaaaagaccaatacacgaaaccaaacataagaaactgaatcagatcctaagaagaagaagaagaagagagagaattgacaacaaggggtgtgcgtgtatgcgtgtctgtctaagctttttctcacctggaagtcttcaaacaaacttcgggcgagcatttccttgattcgtgtaggtagaagtggattctccgcaatgatcattcttcgggacttgggatctgtcatcagatgactgaagatctttacaaacatcagtaaagctgaaacgacatctctagatgagaggcttagaaatgctttggaataagcatgatcttgaagaacgtactttgaaaacacttctctgagccggtcacctatccttctctccacaatactttctcccagctctcttaacccctcctcttgtctatttggtgcattatcctgatctcggatctgatgttccacgtcccagtcatcaacctctccaaagcgatccttctttcctacgctctcgaactctacttcccatatcgcctcggttgatgggacctcacccgtaggttgttgtccagaccaaaaacaggctctaggtctgtgttctgccgagaaacctactttccagatccgagagccaggatcaagcacaattcgatcatccgttccgtaaagtgagtgtcgtttgtgatctcggatgtggatttggtaactgggcgacggaacatgagacgttcggaccactatcgggcttgccacaggtgtactgggaccgggtgacattgaattgtacgccaaaatagcaagagatattgtagaaagggaagcccagtagcagcaccagcatcatcagcggcaacgccaacgctaatgtcaacatgtaccggtagtggcttctggatattctaccgttgccatggagaccaagaagaaggccgagggcgtaatgttcggtattcatacatcaacacgcaatgataccggagaagcaatttacattctaatcctatttattttctagcttcgagatgatttatatgctcttctttaggaaaagatctagagtcagtcagtttggctggtggttccaaagaagaagtacacaacccgagtgcgatgtttccataaatcttatacttgtaaaccaagtgagcactcgggcgttgtgctagacgtcatgatggaaaggtgaaggatggttaacgcgtataagccgcgtttgagccgttagggttattatcggctgtgtatcctatgtctcatctctttaggcgggtcgtcacttcatctttaacctatacacgtacaccaacgcatatctatacatcaccatggctaatgcagaatcttcctttcgctcccagctgtcaaactttcgatgggctaactcgatccaggatgatagccaggcggcagcagcacctacagcatcaacttccctctggggatctctcaccagtggtgtctcagcttatgtcccaattcatagtaacgaccgaacgaacgaggaagaagcctactttgcgctcagtcgttgggaacggtcagttccgtgtattatatcatcactcataaaagattttgatatgatggacgctgatcagttgtcaaccgatcatcgctcttagattcatcgcgtttctggcatgcatagccggtggcctgatttgtttcatggtcgcgttctttaccatccctctactcgtgttgaagcctcgaaagtttgccgttgcctttacattggggagttttctgttcatgatgggcttcaccatcctgatgggaccgatggcacatttgaagcatcttctctcaaccgaacgtctacctttcaccaccgcttactttggttccctcggcttgacgctcttctttgctgttggggtacgtctgctttcatctaacctacttcgtttgcgaacatcctctctgaccatctatttttcttttcctttttctcttggtttctctcacccgtactcctctctatcttcttctcgtctctccttatcttccaaacagatgaaatcgtactttggaaccatcatctctgccgtcgtccagctcgttgcacttctatcatacctcgcggcctattgttcgttcctctttttgttcccaccgctctcgtatctatctcttttagaccagatcctgcagagggtaccgtgtgatgcgagtctgacctcgttttgtctgcttatctcaatcggaatacagtcccaggaggtttgaccacccttcggttcggtggtcagatggctcttcgtggagctggcaatgttcttcctttctaagcctttctaagtcttccttttcttttccttctccctatcgtattctttattatcattatcataatccatagcttcttcagtcttcaaaaatgatataaagctctcagcttccattaccaaatacaaaagagacaaggagctccctctctttctataatcaggtcaataagaacaaaacattattcgataaacatgatgcatacgtctaatgtacatgttggcccctctttcccatcacacactcactcccacctctatcttttcctaatttattcagcaaacaagaaccacaaccccccaaagccaactgcgagcaagaccaagacaaccaacccaacgacggcaactccgaactttgcaagatagagctcgacgagctgttcgagatacttgaccattaccttgcctgacagtttagattcaccttccgatcggacgccgaatgagaagggaacttcggcaataccacgagatgggatctgtgctttgacgagtaggtcgagcgcgatcttgaagcctgacgagttaaggttctttgctttgaggaactatatttgtgtgtgtgtgtgcgtgtataagagagggaggcgaagtcagaggggaagcaagggcagcaagagtaataaataaccaagccagcatgatagagagatatagatgaaaataattaggacgtacttcttcttttcgaatcccaaagaacccagacattggatcactcgcgcttgttagaggtagcgccatcatccgcgctcctgaagagataacccgtctgtacatcggccaggaagcgtccatctctactcctttggcatatctcgttccaaggacgaatggctgagcggaagagagtgctgccagcatcgatggaacgtactctggtgggtgctgtaatggaaaggaaaggaaaggaaaggacgggcaaggaaaggtcgttcatatctacacacatatatctgcgtaaacaaaaaccaagaaaaggggacaagtcctgaacaaacctgaagatctgcatccatgcacaacatctttccaccctctgcctctctgaaacctctgacaacggcactgctcaaccctctctcatccgttcggaccaaaattctaacgttgtaaccctctgagcgaagtttatcgatcgtttcgactgagccatcgcgcgagttatcatctacgatcagcacctcagtcgtttcggcatggatcggagagtctggacgagagagcgcggcaaagattcgagtgacaagtggtcggagatttagattctctttgtaagctgggacgacgatggagtgcgtgataggaggttgggacgacatgttttctcaatttgggaagcctgttgcctgattctgtattgaaaacacgtcaaagaagaacagacggtcagcttattacatcaacagagacgatacagaacacatgaaaaaagctgatttcatccccctttgtcgtcttgtttggacccagcactttgctttctttcaatattcctttgcacagtcgcacagtatcaaggtcttttcgcttgcagcaatctctgcgtttccctcacccttgagatgatattccgcttctccggcacaaaccatcgattgttccttcccagaagataacggagaatataaaagtacccacagatatcagtaagacgagaaagaaaaactgcttaaagggggaaagggaacagaggtgggatggtcgaatgcaccaaacaccgattggaatttcgagatcaagagaacgattgaatagtcaccggttactaaccgccgtttcctagtccaaaacaacgcctcttgacaaaaaccaacaatttgcacccacatacataccatggatcaatcttctcatctgtctcaatcaaacacaagccttatcggctcaaccacgaggccggatccgacgaccctagagctagagtcgaccctgctcacgttgtttcagtcgttgacggagatgcaggtcgccgctagttcggtccagcctactaaagagggattggctgccggagctgcgtgcgtttgggtttctttatcttcaaaagataaattttcagctagtgtatagtgatgaaagatcgagatgcttagtatgtgctctgtgtgttcttgtcttgtttcgttggtctcagctcgagaacactcgatagtctcttccagttgtcagagatgaagcctcggatagaggcaaaagttcctatggaagttttggagtatgtttcactctggctcttcaaagtgccctgttcgttccggacaaacgactgatagagagagtgtatgtgaattatagtctaatcgatcaggacaaaaacccacatcagttcactcgaaacaaaattgaagaggctgttggatcgaaccagtattcgcatggtaaacttcaagcgatctcggtgcgtgtctttcgttcctatttcatccctctccttgatttgcttgactgtgattaaagataacaagcctaacgaagagacaatctcaatcgtgttaaaaccttatagtcttatcatagtttgctcgagaaatcgcttcttgaaaactttccggaacttttacaggatgagcaaccgacagccggtcttgccaatgatcatactgagatgaaggtcgaggaaccgatgcggtgacctggcgacgaattgctgtcgaagaaaagaaagaaaaacagggagagccgaaaggaacgtggaggaaagaaaaactcttagtattattgagagagcgacaaataccccaggaataaacgtgggtgactttctggtcccttctagtttcttccctcctgcgtttctttacctctgggtcgctttagaattcgttgggtaacaacatctttcagaataccgattccttatacatattggcgtccaaacttgttttcttgtcggaatcggaaggggaagagagaaggagatcagactggaggacgaggaaagagagagagaaagggggagacgaataaaaatcccatggggtgatcgaacgtgggggactttccggttggaaacgttctttctcgaggtcgtccgacttgccactggtcttttggggacggctgaactcgtgtgacctgatgttggggttttagtaggactgatacggctcccatctcgacttgtctctctctatcctttccccccatctgttttgattcctttcttttataaatctgaattttcgacctgacgattttcagccttcttcttccttgatctcttccttagctatcagcactatatccaacaaagttacagacataaacatacagccatcatacacacagccatgaacacacgatcagctcatctgccgacaccgtctccatctccaaatctctatcccgtggcgacctctcctgtccgcagacggtccacgtgctcacaatacggcaaatctaaccataaccttccacctccctcccctcccgctttatgcctttccaacccgtcgtctcatccatccgttcaatcatccgaccatcctgtcccttctgcgagacaaacctcggcaacatctaaaaagtcgacgagaactcaacgaaagatcaatcactcaatcattgagaagcgtagacgtgtccgaatcaatgactgtctcgaagctctcagatcgctcgtacccggatgggatgaactcaagtcgcttggcgccggcgccaaagagggcgaggacgaggatggctgggttggtgagggaaagggggctggaaaagaattcaagctcgaggtcttgatgaggttcgtgttcacgaatttcttgattgtctctcctgtcacgtgggatcatattgggccaacacgtttctatttatatgcgactcttatttcgactatccgttaggacagtgacatacgttaaacatcttcaggaaagcatcacaagacttgaaaccaagcgcttgagtcgtcaatctatagatcctaacgaaaccgaagaggaactgggtgatgaaaacgagaaggacgaggacgaggatgaggacgaagaggacgaggacgataatactgttgatgaggagaaggaaaagcctgttgtctctacacacatttcaacacccaccaatcctatacccatttcatcttcttttcttccatccattagctcgttgacctctgttccgcccatcaatcgctcagccctctcctacaactcttcagagcaactgccatctcaatctcagttcttcgtccctcctccacccatctcctcttcgttgtctcctccttacttcccgagacccaatgccgtctccctctctccccgatctcaaacccactggaactcgatacaccttccctcggtcaccagaatagaggacccgtccagttctcttccagccatgccgctccatcagcctgctcacatgaatccttgctcacccccaaacctgagtactgcatatggcctagcctccagcccgggcttagggttgtataccagcttggtcaagatcgaagattacgagagcaggggtatgaagcggaagagaatacaggtcgttgaggaggtcgaggccgcttcggcgctcttatcgttttcgaacgtacgcggcgcgtagagttggatctgttctgttttttctattcgctttccttctacacttttcttctctctcttgatcgtccatatctccggcgtttctgggttgctgcctgacttcgataatagactttatagacctctgctctgtgatacataccttttctctgaatcaatcctcctatatcttgccactttcgttgtattattatctttttgttttcactttctagacaacttatcggtctcattcatgttatatctatcattaattcttcggtcgatctacgccttgttcgcttatgtgaatttcatgtcgagcttttctcatctctttatcactgactcgagtataggagacaaagctcatcttgaatcatgttaagctgagagaaactatcattcgagcgaggtatatataaatatagatagacaaagttactatcggttatctggtacaagaatagtaccgggaatgtatgtagaccgtaaacgtatgaggatcgtaatcgtgcgacatgaaacgtagacaaaaatagatattgatgatgaggaagaaagacagaccagaaaaagagaggacacgtgaactacttctattttgagagatcgagacgcataccttccttgctcagttctcaagcattcccatgatgacactgttaacgacagatcgattcatgtacgatccgtttctcagacggtaaactcgtcatcctgctcgtcgtcaaagaatctaattggtgatacagtcgaatgatgtccaagtcaggattccctttactggcaggcaaaaagcgaaaggaaacaaaactggagcagagatatagcagaaagaagaagcttactgatttaaac

SEQ ID NO: 920 - DNA, 7871 bp, Xanthophyllomyces dendrorhous
tgtaaatcgccaaccaactgaccgagcgtcagctcttcggctatcgagcctccgtaggattccaatgagagctgagagccgttgattccaaacaacgtatttggttctgcaaacatactgaaatgcgcttgagactgaacattcccagagaccgtcagcgaaccgaaaaccgccaacatcgacgctctcgccaatctagattgttcctctgctttgggcacacaccacccggtctcgagcggtgtgccaaacacctctccggcaggatccgttagaccgtccatcaccgcgccgaaagtcatgctcattcgaatgacttgagcagcggcaggacctccttggacattgatgggttcagaaagtacctcgagagctgaggcagcaaactcggtgctgagcaaccggagaagcggcatcaaaagctccgctccataaatcgccaagggttccttcgcctctgaagattgaaacacgagcttgagaatcaacatcgttttctctcggatccaatctcgagagttcagacagagaccgagaaggacttcaatcactcggaaaccgttcgttggtaagaaatgttcacggagacacccaactgcttgacggaggaaatcgtctttggttcggaatcgattttttgaaaacgaggtcatgagtctttgaatgctgactttgccttcctgctcagctatcgcgctgatatcatccgccagaccaacaagtgaaggctcaagcgcatcctgatccattccatgaagacaccaaggaagaatggcggtgaatatatgcaaagtacgatcggctaggagagcaagtaggaaacgcgatgatatggcgttagatttgtacttctctcacagagttccataacagggcttaccatcaatatcaagcaagagaggacagtggaccttcgccaagcgagcaaggacgtcaaatgtcatttgatcagtgagagaggatcgaagaccaggaagaagaatagcttgtagcttgagatcatctcctggccagtcatccggttgattttgaagcaaaacgtctacattgtcgtcttcgcatagatccagcttttcaagtatcaagttgaggagttctaaggagaccaagaattcgctctccacggtagttgaaagacacgcagcaacgcaccagaacagctgagggaacgatagaagatcatctgtttccatcgaccggacgatttcggataagctaagaataatctctcgacagaacaagttattgtttggtaggacatcagctagagtgttggataatcgaccgagcatatcggctagcatttgagcagacacttccgggcttaagactcggaagatttggaaggaccggcatgctatatgtcgatcgggacaggcagtgccccaatctaccgccagcgcaccccacacatgccgaagttccggataatatggttctaacaccctcaagacccgctcgacaagtgtttccatccgttttggaacatgcaaagactcgttgtacacatcttcatcaccttgagtccagaacaactcggaccgttcgtcccagagacgaccgatcttatcccaagcgatggtccgaacgttctcatcctcgaggtggacagaatcgcatgtccaggcgtaaaggatctggaacagaagcgcttgagcttgttctctaacttgactagagtgatgatctacttgaacacaggtcgcatgtagaaggacagcaagtcgagggtcgagtgaagattccttgaaccgttcaagcatgacctctccgacaaagagtagagcgagttgaccggtagatagagcagggatggggacagatgtcggaaaaagagcattgaggtctggaacgaacaagttggatggaacaggccatgcctcgtctgcttccggaagagaaaccatcgctgccggctctatgaaacttgccaggtcctcgtagactgcttgagcaatcggagtttgagcaaggcaagcaacgattcgctgagcctgtacgaggaactcttgggttggtcttcgacctgattgctggaagagaaacttgatgatgcaactgctgttgtgaggcaacggaccacaggcaaggttgatccaaatgtcgcggacttcgcttggatggctgtctccaaatttcacagctaagaagagaagattggaaagaagtatgtaactcggaatgctctctggccgagatatcgtttcggacgcggacagatcgagatttttcaagaatggcggtagtatagctaagcatactggacgacgaagggaatctacccgagagaatcggtgagtgcattcgatgagcatgtgaggtgcctctgaaggatgacactcagcgaaagcttccgcaattcgtcgctgcgctcctagatatatgttgggagccgagctaccaactgatggctgaacccaagcaaactcgtgttcgtctttgtttccaagggtctccaccaggttgtaagctcgtcgacggatggccacatccggatgaccaagcttgataagggcaatacacgccttctgagagaaagacagagcaggcggacgagcaaacgataatgtttcgactaatacagagaagaaggattgatgaagtccaaattgatccccttcggagcaacactgatgaagaacctcagtcatgaaagacgaatgttcatggttatgtcgaatcagtgatcgaagtgcttttctgcctcagaggaaaaccccaaaagaatgttgttagataaaagctcgagtctggtagatgactgcttatgtcacttaccgtcctacttcgtgggttacggaagaaggtgtcgagaaaagacctcgtatccattgcaagatatcgttgggctcgagaggaatctccatattggtacgactagagtcggtaagatcagtcacaggaaacaatgatccttgctagaatcataaacaactcgtacaattaacaatcgtaacttgaggacgagaagatcaacgatagttcaactcacacatagggcagccatggctgtcgctgcagcactcgataacagctttgtttgattagacattgttgacaatattgctcctttatcacgatcgctgctagtcagggatccatgaatggctactaatactcttgactctcgagcctgcgcaatatcggcccttcgtcctagattacaccattcgtcacagatcttgaagacagcagcccgtagctcagatgggaagaaccgagatgaatcatccagggtcgccagtccatccgtaagattctcaaccactgcacagaagtatcgtcgaagagggtgaaggttccaattatcttctcgaactaacaggtatcggtgggtccggcggacaaactccaacatggctagcatgagtttcacatcacctaaacttcttgggtccttgatgagatgagagattcgagcaaagacatgagcgacagaagtatacgtccggctactgttttcactctcactggcgcgtcgagcaggagtggatcgaccgttgggctgtgcgttatcgtacacatggcgagtgacactctgaagacttcccagaagatcagccaaactaggctgaggaatatggcccagggcaataacggcagcatccctaaatcggtggctttcggatcctaagtaagagatgacttgttggaagagaaccttggaagaggctagacgttcagattcagcatccctgttcatcgtaccttctgccacagaaagagtaagggctgatgaagacccatcgccactgacggtggtagcgcaaaggatagtaaggaatatcttccattgctcagctagatgataatagtccgatacgccttttgttgttagaggaagatttgatcggaagccagagttaggagctgcagccaaacttgatttagcttggccgttaatcgtggagataattgacctccagttaagaaacacgcgtccaaccaacgtacgcaaaataaggagcgacgatggaacttgttcatagagatgtttaatgaggtgcgggtagtataaaaaccagaattgctgatccgtattgttgtcgctctctgcccacttaattaaaacatccggaggcgtagggtccttgaaagaggctagccgagcttggtccgaaggtgtcggaaaagaagaattcgacatggttgtagtgagaacatcgtgattttttccctccgtctcgaaaagatttatggctcgaataacagattgtccatcagacgatgagagatcctgtatctctgatatcctacgcaaagcagatatagaaagcactcgaagggaccgacatgtcgacgataggaagaacaaggctgagcattcgatctccgccaacacctgagaatcgacagcaacccgattctgctgaggagtaccatgaaggtcgctcacccaaaaggaaagtatgtccacccagagtcgaagcaaacgatcaatctgctgttcgtatgctctcgatccaatctgactggctcgaacaacattatcaccggtggtaaggtatctagaaagcgtaagcgcggcagtttctgctactcccttcgattgagcaatccttttaagagctccagtcgcagagaaggcaacaccaggatcgacatgagcaattcctctacataagatcttgagagctgtgtcggtcccaatgaagagatgactacaccgaggccaagcatcaaacgctgctcgcaagagttcgaatatcggcttaagtgatttcttatatgaaagcttgataaggccgtgctggacggtaaagctgtcgaagccctcagcggatttgaaccggaatgcgtgaaactggtcgtcgaataaagacatctttccgacctctccgtcggctaagagtgcgatgctcccaatcaagggggagagccgatcgaggaaggcagtcacttcgggtttggtcagaaccgtttcagagagagcttctcccgagaaatcatagtctttggagtaggcgaaagaggaaaagctacaagtagatgggaagaccggagttttgacatcatgctccaagcagtatagatggagaagaacagcgcgaatggcaattgccattctctcaggcatcaaaactccatctccaaccttagaagaggaaccaccgtccgacagtcgggattctgccaaaagctggaaaacaaaatcttgaccgtagtcgctctgacgaagaagagtgaaatgaaggatgcatatgaaaacgtcgataggaacctctgatggctggagagtgggctggtttgagggagggaagcagaacttgaacactgtatcgagggaagcagtgacgacggagctactttctcctgagcatcgattcagatagacccaaaggaggcgcattatgctgttgataatgattgggcgagctatgcgatcctacaaattcgataatatatgaagaaaaacgcgagttcacacagtgtcggagaacagagcaactctaagcgaagactaaccttcatctttccaacggcaatgttcagacaactttgccattgctccaagaatacttctcgggtagatacgcatagtgccgtcaccactagagggaagctgaccgtccaatacttatccttactagccatcctagccgcctgcgcgcgaatgatgttgatagccttggcccacgtcgggtgattgacttcggccgtagcgacctgataccatagaatgcagcataagaatgatcagaatggattgaaaaaaaaagaaaaaaccaccagatgcgagccctgagaaacttacattggctataggatgaatgagctcttgcagtgtttctgcgtacgctgttttcagaatcgctccatgtgtctgagagaagaacccggcaagatcacataaaaagtctgcacacatgtcgaaatcttgtggcggataaacctgtatatttgtaaaatgacaattacagtaagcacaaattatggagttgagacaagcagtgaccatcgactatccaccagccactactaataacaaagggaataatttcactaccttcaatttgaagcatttcattgctctcacgatcaactcgaattttccttcggcctctttttcaatttttgacgccgtgccaccaacggcacctgagcctacactcaatccctttcctagctcaactacgaagcgatctgttagagtaaggaaactggaatgtattcgcacagatgattacgtagttagcttttcgaacagtgtaaaagaaaaaatacaaaccaaccgaatgttagctaatgcgcccaacagttctaccaaaagcctttggtttgctaatttgtttggagaacgagacaaggattccctgaggttgaaaacacaatggtctaagcttcaacaagatacagagatggaagattattggaagtaagtcttacatatccttctcctttacaatccatctccaaagcatgtcttcgatcttggtgcccaatgcctcacccaaaacctccttgctaggtgtgtgtcggatgatagataaaagagcgcgaaggagaatatacattgttccgagctagatgtgactcccggagagctgcaagtcaattaaatgtcttagaaatgatagacggtcacgtgtactcacattgatccgttcgttgagcattgcagctgcatcggatactccagaggtcgacattccaggtctggtagcaggtttcacgttgcaaaaagacggatacaaccagatttagtattgaaaatagaagggaagggaatccttcttcatcttctctcgaagcgcagaaagaaagatcagatagaacacagttgaactaacagatgacttctcactgctcctctacccacttcatcttccaacacattgttcctccacttgatcagacaatcgagcgcaaccttagcgtctcctccaccccatgcggctcccattccacctggcccacctctgcctcttgatccactgctacctaaaactttacccaaaccactacccccatttccgctgatggcgaccgctatccccaaactttctagggccttgtctagctcggaatcctttccttttcccacgatttcttctattatcggcattggcttccccagaggccacctgtttgcattcaccaagccgtcgagatggctggtggtgacttcctgaaataatctcaataggaggtgcagagcaaattgaggaggtgtgctaggaggaggcaggctcatctgagatggtgggacgaaggagtttgttgttatcgataggctagagggcgtccttctgtgcttttggggtaatcttagagaagtagggagggggggcggcggtgtagaattcggagagtggttagcagagaacccagaagaggttgtcgacggtcgagattgatgaaagttgatggatgagctcgacagtgcaactgatccattgcgggctttccgtgttttattgacgttgtacgaagaggcaaatgagttaggcgacgttatgggattgttgttcatggtatgcatggtggtcgccgacgcggacgctgatctcgagaatggatttctcaggacaggatagtttgaacccgcgcttgagtccggaagagcagaagagttacccaaccctccaacggatggtgacttgtgcatccctagcgagcttgtggctgattctttctttcctccgaatgttgacctgagcgctccaaagctgctctttttgacgatctgtttcagcggtggaggtgggggcagagtatcggatccaaccgaattgctatgtttacggcttccaacagttggaggtccagccgttgctcgagcagaggaaattggtgattgagcagaaacagtagagtctttccgaacagaggatgagggttctgattggttcccacccatatagctggaa

SEQ ID NO: 921 - DNA, 24802 bp, Xanthophyllomyces dendrorhous
ggccgaagggtgacaagctgccagactggccaaaccgcggagcagggtaagagaacagctgctccgaatcatctgcatcatcgtctagagacggaagagcgatctggaaggatggctcggacgacatgtctcaggcgtttgtcgtttgacccgctttgtgatgacggagtaatgatgaattaagaagctgagcccaaagttaactgcacaacaatcaattagggcgggaaaaacctggtccgaaaagtaaacgtgtagtaatccgtgggctgtatctatatgtgttctgcctatcaggaatggagagatgcctatgcttgtattggtatatgtgcggggcgacggcaaaaaacgatgaatgtcgagagccgagatggtgttggccgaaaaacgtccaaagtcattcacgtccagacttaacttgttctcttccgccggtactcatccgcgtactcttcaatcatgtccgttcctcctctttcggttaattcggacgacctagtcaccgtgagtactggtaaagttgaagccaaaagagtgcttagcgttcagagtcatgtctgttcgggttatgttggttcgtttctcatattctgctggtcgattcttatcagctgttggagatgccttgtcttgttctactctttggatcacttctttgactgtgttctaccttgggctcggtggtacgttcaataggaaacaaggccgctacttttcctcttcaactgctaggctggaatgtggatgtcgtcaatactgttcagttttcgaatcatacgggtcagtcgattttatatttcgtcttattcagccttccgatgatacatcgtaatcatactatcatagtcatgtttatcgctatgttttctatctaatcagggtatggacacacggctggaactcgaacgactgctgccgacttgaaatccatctttggtggtttgaaatctaacggtctactgaaagctggcagattgctcacaggtgagtatgttgtctggctcttgcatgatatcttctaaacaatgcattttttcggatctgaaaatctttacgcgtacatttctatcgactgggatgtccttgaatacatcttaaggatatatccccggaggagaggctgttcaggtcgtcgggaagctagctcagctcataattcaagagagggatgcatccagcaaagatcgtttgatctatgtgttagatcgtaagtttgagtcatcttttggatctgctcttcttgccttgtaactgacaacaactttgtgtctcctctcataaagcggtcatgggtgaccacggcacactctatgtggctgaaagtgttattccgatataccgatctctcctccatttggcaactattgttacacctaaccaatttgaagccgagtatgttgtgctcattctctcactcgaatcttctgatgaagatgtctttctgatgagttgtttgcgcttgggttgctccttctctatctaccaaaagaacactggcctctcaacagatcaccactcctcaaagtcttcaagagctcttacaatctcttcacaagacgtaccggatcccgcatatcatcatctcttcattcacccttgccacccccttcccagcctccttactccctgggcctcccgtgcgatacatacaaaaactctcttcgcttcctataaaagaagagcagttgtgggagtcgtatccattactatactctgtggcttctacttgggacgtcgaacgcgaagagcttgttgagacagttgtattccaatttcctcaaatcaaaggatacttctctggtgttggcgatctgttttctgctctcacattagcgcattacaacccagacacggatgctactgtcgctcgagcggcgtcaaaagcgttattctcaacccaacaagttttactctctacccatctcagtttagccgagaaccgggaggaggaagagaatgagggaagcgacgaagagaaggatggcgaagacagaagtcgaagagtgaaacgaatgagaaggagagaacttagagtagtcgatcttgaatcaagaggagatcttactgatggggagggttggaatggacaaaaggtagatctatcaagtctgtaatgtgcagactgatcagattatcctctagatgagcaatatgatagacaatggataggcgcaacccttccttgcaggggattcttttcctagttgtaggatacaaagtgatatctccatattccagtttaatttctgatggacattagagtcgttttattgatagtagccgagccatccagtgtttgtttaccagaatgagaacagaacacaaagagggggaaaagaatctaaattaattacagaattagagcaccttgcatgcccacccgctctcaacagcctcaaaccttcttgcccatgccctccaagtaagactcaaacccaacagcctcgagcttctctgccttggccataacctcggcctccaattcatccatatagtcttgcatgtcctggatgagatggggaacagaagcagagatgatcctgacggcgagcaaaccggcgttggtcgagttgttgatggcaaccgtggcgacagggatccctcgctaaggagaaaagaaagaaagaaagttcagagacaagtggaagacgtcagctgcagtcagcgtttcgagttgatgatgatttgacatggacgacatacaggcatctggacgatcgaatgaagcgagtccacgccgtccaacacgctacccttgaccggcaccccgacgactggcaaaggcgtcaacgcagcgaccattcccggcagatgagccgcgcctccagctccagcgatcaaacatcggagtcctctagcaggcgcatctctggcataggtaaccatcctatcgggtgttcgatgggccgagacgatggtcaactcgaacggaaccttgaactttcgaaggatctgagcagcggcggccatgacaggcaagtcggaatcagatcccataatgattcccaccaacgggtttggtgaagagactgcctggggagtgatcgggcaatatttctccggcaaggtggactgcacagggagagaaagcttgaggattggtccgactttagcgaggagttcttcgtcgctatcggcaacgacggtgatgtgacccatcttccttcccttccggcattcggtcttgccatacatatgaacggaggcaccagtcgtggcaagagcttgagagatacatgcgtcgatagagtcaagcgtggaagaaagaccgatgagattgatcatcgccgtcgacggaaccttgagggcggtggatccgaggggtaacccggtgatggcacgcaagtgattctcgaactgagatgtgtgcgaggcttcaatagtgtggtgaccagagttgtgaggacgaggagcaatctcattgatgagcagagatcctaggggaactcaggtgatgccgaacaaaagaaagtggtttgtagatttgtcagtaggaggcaatacaagagaatgataagaagtgttgaaaccatgcgcgcttcactcaccgtcaggcatcaaaaacatctcgacaccaaagataccggctccagacaaacaagcgaccgccttctccgccaactgcttcgctttcttgttaacctctcgcccaccattagctcgtaatgggcagagcgttaacctgagtacgctgtcttcgtggacggtctcgactggatcgtaactcttgacttccccatttgtcgtccgaacaaccatgacggcaatctctctatcaaatggagcccacttttcggcataaagtggtcggtctcccaaaaagtcgagagcagccttgatggcggaggaggaaagctccttaagaacgtaatttcctctaccatcgtaagcaagggttcgggccttcaacatgagaggcagtccaagacgctgaacggcctccgagatagacttttccaccactgatgtatctttctcatctcgctcaacgccgacgaactctgcgacgtcgaccccgccgttcttgacgagatatttcttttgttcaaacttgtcttgaatgaccttgattgtctttgagctggggtggacctcgaccttgccctctgcctcaatctcagccaacacatcagcgttgacatgttcaatctctaccgtaagaatatcaaccttggaggccaactccttgatatgaggagacgagttgaaaggaccatcgatgtgagtgtcgtgtccaacaggaggaagaatgacttgtttggcaggtgtttgcgatccggcatcgagaatcagaagcgggatggatagaagagaagctggatgtgcaagcattcttccgagctgacctccacctgagtagagtttgaaatggtcagcagagtaaagaaaaaacaaaagttgacgaacagatcatcggttagcttctgcaacattgacatttctgaatcgcttttgaaacaggctacgacggatctagctgtcaaaaaaaagccaaaagagtaagtgaccacgcaccgaggattccaacagtcttttgagaggagctcatgatcagttctatgtatcttggtagctcttagaatgcaggctggagtagatggtagtataggataatcggttgcttctagtctcaatcgttcagatacgcaaaagagaaaactggttgaaaaaataaccctaacctatttgaatgcttagtcatcagactaactcaccgttgacctcatgaatgactataaaagaccaaattcttcctattagattgacgttctacttgacggtgtagacggctccatctttatttgtcacaatcagagtgacgaggaagaatgaactgtcattgataacatgaaatcgattgaacaaacaaacagataaaattgtccagatagttccgagttatccaaaaagactctcgacatttgtagaccgctgttgaagcgcttcgtacgtatatagttcatgtctcggacgggacgactggttgtttgatttggaaggttttttttccaaaggtgaacatgcggatctgactacattcaagatgtttgtctttaattgttataaagagactcaatctctcccgttattttctcttctgctcttaatatcatatcaactcctattgggttgatgaacgcatcataatgaatgtttgacgacatatcgaacaggaaaggttagataagaagtacaggtgaaaataaatcaaaaaaactccaggctcacacttaatatgttgtagctctttttatcccatccgattcaaagtgtactttatttttaccctgccaagaactccattgcctaaaaaaaaattgttggaaacagaaccggcttataatcttacggtatgcactccatccatctatccatccatctacccattcatccgtcagaggtactcagactagagagaccaatcaaggcttctctggtctcagttttgtctgacttgaagtcattgtttttaaaacttctttcttcgcctctatctttatccctttctcggcctttcccccttatattttcatcccttcgcgtttgcccgtgatggttgaagcaattcaggtggcatcaatacaacatgggacgaaagaagatcgagatcaagcgtcttagcgatgaccgaaatcgaaacgttacgtttctcaaacgaaagggtatgtttggaattcatctctcgtacaagatgtttttaccttggcttgtcgtatttatacttatctctcgttttttttctatctctgtttctcctatgctgatctagctggattaatgaagaaagtaagttcgctcatctaatccaatctttctttgttggcttccatccagatgttcatcgttcattctgtctgttctccgtctatcttcaaggcatgggaactcagtgtactttgttcggcagacgtaggtaccactttgtggtcttgccgggcttgatctctatttatatccttgcgatgcctaattagggatcacgattccacctctggtcattcctttctcttcctccttcgtaggtggctgtcatcgtgttcggtcataacgggaagcttttcgagttcagcagtcgaaacatcgaggatctccttctcaaatatacagaggtctgttcttcctgttttttgaatctctctttctcttctattccgcgccatcgcctttcgccgatcgtttagtctagagattctctatagtcgtgaactatagacctctctttctctcaatatgtgtcgggccagacactatagattcataacatatactccatgagttttttgatggaacagttgcactgatttttttatttctctcttattctcattactcgcttggttcggtgtacagtacaacggaacgattgatcacaagtcaccctcggagtttgccgcagctgcagttacagatgactttgcccaaagtgacgaagatgaggaagaagcgatcgccaaaccaaagccgacagtgacaacgacctccggatcatcatcatcatctgccaaaacgagaaagatcgccgaggctctcaacagggttcgtcctccgactctttgactctgtatattttgatagtattatatttcacatcgagctgatcatggatgttggtcgatcggggaccgtgtcttatctatcatgctatgtcttactagcgcgggtcaactcattcggattcttctcgactagagcccgctcaatcaacttcgcctcaagtatcccgttcgttactgtcatccgtcatcaacccctctgctcaagtcaactcgaaccaaggatctagtctacatgcacctcagtcgcaacaacaacaacaacaacaacaacaacagcaacagcaacgggactaccactacggacttcacggttcattacttcagaattggtcggccgatcagtttggtaagccgagtcacgatggcagtttgaacggaaatgaccgagccagtatcaacggacttcgagactggaagaatgggcagggtcaaggaggaggagctagcggtaatgggggtggtggaggcaatgatgagggtaacagatcaggcggttctagttccgtcgtcggtgctggaggagatggtccaaacatgaattatctgtcgctcctgaggtcatccttcccgaacgccaatctctctgatgggttcgcaaagtcgccagggatgcttcaaccgccggtaccgatgagcctgtacgatccttctggtctatctccttcgtcccagctatcgttctttatgggtcagccaaacccctacggggcggtctcgacccctacagctgcttcacaagggatgtttccgaatccaaacgacccgttgtattctgcgatgggtctctttggaggattgtcgggtagtgggggtattcccagttctgctaccggtttgtctggtcaagcaccgatcggatcgacaaacgacgcaggtggtggcgcggtaggtaacccgtatatgctctcccaacaacagagcacgaccccttatcatcagtcgaaccagtatcgatcgttgctcgtcccaaatgcactcggcccaccaccgacgacgatgggagggcatcaacagcaacaacagcaacaacagcaatatcgacagcagcatccattgtatagtcatccaatgttgttggccgccgccgcggcggcggcggctggccaaatgaatccaaaccagcagccatcaaattacaaccaacaacagcagcagcagccgccacaaacaaattacccttcgggtctcagctggccggtaacttcacaacctggcggtaatacaggcagtgcggcaggaaccggaatgggagtaaacactaatggaggttctggagctggagttctttccgatcggcgtgggagcgagagcgtgagttcggagaatgaggaagacgatgaccgagaactaggagaggacgaagaagatgaggaagaatctgacagtcgaacgacaggtcggaaaaggttggatcgggagtcggacgacgctcacacattaggcgggaagaaggggcgcttacattaattcaccgggacggtttggactttacatatctctttttcacttcttctttttcatctggtggtacaatctacatctgttcatctctctctctgtgttgcccttgtttgtgacatgtttgcaattgtaaaccaagacctacgatctcctttgaacgatatatgttatgacgacaggcaaatgggcttccgtgtcctttcctcgttgaaaattactatgtaatcgaagaaatgaaaactctgaagaactcggggaagtatcattatatagtttcagccccgcttcatcttcgacgtcttttttaatacgctgaaagattccctttcattattccagagtctagatgatgatctcttggagtagacacatcattgtcggagagtaaagtgggatgcatttaaggtttggcgaccgtccatcatttaatgagaggccgaccaattggagctcggtcatcggtccaaccgcaatctattcaggctggctagatcaatgaaccgacctggatttcactcctcttgttttcatttctctcctctttttctccgctatctcattaccctcgtcttaaacctcgtactttggccctgcccaagttttcccaacggtctttcaactccgactgtttagagttggcagggttctgtctatcttttcatatgttttcatttgcttactccttcggactggcgcctcttttaatttgacacaaatgaactgacgagactgtcggtaattctgctgctgctgcccttccatggactgacctgacccgtctgtcgtcatttctgacttgaccaaatgccgcttacctctgtccttttgtctcctcctctgctcctttctttcatctgatcacccattcgtgtacgtgcgttcagtctgcagtctgacgctcacctgcatcgatcagctagcacgactagataaccttcattcgcccctaatcagatcatcattcattctgtctatttgtctcatgcatcggtcccatcaccccttttccctttgacagggcggacgatgtgcaccgttgaaaaattgtaattgggacaacccacctcatcgacccctgcgatattctctgcctcacacgttcgactctgcctcattagctcgcttgggccattcatcaggtcctgtcctgcgtgccttgtgtaaggcacatacatgtcggtcgaattgtttgactttaatctctgtcgatcggtcgctcctcggcggaagatgttgtcaactatctatattaactatatgcgctgctttcctttgcttcctacggctcctctccactcacccattgacccttttgtcaaaggcagatagatggcttgctatctgagcacttggtctgattactatatgaatgctcgttggattgtctcttccgttctcttttgttctttccttcctttctttcttctttccttgctttctcactcactcactttctttctttctttcactcacaccattctccctttctttcctcttcatcctcctctgtccctcctttctctccggatccatcttccgggtcgtccttgcatcgattcttcttcttcttcttcttctgcttctcttcgcatccagccgtcctcctccgcattcgcttgcattcccctgcatcatattcttcacaacgcattctctcactggctgctaaactcatacaccctgccagacatttttccttgcatctgcatcttgtcattctaccccatcttacctccaccaattatccagcatggaagcagttctctccgctaacaggatacgcaataagaacgttaagaacctcagcctggttcattcaaaagaatccgatgccgtccttcactcggtccctgtcgatttccctccgttgttctccccatggaccccaagcttcaacgctgcactcgctgacactactcctccaacggccgacagcctggacgaatcgtctccgtcaggctcgtcacccgaatcgtcatcctcgagtactactggcccttcgttggacatttggataaaccgggcgtcacccgctcgagatctacagagtttgctcgagagcgaggctatccggagaggtctgtcgtcggtaagtttaatcgatcggtttccttgaacttcattcttctgaaatttcagccatcaaattcccgaatctgattcctattctccgtcaatttatcttgtgtggctgaaaaagggtcccagcccgacatacatcacagatccttccagaaggtcttccgattctgacgcgggaagctcaccggggcaactggtttttccttctttctccagtgcgtcccttccgtggccacctaatgccaaggcagcgcagtttcgacgtcacacgctcgcccattcagtcgatgaccagcaaaacgacagatcttcaggtgccaaacaaaaatgcccgacctttctccctgccgtacaagaggcgcccgggtttccctcaaaccagttcccaccttcaacaggaatatctccagagctacctactcctacggcttctatctctgcgcccgtccccaaaatagacccgacgatgccgaaacggtcgtctgccaaagttttcaaagtgccggccgacccaaacactaaaacgtctggttccaagaaagattccaagtcttctggtcctcctaaaattccgaggccaccgaactcgtggatcttgtaccgatcagaaatgatcaaagcaatcaagtctgctaaggaaagcggccgagagtttgagatgccgaagggtgcactggccaaggcaacggcgctgggcatcgaaaagagcttattcaaacaaggagacgacagccttccatgcgcccaggcagacgtatcaaaactgatctcactcttatggaaaaatgagacatcggcaatcaaaaagatgtacgatgatcttagcgcggtgaagaaacaggaggtccgttctacatcggttctacctttgactcttctctgtgtcgtttacttatccgccctgttttatgaacgcagcatgcaatcatgtaccccgagtatcgcttccacccagtcaaaaaagtctccaaaggcaatcctatcgaagaaacccgacccccttcgccatcgtcccctccgcctttgacaaaatccacatctgtttcgagcagaggtccacgaaagaagaaaacgactgtcaatacacgcgactctgccaaaaagcctaaagggccatccaagactcgatatactccgatagggcgaaactcaaccgaccaatcagtcaagcagtctcagtcgtccggcgcggcttctccagaacgtagaacagagaacgacccgcctcaagaaccttattgggtcaacccaggtgaacagctccggtttggaggttgggtggtgccccacccgacccaactgcccacaggaccgtctccgacgttgaaatcagcctcaaccgactctcggtcgaacgcctcaatggttggtttcgtattcatcgattctagtctgccgatcccatgctgatcctgttacctgtgcgcttgctatagaatgaacacttggttcgatcccggatttctttaagaaattaccccgagccggctgcgccccagtctttctcgagcgtgaacctggaaccttacccggcacctactccgttcgcttcaggtttctcaaagattcagccaccggcttactcgacccatccttctccccagtcatctgttggatcgactttccaatactcatccttcccagtctatcctcaatccagttgccactcacccaccgtcttgcctgatgttgacatgaatcaattcatgtttgattcttcgacctattccgtccgaccaacagacattcagccggatgtctctccatttaggagagattcttccgtatccgaacagagtcccggtcacttggggggaactcaagagcatgacctggcaaatctatggactctgttggaaaaccagccatcgagcttgcctgcagagcgcaaactcgaatcctattgtggatcccctacttcatggcaggctcccaaaggaatttgggaattcgatgaacattccccagagtccaaatctaatgggtctagctatatgtgagctatcgtctaaaccaagtatctcgcttgccagatcaaggcgatcaatttatccctgttctgttctacatacttttcttcattcatctcctctttgttctcgttattattctatactcttcgaccatctatcatctttctttgccatttcacctctttttcgacactatttcttgtcacgtaatcttctaacttctatagactccactatctttcacgagccgttttttcatctcgcttttgcatctcgcttgatctgtgtctgtgtctcttacgtcttggtttgtcttcctcggctcaccttatctctctctgattgttctcacgtttcctttctcttggtctatactgttggtcttttgccttgtagtttatcatccctttgattctttattttggtcgttcacacatccctacaatgtagataacttattggggtttgattcactcctcttctatcccatctctttcacccagtgacttcctccgttctctgccttcatcagacggacttatgcttaccctcgacgtttacactactatatgcgcctccttccttgcgtctttcctcttccttactgttcgttctggatttggttctggttttccattggtttcgtcgttttgtattgtgctgtctttgtaagcttcttttcttcaatgagtcgccctatctgcttttttttattttttttaaaataaatcgtttcttcatcttctcctcttttcctttgttttgtggtcggatcgtcaggtattcgaccctgtaaatcgtcaaagatccctccgtttcgcgtcttggaacctcgcatcttgtattctgcatctcggaatcatggaatctcggaatctgactaggatgtatgagatatttttgatcgaagaggaacaccgtcaacttcaggacatatctatagcctttggctctttctttttgatattttagtctcaatccgatcgattgatttataaactatgctacaaatcgcattctaggaaaaataaagaaaggaggaaaccatgcctctcccacctcctgtccacagttcatccgacaactttccttttcaaatctgttgcaccgtcctcgtcaccatcaacatcgatcggcttccccgacccgaatgtggaaccagccaccgtgctctctgtcgatagacctatgatcgaatgatccctcgttgacgagtttaattctttccctgtcaaatctaccggtattgtgaagtttgaaggccggcgcaagcctcggtcgtcgatcactgatgaaaagttcggttcatccgctcggctgcctttctcgtcgtgatgaatgggcccggttccatccaagccggaaggcgggttgtccaaggggatctcgggagcagatcggccggcccatcgttcaccccatcggatgatggcacatacaaaaagaaatccaatgatcgtcagtcctgccgcccaggtgtctgcccaacctacaccaatcttgttgatcagaggaaggattccggctgttcctgcagcggaaaagacgctttagtaagaaaacagataaagacgaacgccgtcagttcaggggtggttttgaagtaaaaaaagatgaagccccgtgttgagagaaaggatgttggtactcactatcgcatacaattgttgatcgctgaatgaatcaatgaacgaacaaaggggtaagacgtcagaagagacaaaagaagagaaagtctcaagtatcatgaaggaaagaactgaccgataacttcggccgaacgactttgaagacagtccacacaacttacgagccagaaacatacaggagggatagtcacgtcagccagtcaggatgagtaacgtgccggaaggatacgggaacataacgcactatgtgttcgcgcttgaaaagaccagcataagaccaaatccagaagaaactaggtattcctcaaccaacatcttagattagcacataccactccatagtctgacaagtcgaaagattgaacgaacacataaaaacacaaggcggggcgagcccgcctgcacctgtctggatggtccaacctgctccgatgagcgagacgggaaggatgatccctctgtatgtgtgtttgtatgcacacagaagatcaaacctagtcagtacaaaagacaaggacaagacaaggttaaagagaaagaatctttgtacaaaccctcctaataatgtagagtacaatctgtcttccggccgacctgtcgtttccgaggatacgaagatgatatgtaaacatgctcagattgtttgatacggaaaccccacgaatcaaacaagagaaaaatgctcacggtatcctctcttgtcgatatacttccgaaccaccttgtctgcatacagtcctccgatccgactaccaatgatgttacctactccttgaggaagatagagtaaaccgacgatggcggcatttgtgattccatatcgaggttgctacgttcaagtaattcagtgcttcatttagcaatctacacaacaaactgtcgaatatcggtgtatgaaagtgaatgatggaagtaccatagtagatgttatcggcacgacaagcacataggttgtcaacaagactagcgaactgttcaagctctgcattcagaataagagtaagaacaagttctcggagaaaccaaggtgaagaaaggggaggctaatcgagccaaggactcacgatgaacagaatgtttgtgaaacgcaaaagaccgacactccgtactggattgaaccagtacattacaaacttcttaccggtacgttgtttggcaagcatgtggggagtcgggccgtgccaagtctcaggactgaaagaagaattgtattggtccaggaggcgatgacgacaaagagcaggtcagaatgacgggaggcatttgtagaaaaacgggtcgaggcgtacaggaagaagaatatgagaaccaatgcggctccaccagcgcctgctaagaggtattgagtacttctccatccaggggcggtgtactgttgcaaaagactgaacacaggaaccagaaaggaagaagaaaacgaaaagatgtgacacaacacgttaaaaatagtaataaaaacaacctatagttagagaggagagaaagttgaacaaagtttcctcaccctgcaaatagtggtgctaacgctggacccactggaaaggtcaaggatcaatcgaattcagggcagtcgttctagtcagtgtctgatagaatgatagtctcctataaatctgctcaaaacttactgactgctccaaggtagaacaagcccatggcgcctgctctctcgatgggcgaatagatatcgccgatcgtgcctgctccaacactcagcacggctgagccacctgtaaaagatgcatagagaacaaggattagaagatcgagcgaactaggagatagtttgaccacgaaagagaataggaaaggaatgaccaatggcctgtaaacatctggtggctatcaagctacccagagtgttggagaacgagcatccgatactgccaccgatgaatataggaagcgacgctagatagacgttccgtctgccatagaatccagatagaggagcccagataagcggagctgaaccaagaaacaagagctattcgagtagacagaacaaaacacaacgatgagtacagagttctcaagcgataaggggaccaaactcttcacccgatgatcggtgacgtacaaagatagcgacggtgtagttgatgacttctttcgttgtattgacggactcggccacgtctggaatactaggaaagaacgacgctgaggcgagtgctgtacacgtttaaccagaagaggcaggtcaggacgcttgcacagttagaattgataggtatgcacacttgtagggtaaaccaaaaacgaacgagataggaacgcggcgaaagataccagacaagtgatcgctttcttgcgccgcgctgtacaaagtgcaaaggacgccaagtcaaaacaagtttaattcatccacttttggactgatagcaaacaacagaacgtcgagcagggcaagaacgaacgagagaacttgaggtaaacctcgtacggatcgaccggtttgtgagtcatgtctgcatgcggacctggcaggtctaatgacttctcggcgtctgactccaactctcggactaggtcgagtggaacagatccctccgatggtgaggagttctcagttgccataaatgggatgctttcagttaatgggatttatgtatctttgtctgagcttgtcctgaaggtatggcctgtgtttttgtcgaactagataggagaagatgagtgtaccgaagagaaagataggagcaggtcatcaaaatactttgaacgagtcaagttttcgaggaaactctcttcgtcgggtatggccgatgtaagcgaaggtacgtccgaaattaactcgtcggctggactgaggcctattaaaaccctcggttactacctcctccggacttagccgggctcggtgcccaagttttccgttccttcgttcaacatacgatcatcagctcacggaccatccgtacaacgtttgtcatttgtttctcatgccactagatgtaaacagtggatgcgtggaggactcggaggaggaagactttatgtcagatgcctttctagctaaaatccttcctccggctacaacatccaaacgatcgacccagtcaacgtcttacaatgataaacgaaaacaagcccaacgtgcgtcagaagctcggaacaaggccaatgctccgaaaagcttcagacagcttcgtgaggatgaagaggaaaggaggaaggaaggtttgaagaaaagtctgttcgaaaaggaacaagaggccggtcaaggacccagtaaggctttgaagatgatgatgaacatgggattttcagtcggtgatgtcagtcatctgttctacccttgttctcttcctttgatttctttcattcagagacacaactgatttgatagctttcaaacggtttgtttcgtgtagagtctaggaaaacaatcatcaggacagtcaaacaatgctatcagctcgactcccgcggaccgaaaagaagctttgaacaaagctgagaatacaagagaacatactcatgacagcgaagaagaagaggggattagtgagataggctgttcgaagcgacgaaagatagagagccaggtcggatcagaccctgaacctgaacctactgttatgtccacttcaaaggccaagatagaacctctaggaatcaaactctgggcaggtttgtctagacttcctaatcctcttttttttttctctctttttttctctctttttttcccttctttacctcacgcttcctcagtaacaacctttttgtgtccctgtgtgcttatgtgaaatcaggtcggaaaggtttaggtgctcagccgaaagcttcactctctccgtcaaagccaagagcatcggacacggtctcacctgttgttccacttgatgcgtatgcttacaggtctcgtcaacaaattgaggtgcgttcgcccgtcccttctaaaggagatacactgcgctctggtggtagaaacagatcattcaaccatgtcctgtctccttcttttctttccaatcgaattagtacgaggaacgaaaggcagaaagccaacttcgaagcgctcgtaaaacagtcatcgagctggatgaacgctccaaccgaggcgtgagtttttttcctctactcctctactcttttactctcttctttcctatctttttcgattggagggtcgatcctacactaaccgtgtctgtcccgctctcttgacctcgggtcgagaaagttttcaattcttcacctggacccgtcttatctgccatccttcccacctccgttgcttgaatacctcactgctcctctttccgccgacgaaaccgaatcgggtagtgtccatcgtgatgctgaagatgaaactgtacaggctgtgcccggttttgagcctggaaccgagtctgatttggaccgcatccgggcagagaggttgaaaaaacagatggaggccgattctctaggtcctctgaaaagacttgactggaccgacgatgatggcgaagacgacaaacccatccgggtcggtaagagtgcagatcccgaacgcaacgacaaggaggagaacaaggacggtgaagacggggagggagagaactgggcggtcttggctggggaagctaagaaatgggttgttctacctgtacgccttgtcttgttgttcgctttccgcaagtctatcaatcatgcggcccatgattaacattctacccttatcgtcactatgatttcctcttcttttcccttctacaaatccgttcaaaggctcttcaacgactgctgctcacacacgactacctccgttcagaattctcatactgcattttctgcggattcgcatacgactcttccgaacagatggatcgagaatgcccagggttaactgaagaagatcatgattgagtgtatgtttgtgtacatatgtgtgtgtgtttcgcacccacaatccgccaccaaagggtcaagcgggtaggaagccaagacataatagaattatgagatttgatgactacagggcgattccttcccttaggctgctcggatggtttccatgagcagatcgtgaccaggcccatacatgacagagtcggccacgcgtcgggtttgataccgagcttggggaaaagcttaaactatgctttaaaccgaacggcatatttcgtatttagcctttggcgtttcgacatggcgtccggcgcatgagcctatgacctgcgcattcgggtatatcccccttgtcctttaatcatcatcggtagtcgagcctgccggagagagagagaaagtgagagacgtagcaagaaagagttctttcccgagtgtgagttgggattgtttctttttccagagggctcaaagagataagtttgtttcgagcggctcgttaagcggatatgtatgtttacaataactttgaagccaagcggagaaatatatgttaaaaaaacaaaggtcagtcagtcagcccatcaggcttgacgtctggtgaaggaatagatgatctctttcagcattgcaaaccagttttgcttctttcatcgcgtctcaactatcagaccgtttgaaacgacagaggacatgtaaattagagagacagaagatcgacaaatgatctggaagcagaagactaatcaagaaacctgtacacggttgacgataattgaccgagtgtccaacagacaggcgagcaagtgaataaacgttgaaacttgggaaaggacggggacagggtgatggacttgacttggctcggttgatcagggagtatctattctaccggatggtgtcgtttcaaatgcttgttagaacggggagaaaagatcagttcgttgagtgtcttacggaagccgaagacatacacgcctctgtagtgaaacataaacaaatgacgattggacgaaatagaagttggattgatggatctgcggcgataaacatccgttgatcaaacagcttcaagcggtagttcggccgtgagagatgtggaaggtacccagaacagcctcatgggcccgacactttcttcatcctgtagtaaagtttaatgaggaagagtcgagacaacaagaaaaggggtggactaaacagtaggtaaagaggtgaggaagaagtgtaaattgctgatgaaagaaacctcgggggagaccgagggtgagcgcatgcgcatgcgcaagcgacaagaacaatctgtatcctcaaccggggatttcgcagctttccgaaaccaagggagggtatggtgagacgaaggaggaagcaaccaccctcaagtcaaatctctctgcaggggtttttttctgagggagtcaaagaagaaaggaaaagggaggactgtaggaagctaatagaatggtattgcaacgaattcttcttgatgtctctctgctgaactttcgccgaccaagtgcctcctcccaaggatttcctgttcgactgacaccggcttggacataggttcagggatcggctcatgattgatcacagacgcttcataccttggagaaatagaccaggagatcatcagaagggatcgatcattgaatgcctggggctttccttcctcactcaacagagttaagatagcagctgggctagcagaccgcgcttgttcgcggaacgatgattcgcagatagtccgttcgtccatcaagccacctagtaagtctcatcaaaccgtgtgatacaaaggaagaatacactgacatgatgttcctctcttagaaatattgatcgcccacagagcgatcgcgcgacgtggagcgtgatttcgtttgaatggacactgactcgatgtttcgtgtaacagtgattcccgccgttggagaatggcgagcaacggatatgatcaaggaagcatccccaatgacaaaacggggtgggaagatcaatacatgataggtctctgatcgagttcatcctcgtcgaccgatctggctacgaacagccgacccttccgcgcgtcctctctctttgctttctttggtcagctctgaacactagttgcgagcgatgagtgatgtcagacgtgagacggacgagagcgaaaaagattggggtcggacagagaacgatcctggcaaacatggagactagaagctggagtgatatatacgttccgcccagtcacgtcggacgccgttgcgatcaacattgattagataagaacgtcaatcatcgtctgtctttgttttcccgtttgcttcgatctctcgctttcctcgaatcgatctctgtttctttattagttctgtatctcgtttgttttcgtgaaagagatccgaatcgaaggacgtcgaatgtatatgatcatggtagaagattacgataatatcgagctcaaagattaacaagagataaggaatatagagatagagagaaagatacgatcacataaaaaaggcacctaaggataaccaagacctcaaggaagatgcacagacgagacgagatgagtaaaagagattctatccgttgcattgatgcgcttccaagcacatcaggtcaaaacgacggaagaagagaaagcatagaggacgacgaagccaagcgctcagacggacggctgtacgggtcgactcctgacaaacaacgttttccacggttttccttctcgcttttctttccggaccggtgttttttttgcaagggccactgacttttgctgctgctgctgctgttggcgtcgccgtctgcggggaggctcggccagaggtgcgagagaaggaagatgggtcgagcgtagatgaggtctgaccggagcgttgagcctagctttcagatacgccgttccacagtagcaaagctcgtcctcttctgggcctttgctttgctctttggcttgcccgtgatgattcaccccactcttttcctcctgtttcgcctctctggcggcaaccgggttgggtccggccttggtagtaggttgagaaagctctgtggaattaaggagaggtgtctttggcggctggagcgcgttctcggtctttgcgcgagcgacaaacgtcgtctgaaatggaagacgatcgtcgatcgaccgtctggttgtttgacgacctgtcgaggaggaagaggaagagcagagggaggagggtgaagaggatttcttggctgcgggttcggcttctgcttgagattcagaaggaatcgccggtagacgtttttcttcgacgacgataggagctcccaacatgtcggccattccctcgacctgggcttcctctcggttcttttccggcccggcttcgacgtgagcaatcttgagttggcctccccaagagacgttctttctcctgaaagacgaggccgaggcccaagcgcggttacttccgggtctactgctggatcctgtgtaaaggccggcgagatcgtcggttgtggaactcttatttagaaagatggccagtcggtcgaacgatcggtgttcgcccttcggtcgtcccagcaccggcagactcgagcgttgtccagaagaaggaccggcagaagaacgaagagaggggagagaggcggtggatgtcatcggttggatgactcggttggttcccaattctgtcggtcgctcggtcgatgctgcagccgccaacggagctctggtcgaaaggctggagggaggggtcgaccgatgacggatcgcgtttgatagatacccgatctctccgtcgtccgtgactcgttccgggcggagttcatcacctggacagactcgatcggtctgactgactgtgggctctactatttcgagttgagtgggcgccgatcggatatagatatccttccaaccagaagactttcggaagtcgaagttctgtctggtggagatagtggtggcgacggtgggggtcaaaaccgggacgggaaaagagagctcgaagtcgtcggagtagtcatcatccgagtcgcagtcgtcagaaaatgcctgaatgagtctcggtggtgaaagggaggaggaggaggaagaagaagaggaagaagaagaggaagaggaagaggcaacgacgacggcagcggctgatgcacgtcggagggctcgggtgaaaggggaggtctgcccggagagttgttgatgaggggagaaaagcaactggggaagacctttgacttgggctttgtcgacctcttggtcagattccaacggggcgccgacgtttgggtcgtcgatgtcgtgcgcctcgaacgagaacgtcagcgagatactcctcgttcggcctgctcttctgaaaggaaacgtaggtgaggaagaggggctggattcggcgtctgaaggggagctcgagtcgaggtactcagagtaggatgaaaccgacgaggccgagtccacggtcgatggtgaccatgaggatggcttgggaggaggggaacggaggagaaccggggtgagtaagaaggtacgaactttgggccgagagaatagatggacgaatggatggctgaatgcattgaagatttacagaaagacaaggacctacaggcagtggattgagagaatgttgggtgtcggaccaagatccaactctggaggtgacgtctgctctgatgagcacgaggctatctcgtttgttgagttgaccgagatagttcaaccgtctctcccgttctcgttctccgatgctgtctgtgctgggccgtttgctcagtctggcatctcgcctggtgtgctttcgagcagaggccgaggccgagaccgaggctggcgtgatgggagagccggtgagactggatggtcgggatgcattgggcagggagaatgaagagagagtgctagggcccgagatggtctgagagggatgaagagttgactgaaagcatcctccgccggcggaggataggggagagaagggagggaaggccaacgatctgttgtctggttgagagagtaaagtgtctaagtcgggaatagacagtctgaaaccgagaccggacgcgggaagccaagggtcgaggaggacaggagggaggctggaaggaagaagaatggatgagatgagtgtttgagactgggtgtatctttcagagcgcaagaatgagtgagagacggtgaaagaaatggggaaggtcttaccagggagactcgtcaagagcaaacctgttggtggacatttctacaagttgggctgaagggaggggggggggaaagaaatcgattgaaggaggaaaaaatgaacaggaaagcaaggagacgatcaacgtctttggaagggtgaaataaagggataggagagactcgaccggcgagtgtgggtgtggatgtagtacgtagaacgtagggagggggagatgaagaagagaagaaggaaggaggggagactttaaagtgaacaagagaagtagaaatcattcaacatggccgaaatctcggctacgtcaggtgtaacgtaggggtaaccggacgaagatggatccagcgtcttcaaggtctatcggcactttcctttcgctcgccttgcctctggacgagcgcttcgtactcttgccttcgctgtagggaacgctcctgtttgtgagtcttcatgcgttcccggtaggactctttgtcggccgggccaaagagaccgtactctgccgacttttcgtatgcgtatgccatgagcagggaactagcgacaggaggggagggggggaagagcaagttggcgacagagagagagagaatttcagcatgatgtgcgtgcgtgtgtgctgaaggtgttgtggggggttatgatactctctatgtttgtctgcttgcttggttgtacggaagagcaaagacatgtgcatatgtgtgtacgacgggcatgaagaagagaaagacagacaaacccaaagacgacggcgaacgctctgtttgcggtcttttgatttcttggtccgaccggtttcttttcgttcggtagatcgaacagagccggcttgtcggatggaggtgctggtggcaaggtggatgctgagctgggttgaggttggactgggacgacctttgggtagatgtgctttctcggttgggggtagatctttatgcgagggattggttcgtctggtcggtttgagaacgacatggccaacgtcggtggcctgaggtgagtgtgacggggtaggatgcggagcatgggaggcgagctttgctttagggaaggatgtagat

SEQ ID NO: 922 - DNA, 318 bp, Xanthophyllomyces dendrorhous
gattctctcaatcgggaatctgtctcgtcttctctattgtttctcggagacagccgattcgtttaggcaatggaatctaattctagttctcattctctaatcccctaattctctagttctctcaaactattgtgcacacacatagtgagtaagttgattgatatactatgaagtatggaagcaagaaagaaagggagaaagagataaaactaagtgacaaagaacacacctgattctctcaacaagaatacacacacagagtgagtaagttgattgagagaaccagaaagaagaaaggaaaaggaaacaaagtagcta

SEQ ID NO: 923 - DNA, 435 bp, Xanthophyllomyces dendrorhous
cacacacactcacacccacaaatacaaacacacccacttcaccccctcaccacaagtcggaacgtccggccctgggtaaggcagcgaggaaggaaagaaaaaagaatagagaaggaaaggagagagagaagaaagtccaacaagtgttgaacaaatctatagaacaagggcttagcctcagcagatcgtagtaacaagactactctactgcttacagcaccccgttcccattcaagtcgtctgcaaaggattccccccgcgcatattgaaatttcgattcacggaagaccgccccggcatttccgccaggacgggcaggaccgtcagtatggttcacgagcttgcgctctattttgacacatctaacatgtgcgggaccaacatcatcgtttctagcacggattctgacttagaggcgttcagccataatccagc

SEQ ID NO: 924 - DNA, 385 bp, Xanthophyllomyces dendrorhous
ccagtgagtcctgttgatgctgtgagagctgagaaaggagaatgctcagcttgtgttcgaccatgctgtttgttctagccctttgggacattggctggacgtccgacatgtcaaagccgccgaggatgggtgcgatgatggtgtctgctgcctcgtttgcggcctgataggcgagtggggcgacgtcggcgaacgagagcacaccgaggccgccgaaccgggtggggagctggatgatggctctgtcggtgtcgagtcgacggggagagttccggatgaggagaaccgcctcggtgagtgcgtcgtctagtgcagtccatgggtgatcgagatctgacgtgtctagtgttcgttggaggtgccgcaggttcatctggacgcatcg

SEQ ID NO: 925 - DNA, 1232 bp, Xanthophyllomyces dendrorhous
gcatctcatttctctctctacgggcagtcgaggagttctcctgcccggagtggcgcgtcctccgccatctgaggaaaggaggacatagagaagatggcggaacagtagacgcgcgtccttcaagcggacgtgggcccaaggcccgtgggagtgcgactctccctcttttcaatttgtcgagtagcacaatgacagtgcgcgggacttcgatcccgagtatcttcggtttgactccgaggctggacaccctcatcgcaatggcgtattagcgttgtaatttatactacgtataaattactaacgcgtctacgccgcgatagtgggtgtctagccacggctcaaacctcccgactcgggagctccgtgccgcgcacttcttctttctcttccctcttttccggaagaggggaagaggagcgggaacggagtctccaccctcgcttcgctcggttgaaccctccttttcccgttcctcgggaaaagaggggagagaaagaagaaggagtcctcaccccgcgctgggtcggggcgagtcctctgtgctccgggcacctcttcatattcccgattatcgggaatatgagagaggaccctcctcacgagcttcggagagtccctctcctatctctttctcattttataaggaaaagagaaagagatggagaggacgggtctcgattcatctgtcgctacgcttcagatgtctcgtgcccctctccccgagctctcggagcctaggggtcctttccctagcctctctctctcttcgctacgcccgctcgagagagagaggagggacggacggaagaaagcctgcactcgaggctctcgagcagactttcttcctcccctatcctccggagtagggccggagcatggtttcttttgtcttctcccacttcctgtcgctccttcgctctgagaccacctctctttgttgcacgaaagagaggtttacgaaagagaggcctttaccgtctcgctaaagccgcgctcgacggtgcagtctctctctttcttcccagagctccttgctcttggaaagggagaagacaaaagcctcttggtcagtctcccctgacagcccactctcccctgggctcttctcctggcctatcagctcctcagcgataagacctcgaggagcctccaggaggagaagaacgggcaagggatcttcaccccctcggctacgcctcgccggctcgtcctcctcgccctaacccaggggc

SEQ ID NO: 926 - DNA, 966 bp, Xanthophyllomyces dendrorhous
taaaggagacagtagaccgcaaggtttactgcaacaagttgcaagtaacgtgaggggccctatgggctgtatgacgatcgggttggtcggtacagctcccctctagcgagctgagtacctccgtccccgatcgggcgtacaagagtacgcctgtgacgggagtcatcggagggagaggctcagaaagcagctttctctaagcctctgtacagattcctccctcggaggtctcgaggaaagggctttttttatggcttagtgaaccaactagcgttgacactaacccacaaaggggaagagacttttgtctctgcagactctctgcgtctctctgattctactttgtagagagacgtttcgtctgcagtagcgcacgcactgtatgcgtgcttcatttaagcagctagagctgctctttagtcacaccactatgtgtagtagtggtgtgagtgtggagagcttctctagcgagaacctctatagggtgttaccctcttttatggagcatcatcaggctatgccttcttcctctcctttagctcctctctcctttggaggttcggagtgtatatctctttaaaatttgttggtgtagtggttgcatgaagatttaaaataccttcggtataggttcgattcctttacatttttatgggaagtgtttatgctagttgttttcctttcttgactcttcgagtctatcattataaatgattttgttgcctccgagcctcctaggctaaccgtaattgatcctaggaggcttgttcttttgttccttactttcgctcatcgtcggctgacttcggttgtcagctagctgcactaggcttccgccctgcctcctcttcgcctcccggcgctgagggtctcggggccgacatagcgaggagaatcctctcctcagtggccacctcgtgttgttagcttgccatcgggactcggcctataagactcgccagagaa

SEQ ID NO: 927 - DNA, 447 bp, Xanthophyllomyces dendrorhous
actggcgacctattgcgcaccgggtgagatgtgaagcaagcgtcataccactagaccaggcgaccgatcgacacggccttttctccgccgggctccgtactccggggctcgacgtccgacgtccgacgtccgatatccgatgggcgatcggacggatcggccggacgcccaccgcctcggataaccctagcagagccaacgcccacacatccacttggccatacatccacacaaccagacgaaagctaaaggcaaagatggtggaacggtcgtcatggccggctgccagcttgtatgcatcaggaaatcgcgggttcgaaccccgtcttggtctagtggtcccaccacccattcgctctggccgagtggcccagcggtaaggcgtctgactacgaggatctttgccttcttttgttttggtctttctgttgtgttgacactgtgttg

SEQ ID NO: 928 - DNA, 410 bp, Xanthophyllomyces dendrorhous
gtctcctcattttttttccctctccctttcctgtgcagtacttcccctctcgtcttctgccgtccatgaggtgtgcgtgttcttggtatgttcttgcgatggacatcatccatcttccaccagcatgctcggccggcaagaaaaaaggagtcacccgggattgaaccagggacctgctgggttgcaaccagccgcaactaccgctgtgctataactccgtatgaggctgccgcgccatcggacagatcatccacaggcacgcttgcacacatgcacacagcacagtggcagccgctttgtcgtcctgcgatcgagtagtggcagctgtggacgcaacatcgcccggtgcgaccaggccggcgtcacagatgctgcatctgcacagagaaaacaaaaggaacaaaggagca

SEQ ID NO: 929 - DNA, 705 bp, Xanthophyllomyces dendrorhous
cgacggagagtctgtgagcagacagaagacccttctccagactctgctagtctcatgcttccatctcttcatgaccatttgagggtcccttaccctcctaaacgaaagccctagagctttcccaagaggaggtccacaaacctcccctacggaatcccataggagaatcccctaattctccctacaagagggactcccttagtccccccacgttcttcttcctagtcaccggggttccagacccctccggcaacggtatcgtccgttgctacccttctttcctttagggctcccttagccctgttcccgacagtatcgcctgtcgtctcacctcttctcacacggaggttctctacctccccagaaggcagagcccacaggctcccaaatttcctctgcctacagctaggctccagcctacctagcctcctataccaacccaagggtataggccaaaattttcaggcttccatgcctctagagtcctttcctttacacctcacgggggagggaccacacccaaatagagaggggccgggcccaagctctgggagtcttcgagagggagtttttcctatatcaaatcacgttgatccgaaggagtgaacgtgaaaaaatctcccccctcgcgaccagctcccaggttattgcgccctggtggccccacactatttgtaaagacgtccctcaccccaatagggttcc

SEQ ID NO: 930 - DNA, 432 bp, Xanthophyllomyces dendrorhous
gtcgactcagtttttcagagcatcagagtagacaaaaaacgtagataactctatattgtgaaactgcctcaacctcagaagtgtagtttcatataaacttcaaggtgagaatattgatttcattcagatcagaagtgtgtgatgttacgccatcgatcaagacaaacatgatgtacatcaaaagccgcattggatatggcgagtcagtatgtgtgatgaggtccttgtgagatgtccagatcatttagattaattggctcgcattgccgttttcagttcgaacatagtccacatgatcgtacatgtgtataattacagtcggctctcaacaagacccgggatagctttacgcaaagataactcaaataaatgaaatgattcatttctatatacatcctatttatggagcaatgactttgactacttcacaac

SEQ ID NO: 931 - DNA, 805 bp, Xanthophyllomyces dendrorhous
ttcggattcccttctctctcaggagaggctcagccagttctctggtagagctgaaccactctgtgggccaatctgggccacagataatattcgagcaaagtgttacggtagcacccccgctttacacgcgggtagctagggttcgactccctgtgctcgaatagcagtataaattatctgtgtcttgattgtccgagtggttcaggaactggcttgtgagccagggaagcggggttcgattccccgacaaggcgcctgtccccattcgtaaagccttgggctttacttggggccagggacaatcttcctagaagaagttccttagccgatggctaattccttcttcaggaagatttgaaaaactctccgagtttttcccccttgcgagggaatctctttcccagagatcctccggaactcggggttctacagcgggtattaacccacgcgttggtgggttattttcccgctgtagagacccgagtcctcggccctctctgagaaagacccctatgctccgggaactctactctcgtagcctaaggtcttgcccaagggcataggctacgagagtagagacccctcccctagggtgtggaaggtcctgtccttattcttttccctcttttactacaaccgtgcaagagggaaaagaaaggacagacgaagaagaagccattttcgctgcgcttcagtggcttcttcttctcctcccaccccctgtggatgggccggagcatagcttgtgccccggacctcacccccgagtcacgggggtcccgtttccggctctaaatcccctctc

SEQ ID NO: 932 - DNA, 494 bp, Xanthophyllomyces dendrorhous
ttcggattcccttctctctcggaaaggtaacattatgttatctttccatagcgcctcttcgcttagtggtaaagcgagtagtctctggactactcactcgggttcgattcccgaagaggcttaatgatcaagataacataatggaagtgtgtgggcttcatgcgccctcggtcacggttcgactccgtgtcttgataccctgcggctaccaagccactcaggcgccccgtgaaactcggcaagccacctgggggccccctcaacacgagggcgtcgtgcgcagggcactcaccgctcctcggtgtaggagagcccccaaggcttgcctctcaggcgcatggtgaggagttctcgatcgagagtcgactccgtcatcccgctcactgcgttcggggaatcgtcgtcgcctctcttcttcaaaaagaaaatcggagacctaactctacgagctagtattttctttttgaagccgagagctcctcaatgctccgggg

SEQ ID NO: 933 - DNA, 4252 bp, Xanthophyllomyces dendrorhous
  misc_feature (347)..(356): n is a, c, g, or t
  misc_feature (1155)..(1164): n is a, c, g, or t
  misc_feature (1491)..(1500): n is a, c, g, or t
aagagaaaagagaagaagggaagaaaaggagaaacagaacaaaaaagaaaagaaaagaaaagagacaaaaaaagaaaagagacaagaaagaaaagaaaaagacagcaagaggttaaagacaaagacataccttcgatcgactcgacaggctcggacgttgacggcagtctcggacttggtgtaggctcgaccgtcgctatctctgtttccagcttgtcttcactgataagaactatatcagcgacaagcggccgtcgagggaagaaagaaaagaggacaaggaaagaaaagtgagcaaacaaagagaaaaagagcaaaagaaagatacctcttggtcagacttaccnnnnnnnnnnctctagcctgtcctcgactgttctatcagctttaggcgggactcgatcagcttcaggcgggactcgaccatctggtcgaccatcgcctcgatgtcctccttcttgacagacagccgttcggcccggctggacatccgcccaaagaccatgatctccgcgccaatgaactcgacggtggcatcggtgcacgccagagcgtcgtagacagatcgcttgttgagctcggtctcttctcgtgtgggcaggtcatcaaccctggctgtgagttcggccaaggaggtacgcacggacaggagatcggtcaacagatccgagggctgaacgagggatgaccgcgtgtatacacaggctgacgctgctagagggtagtcgagttcgattgggacaggttgaaagcacaaactttggccgcatgagtgaacagcatgaatagcaaggaatggcaaaaagagaagagaaaagagaagaagggaagaaaaggagaaacagaacaaaaaagaaaagaaaagaaaagagacaaaaaaagaaaagagacaagaaagaaaagaaaaagacagcaagaggttaaagacaaagacataccttcgatcgactcgacaggctcggacgttgacggcagtctcggacttggtgtaggctcgaccgtcgctatctctgtttccagcttgtcttcactgataagaactatatcagcgacaagcggccgtcgagggaagaaagaaaagaggacaaggaaagaaaagtgagcaaacaaagagaaaaagagcaaaagaaagatacctcttggtcagacttaccnnnnnnnnnnaagaaaaggagaaacagaacaaaaaagaaaagaaaagaaaagagacaaaaaaagaaaagagacaagaaagaaaagaaaaagacagcaagaggttaaagacaaagacataccttcgatcgactcgacaggctcggacgttgacggcagtctcggacttggtgtaggctcgaccgtcgctatctctgtttccagcttgtcttcactgataagaactatatcagcgacaagcggccgtcgagggaagaaagaaaagaggacaaggaaagaaaagtgagcaaacaaagagaaaaagagcaaaagaaagatacctcttggtcagacttaccnnnnnnnnnnatcaggccgagctgctttgggcggcacggtccgatcctccatcgcttcgtcaccattcgctctgtcgtcaggctcttccccatactcatcagcctcagcctcgaccggcatgggtttctcttggtcttctggcagagtggcctcgacaggctggccggcttctttctttggccgagcgttacaggtggtcgatggcttctgagagatagtttgcttcgtcatcttctttgctcgagagctcgcagtcggctggagaagcctggagttcgacttgccgttccggctgacatgcaagctgctgttcgagctggtctttctaccggtcatagaaatcaaaggacgataggccggatgagacggggtcgatctcgactgactgacagaacagaagagtgaatggacgagggggaaaaggaaaggagcagaaaagaaaagaaaagaaagggaaataaagggaaggagaagggagaaagaagatcgggagaagtgagaaagaacacagggggaagggaggggttggtacgaacgctgaggcaatgccttctcctacagcaccagacgaaccgctctccacagaagagagttctgcaggcggtgcttgttcgccctcgctcgtggttgactggctgtttgcgtagtgctgaaggataaggccgataagagcctctgtcttctggtttgctcctttgataccgagtgtctgtgtgatgagagacaagaaagagatgatccagaagtagggaaagaagcatatgatgagtacgacagcgagacagagaaaaagagacagacagagcagagacggaccttgcatagcttctggacgtccacccgcttcaatccatgcagctcgatagaggtcggtgacatggcagtcggttgatagatgtgttggtgctgggacaatcgtggacggctgtggtcgagtgcgaaccagtataaacgcgtgtaaacagagtagagccaaggcaggcgaggtagaagaaagtggatcaatcggtaagtccgtcgtcgtcggtgcaagatgaacgacaccagatgtgccagtcggccaaggtctatgtggtctggacgggaagcagacgaaagcagaagtggaagcgggaaggatgagtgtcgttcaagcgtggtaaggatgttgagcggatagagaaatcaaccgcgtcatctgccgtcgcgttccggagaaggcgacatggccagcctctctagttacgtgtcggagcgggtcgatcgttcggttgacgatgactgcccgttaggccaccagctttgatcacagatcatctcaaccatgactacgactcaaaacaagaatacaccggctgtttattttggaactgatgaggatcgactcgtgtagaaacgaaagtgtgttttctcgcgagataacatgccatttgatagttctctagatgagtcgtcgtctcgtggtgtggatggcctgatactcgatgtacgaccggactatgattagggttacagttgaaaggcacagtcgtcgcaactacgatcgcatccctagtcgcggtcactagctggactacatccggtcgtcgagtccggcaagcctccatctccgtttcacttacccagtgcccgtgctggtgtcaataccagcatcagtgcccgtagaggctcctgtgatagtacctgtgattctgcatgtaccgaccatggctagtaactgactcgcttgcgacggatgggcaaagatcttgtcggctgtatctcttgtcggcggctcattcggttgttccagagtgcagcgtcgctgactggactgacatccctgtccaccttgacctcccgacggtctgataccttgatgctctagcactctgacactctggtgctctgatactctgacactctgatggctttctcctctggatgttcatgtgttctactgccttgcctctgctttctcttgtgcacaagctgaccatgtctcgatccgactgctcgttcgttctgttcctgctcccgctgctgccaacaaccacacatgtccatctaccagtctgcctgacgaagagagctcagacacagaccgagtgagcgaacggacgagcaagcgatcgagtgtcttgtacccggacgtcggccgccgagctgtgtggtgtgagcttggccaggtacgatacgcaggtttgccattcctggtcgtacagaacgcagtcccttttcccctttgttttcctcgattactccatttcttttctttccccgtttcccctgtcctctctgttctcttttctctgttctctgtttgatctctgtgtgtcatgccatcttccactctgttctttgacttgcttctcagtgatagacgaccgatggccagggtggtcatgcctagtctggtggctagctggccgtccggacagtcgctcgccctcaggacgcgctagctggtcccgctcttgtgatctttcgctctgttcatgtcagatgtctcgacttcttcttgtaccaagccagtcctttacctagcgaatgacctgccgacctttcgacctattgatctgtctgcctatcttgtcgcgtcgatgaagtgatcaggccgggtgttctgtaagtgctctacttgcacatcgacctatataccgagccgcatacctgtttgtcagcccgcttatctgtctggacacttgtccgtccagagtacaaaaggtactgcgctgttttgtgttgcaacactcttccgaccatcaaccacgaacactccatcgaccgattacaacccgct

SEQ ID NO: 934 - DNA, 468 bp, Xanthophyllomyces dendrorhous
cgcttcactcgccgttactaggggaatccttgttagtttcttttcctccgcttattgatatgcttaagttcagcgggtagtcctacctgatttgaggcccgatcagaagtgtgcgcatgcagtccgcaaagaccacacacacagtatcgttagaagcagttcgcatgcgtcgtttagttgtactagctagtctgcgtgtccccgaggaaacccacacactcacacagacagcgacactcgacgacaatttcttatcatgtcaaggcaccgcccgcgcttcgccagcacagacgcacacacccactgatcgttttaagacgagccgacccccgaacccaaatcagggccagcagaaccgtccaagtccaagccaggcgcctctcaaccaaagaaaggacacccggttgagagtgtttcatgacactcaaacaggcatgctcctcggaataccaaggagcgcaaggtgcg

SEQ ID NO: 935 - DNA, 487 bp, Xanthophyllomyces dendrorhous
accgattgatccactttcttctacctcgcctgccttggctctactctgtttacacgcgtttatactggttcgcactcgaccacagccgtccacgattgtcccagcaccaacacatctatcaaccgactgccatgtcaccgacctctatcgagctgcatggattgaagcgggtggacgtccagaagctatgcaaggtccgtctctgctctgtctgtctctttttctctgtctcgctgtcgtactcatcatatgcttctttccctacttctggatcatctctttcttgtctctcatcacacagacactcggtatcaaaggagcaaaccagaagacagaggctcttatcggccttatccttcagcactacgcaaacagccagtcaaccacgagcgagggcgaacaagcaccgcctgcagaactctcttctgtggagagcggttcgtctggtgctgtaggagaaggcattgcctcagcgttcgtaccaacc

SEQ ID NO: 936 - DNA, 1017 bp, Xanthophyllomyces dendrorhous
gtgaagtagctgccgtgaggtagctgccgacaggtataacgcgccacatctgttgttgatggacacgctttatgcatgccgttgtgcgcatgcaatatgacggtgggatgccagtaggtgcgttgttcaggcgtcggctgtggttgcattcttgtgaatgcttgccggtctcagtgcgatggtctgtcacacgttttctcagctgctgcaaagtggcttttgcgccatcagcgtgtatgagaatcactcgaaggacctcgagcaacaagctggtctcacgatatgtgcgtcaacgctgatcccaaacaccattgtgtacatgcccggcacgaaggctcgtttagacaaggaccacgtgccctcagtgtcaatgcacttgcgaagctcagtgaacgctgtcatgttgccgtgcgacacgcgcaattcttgcctttagcaagctctgacgatctgagctggagaaatctgcacacgacggggacgaacgacagacacaggcaagaagcctcatcggatatctacattcagctttacgccctcaccgactacaagcctgatgccagtcgcagcgtggcacagcttgtaatctgtcgcgatgagcatgctctgagcgtgcataactacgaccctgatgagtagcatgctactactttgtgaaggaccaacacagtcacgtatcagagcgctaagcatgagtcgccacgcttttgcatacgacattgatgtcgatagcatgagacatgccatttacggctctcggtacccgccattacgtgatgtgcatgtgcaattgtgctgcagaacatcgtcgatctgatgagcataagccaggaggaaataagtgaacaacgtcagacaaagaaatatgaacgcgagtgtacgatgcggtctgctaagtaggaggatgagagcgaactccactgcgcacggcattgagaggaggaaggggacatccagaccagcttgcaacgatctctcacagatgcatcagcctcctgtgtccagcgcccaacatgc

SEQ ID NO: 937 - DNA, 393 bp, Xanthophyllomyces dendrorhous
attcttgttgagagaatcaggggatcagaatcagaatcagtttgagggaatcaggtgttttgatacaattagaatcggaattaggcaatcagaagatatataacaaagagctccctaattcatcacgtagtcgttggcaggatggttcggagggtgagggttctcaaagttagcaaacgacgactcggacagcttggtgtatagcggcacactcgacggctctgcatcagtgggctcggctggcttgacatcggaaggcatctctgtagcagtagagttagtcagaatctgaatctgacagcaaatacggtttcgtattgctgtagatgagaaatataaaacaataccaaactcagcgacacagaaacggttctggtaaatgctgaggaagga

SEQ ID NO: 938 - DNA, 386 bp, Xanthophyllomyces dendrorhous
cacagacagcacagacagcacagacagcacagacagcacagacagcacagacagcacagacagcactcactccagaggccagtccccaagccacacatgcacatccgtgtggcacaccccagagtacacgatccgcacaagcacctctcccggcttgaggtccttctgctgggtcaccggccagtcctctcggagcgtcagggggccgttggcctcctcgaacacccacgccttctgggtctctgcacagagcagcacaagacagcgcatgacggcagatgcgatcacaggagagcagagacagtcgtcagtcaccgatcgctagcaaacatgtccgctcaggcatagacaggtatataggcatataggcatataggcatataggc

SEQ ID NO: 939 - DNA, 576 bp, Xanthophyllomyces dendrorhous
gtttgttctagccctttgggctagaacaaacagcatggtcgaacacaagctgagcattctcctttctcagctctcacagcatcaacaggactcactggctgaaaacgcgacgttcctcggccgcagatggctcaacatcatccccttcacctcctcgctctccctcagagacgtccacatcgccgccggtctccacttcctcaccttctgccccggccggtccgacctctgcaacagctgccaccaccagaaccactacggacacgacgaggtctgccacggccgcaacccagacaccctcgctagacacggcaacatcaagcggttagtacacaagtcgctcgctgcgaacagcatgttcaacgtagagaacgaaccacttgtccctggcacctccatgcggaccgatctccggatcacttcgcccgacggtgtcgtcgagatcgacgtcgctgtagtctcgatcgcatccgacgccgcacgagagatcgccagacggacccatctgtacccacaggccgccaaacaaaacagatcagcctttgccactcggttcgccagacggaacgacccgcc

SEQ ID NO: 940 - DNA, 406 bp, Xanthophyllomyces dendrorhous
cgccttcgtcttcgtcttcgtcttcgtcttcgtcttcgtcttcgtcttcggtacggcgtcccctctgttgtgtcttctctgttgtgtcctctctatgatgtcctcttctgtgagaagacaaggagaatggcacagtctgcacggtacatgaccagcggcgtataaggcaagcgggcgagctacagactcctcatagtagatcgacccagccatctagagagacaacgactggcttgggagagagtgagtgtctcgcagaaagtgtaggtgtctcgcagatagagtgaggctacatcaacggacgcgcgatgagcggcagagagaacgaaaggaccggactgctttgcgatgcgtgtggtgtggtgcatagtatgtggtgcatagtatgtggtgcatagtatgtggt

SEQ ID NO: 941 - DNA, 446 bp, Xanthophyllomyces dendrorhous
gtgtgctcgccatcacgtgagccccccagcccgccgtcccttcccccagttttcacactccggccggcagggggggtcgaccaaacgtataaaggccggccgccctgccagcgttcctcctgtcttctttcttttccctcatcctctctggccttttggcttagatcatgtgtagtatctgttcttataagtttaaccacttatatgggtccaccggacccatctggtttacttctttttgccttgcccgtccggccatcctctgcttgcacgacggccggacacgatgaccttgccactgcactgccggcttgtgttgtcagggacctcctctaccttcttcccatttgtgtcgaccggctgctttccactttttcttggattcagtcggtcgacgagatggcagtcttgatgatgtgtgtgtactgtgctgttgtcgttgatgc

SEQ ID NO: 942 - DNA, 1288 bp, Xanthophyllomyces dendrorhous
gagcgaccactgcgtgccgtgctcagccagaccgccgttgtccagagacatgtcgagccctcctgcggtcgtcgagagcagcgtccgacgacctgtgtccagccccacgacctcgtcctctggccgcaaaccctacggaagatactctgctcggtgacggtccttgtcttcgccctcccatctccatccgtagtcgtcgatgccagatggaggcgatgtcggtctcagcattccggcagacacgccgattccgtccgtactgagcgacatgtcgaaatgtcgctttctggtcttgactttggatacataaaacgactgcctccatcaagcgtcagaggcagctcggcggagcatgttcacgatgtcatgattctggcgagccgtgagccaggatatggctttgtcgttggttatgttgcccagatatctacgatggcggtaagtaggtcaattcatgcccacagccagctacactgtagggaaatggatcattgccattgccaaagagatccttcattttgagtctgtgaactgttgttcagcagagaagaaagcgctttggaggatgttgagcacttgactccgtgtcaccgctccttagtgcagatcacctgcttgcctgccgatagtgacggcctggacatacaggcgcatcattgaggagaggtctggagtgggagcttcaccgaaccagagtgtcaagacgtgtggtttcagaaggtaaggcgcgtcagatgttgtacaacccagtcaggcgacgaccgactcgatcgggcccgcagggggttcagaggcgagtaaggagccaaagccgaccttcaccgttcacgacaccagaaggactgctgcagcagcgcggattaatactccgtagcgtgagccatagagaaggcatgggcaatccaatcgccttggatggccaacctaatgataggctgagcatctgtcagtggtagtagtatcagctgcaaggtaaccctaaccgggttctaatccgttcccttgcgctttatgtcgaacacaaggggagcgacaccctttgagccgactgatgagtgttctaacgtgaagaagtaatctaatgtggaagagtgtcctcatcccccgacttctttctgtctcatatgcggtcgacatcgatgcctccttccttgtaggagaccccctctgatcggttcgactggccgtcggtcgcgatgaacaacgtcgtgaagaccatcggtgccggctctaccgtttacagacggagacatgaacatacagagagacgaagcaacaaatagacaca

SEQ ID NO: 943 - DNA, 313 bp, Xanthophyllomyces dendrorhous
cttcctccctatacttgatcgacatcaagtgcagctctcgccctttctctttcagcatcacattggccgaatccgcctctgactttgcgtctgctgcccccaaaaagtcacatatctctcgcaactgcctctcttcgaccctccatcccttctcctcgtccagcagctgcttgatctctacacaagctaccagcctggtcagtcgttgtccctctgtccatcttccatccaactcatctgacgtcatatggtttctccatacactccatctcactccacagtctcttccgctccaatgtctcctgcttcagag

SEQ ID NO: 944 - DNA, 460 bp, Xanthophyllomyces dendrorhous
atgcccatgagaagacgacgagaaggcgccgtcgccgaaggccaggaaggtgcgtggacgtcctgctgacagacggagcgccacctggtggtacgcttgctcgcggctgatgtgtgcgccccagcgaagacgtctccaccgtcgagcagcgaagaacgtcgcgagcgaagagtaggactgagagtgtatgacgagagcagcgcgaagatcatcaacactgtcagatatgaacgaaggaagatctggagaaagacatcggagaaagaagccgaatcaagacaccgatatgggcaaggcagtctgcaaggtcagtaaggctgtctatacagtcagcttgaacgtgagtgtgaacgtgagaggcactcaccacggagagtggttgacactttcggatggttcttcatccacagccgctgtttccgagcgtctcggtccatccccgcaaggtgcttccatgact

SEQ ID NO: 945 - DNA, 952 bp, Xanthophyllomyces dendrorhous
  misc_feature (129)..(138): n is a, c, g, or t
  misc_feature (297)..(306): n is a, c, g, or t
catcagtttgtagctcagagccaggctcgtattctggcgctcgaacaacaactggctcatacccaggcgttggctctggcgccttctgttgacatcacagactcttcccgcttctttgagccctcggtnnnnnnnnnncttctttcttccttctcctaccttcttctctctcccatctcgttctatctttgtaccaccccttgcgttatgcccgacgagcaagaggcctcttcctctagcgttgagattgctgatcaacccatgcctgatcttcctgttgatgacgagaaccaatgnnnnnnnnnnctaacctgagggtcttcaccataggacctcctcctctcttcgtctcgtgcgctttgtgatcattgtagtctgcttgtgtgtgtccaattgtaaattctgtggtggttgtaacttcgttctcggcttatctccagacgcgtcctctccctcttgttttgtaatttccctcttgtcgtcgttcttccttctttcttccttctcctaccttcttctctctcccatctcgttctatctttgtaccaccccttgcgttatgcccgacgagcaagaggcctcttcctctagcgttgagattgctgatcaacccatgcctgatcttcctgttgatgacgagaaccaatggcatcagtttgtagctcagagccaggctcgtattctggcgctcgaacaacaactggctcatacccaggcgttggctctggcgccttctgttgacatcacagactcttcccgcttctttgagccctcggtagtgcctcctgagacgttcgatggctcccgacgatcggactgccgtcgattcctcgctcaatgcaggatcactttccagtcgcgaccgggcatagtaaagacttttttgccatcagttctcttcgtggtggtctgtttgactatgttgacacctttctagacgaagacaagaccc

SEQ ID NO: 946 - DNA, 4415 bp, Xanthophyllomyces dendrorhous
agagagaaacgaaaactccgtgagctattttccggagtgaataggtgcctcgatgcattcaagctcatactctccgagcacattgcttgcagctctcgggctagcaatctcactcctctagaagtgagtaaaactcgtataagacgatgaacgtatattctcttgtcgcaagataactactctctgtagtagcagttgtgctatggagactagggcatagggcttccctatgctatcttctcattgattaagctgagaatgagctaagatctgtggacaagctatggtcgcgtagcattgttctcctgagacctctagagagggactcagttcattaaactagacatgaaacttcagcgcacggagaccctctgggtagtacggttagtcgttgtccaataaacctttcagtgaaagctttaaggccaactagttttacgagctttatcgtagctcggtactaaggcgatgcctatagtcaacacatgcgtgacctccatcgggcaaactattgagctgtgctctttcctatgccctcgcgaggtccctttgcgagaatgacagctcaggagagtctgttccctctagacagtgagctagaggggatagcctgagctatcatcctatggtagccttgtgctacctaagggaaggatgggtggaagccctcatcctcgctagagaagtcacttctctgcgctattgcgcctgcagtgtagagacttggtcaatgtccgcgaggatgaaccagctataggctgaacaagagcgaagcagattcgctgttcagatctagcttctatttagagctagggacacaggcgtgtccaaattccgtgccagcagacgcggtaagacggtaacgcctagtctagtacttattgcctaggcgtacagggtgcgtaagcggtgcttcaagcactagagtcgtcgatagcaggctctagactatgatagcggtgaaatgctatcatcatagtctatgatcctacagcgaaagctgcctgcttgaagctgactgacgctgtagcacgaacggggaatgacccgacggagattagagacctcccgaggcccgcctgtcaacgatgcatacctgcaatctctcttgcgtctcagagctacgccaactagctctgattccgtagagatctcgcagatcgagaagaagagtatgtcgcctggagggtacgttcgcaagacggacgaccaaacgatatgacggctaagaagcacacgttgcggcccatgatgtttaatgtgatagtccgcaaggaatcttacccgtactggtaagggggtcgtcctctgggcgatctcctccaggggttgcaaggctgtcgccagtccgtggtctcagacctaaggtttaatcctacaacgggcgttgttctcgacacggctttgctgtgtatcggtacagtggaaaagagtgtcctttccacctcccgactctggagagcaaagactagtcgatttggcccttatgtacggggcaacagtcgtggagaccacgttctctgagtggagaatagtgaagacgagggcatttgcacctggaactcggtgcaatcaactcgtagtaacgagtaatcttgggcacctcatcaaggtgaaggatgctttcttagtgcacataccgctcatcaaaggctgatagtctatcgctggcggagctctatagcgatccagcataggtaatcagccttaagttgcaacacggtcgtgccaggggaacctggtgcgggcttgtcgtggctcgggccattgcccacacccatttacccctgtaagagaggacttaggtcttggacgaggggagcagttgaaaagacgaagcttctagcaacctaaagctagtgcgcattagcgtgagagagagacgtctctctgagtggattgtacctagtatgctactaggactctgtcggttccgaaaggaggagtcttagtaccgaaaagaaaaggcataagtacaggagtttggctctatgcctatcctttcggcgttagagctggaagtgttctggttcccagctagaacatggaagcgctctagcgctgcgagggcggggacggtagtcgtcccttcttgcggaaaggtacgaaaaaagagatattgcacggggtctagttacccgtgaggcttagcttcatggatacataggccataaaggccgtttgcttattagggatatctaaagggttgtgaccttgagctcacgcatcgacgaaatgtaggagatctcatgaagaactagtccaaagactataaccagtcctccttcggatgcctgtaaaagggtgttcaaggaccgcataagggtgtgaaagccttcttgcttagatgccgggagcagctgtagagctgtgcgttgaagagtgagagaacttgtgtaagggactgcacaaaggttaaggatacgggcgattgcgcagcccctgaggagattagattatccgtctagtctctccgggggaccaactgggtaacggtgggtcccgtcaagacttagtcggagtgtagagaagagaaggattggttatgcgaagggagacagtggtcttggtacaggagcaatccgtgtcgagaaaggctatccattagcgaaagtaggtacccgaaacgaattgcgaaactagccttaatagagaggctaggcgtgggtgagactctagggatagagtgtcaaccggagacggaggcttttgaaagagaattgctaaaccgcagaggattcatgtgtggttaaaaacagtcataataggctgtgcctatggcccgtggaacaggggacagtatccttagtattccgtgagggtaaggaactagaagaacatcagcattgtctgtatacactagcctttattggccaggagtgtgtatacagtatgcttctgtataggggcgggaggacaccgctctaagggatccagagcactagcaagacacaatgtgccactctcgacaaacctcagtaagctctccccaagcgtggagttggtgctggaggagagagctggttacagtcgagcgacaccttgaagacgaattagagggcacaagccaagaacccttatacaggagaagaagagaatgcagctgaaagctctgctagccgacaaaaacgatggagcaacaccttgggtagggtgccaagatagtcggtgttgtggagaactaggtgacagttgtctgggaaattattgaccacaggaatggagcatgagagtgtttggatcgctaacaagcgagacactagagggtcgttgtaagataccgtaggagagtccagggatgtctacgtgagcaatacaactgggggccgctagccaaaaatgtggaagaggtactagggatcgcctaaacagagagagaagataggtgtggctcattaagcgcatggaagctggtagaacaggggaagtgtggaatagggacgtaatcaattgctctgggttagagagttatgctcaaaaggaaaccttgtaaagggtagacttttggagtctagagggtgagtaagccctcgaggactggacctgatagcggtgtaagccgctagaagtagcacgcaggaaacaatagataactcagaaatctacggaccagtgtctacctgaagatttcttcgggagtgcatagacatgggctttagatccttgaactcatgaccggtagttgtggttgccattagtgcatcggaactacgggtcatgagggaacggggatttagagctgggatcgtaggtgggaaatgccacaacagcacccgctgttgtacacctcttcgtgaggggtcttggtactatgtttagccgcctttggccgctatggatcatggtatcatagtgggctgagactgtagaggtgtatctacagccacagctctcccctattgaagagtggcaagtcccacctacggctggtccttaggctagtggctcgtgagagagctagctgtagacggtatactgagcgttaagcaacaaagttgtaagcgtagatcagtgtctcgaaacgtgcctaacactcgggagtgctagcggagctatttcttcgacaacgtctcaatagaaaggaacgaacgtcgtttgatagtgacgtgaaggacctctctggaaaaaaggacttctgagtgtaagaggggataagggatccccgattaggaaggaaagagaaatttgggaggctagtagagcctctgttagggatgaacagatagaaagctagagaacccttggaaggtcttgctacgtcaagggattctctagaaggaatcatggagatcgtcaggggagtctggaactcctcgtgtagagttgggaaggctaggagggccttcgttaaggaatgaagagaagacaactcaacagagtctcggaagggcatcagacgtcgagagctctgtctc

SEQ ID NO: 947 - DNA, 415 bp, Xanthophyllomyces dendrorhous
gtcttgatcagtcggtccagaccgacggctagctccgaccagcatcccgctacgtcctcacatcacgatcagatagacacagagaccatacagactaggctcgctcgtctccaccttgagcagttcatccctcagcttgttttgtatctctggccgagtcgacaacgagtggagcatccaggtcagagcagtcgaagatgtcctaagatgcaagagaagtaaagagatccaccagcgagtgtaccggtatgggcgtgtaggtgtgagcgtatgtacttgaccatgagaacgagatatcacaagacaccagcataggacgtactcaaacccagctaggaggagcgtagagatctgcgcgagcacttcctcatcacccagtcggttctgctcagccagatcggtagccatgttcgcc

SEQ ID NO: 948 - DNA, 1061 bp, Xanthophyllomyces dendrorhous
  misc_feature (568)..(577): n is a, c, g, or t
tcattgctgtcaccggggcacaagtacttgtctgattagatgtgattgttgtctcttaatacaaaccgttggtatatcacctggaaccgaacaccggacgtcaaagcaaatacatggatggagataattaaactcatataaaaatgtggaccacgcctgtcaatctcatgaggcatgacaaaaatttgctgaagcaaaccatatgactttgagccgcagtgatgctcgacagatcaattgtatctagctgtgagacaagtcaaattcaacaattccaagcccttgttttatgaggaaatctgacggactgtttttatcaactatgatatcagtttcccataacaaggatgtatgaactttgaccgttacatatgtaccttttccacgcctacttttccacgtacgtaaaatgataaagcacaacaaaaaaaatcattgtggaacttcatgctattcgtaggtgcgtgtccagcctgctacaagactgtctaaatgtgagtagttgctttgtctttataacgaacacatcatgctactgctttggttcgtcgactcagtttttcagagnnnnnnnnnntggatggagataattaaactcatataaaaatttggaccacgcctgtcaatctcatgaggcatgacaaaaatttgctgaagcaaaccatatgactttgagccgcagtgatgctcgacagatcagttgtatctagctgtgagacaagtcaaattcaacaactccaagcccttgttttatgaggaaatctgacggactgtttttatcaactatgatatcagtttcccataacaaggatgtatgaactttgaccgttacatatgtaccttttccacgcctacttttccacgtacgtaaaatgataaagcacaacaaaaaaagtcgttgcggaacttcatgctattcataggtgcgtgtccagcctgctacaagactgtctaaatgtgagtagttgctttgtcttcataacgaacacgtcatgctactgctttggtttgtcgactcagtttttcagagcatcagagtagacaaaaaacgtagataactc

SEQ ID NO: 949 - DNA, 604 bp, Xanthophyllomyces dendrorhous
  misc_feature (310)..(319): n is a, c, g, or t
atagagtaagatggaaggaaacaagataagacgaaaagaaaacgagataagatggaaaggaaagaagataagatagaaagaaagaaaagaaaagaaaagaaaagaaaagaagatggtaggaataaagcagagtaaaagtaaaagtgaaataaagtaaaatgaagaagcgaggaataaagaagatagaaataaagaagcgaaaagaaacaaagtcaagtgaaacaaagtggaataaagtaaagtaaaggcaagtaaagtaaaggcaagtaaagtaaaggcaagtaaagtaaaggcaagtaaagtaaaggcnnnnnnnnnngaaagaagataagatagaaagaaagaaaagaaaagaaaagaaaagaaaagaagatggtaggaataaagcagagtaaaagtaaaagtgaaataaagtaaaatgaagaagcgaggaataaagaagatagaaataaagaagcgaaaagaaacaaagtcaagtgaaacaaagtggaataaagtaaagtaaaggcaagtaaagtaaaggcaagtaaagtaaaggcaagtaaagtaaaggcaagtaaagtaaaggcaagtaaagtaaaggcaagtaaagtaaaggcaagta

SEQ ID NO: 950 - DNA, 871 bp, Xanthophyllomyces dendrorhous
  misc_feature (365)..(374): n is a, c, g, or t
aagtcctccccatccgtctcgccaatcgagctctacaccgactcggactatgctgaagacaaggcgtcaagaaaatcagttactgggatcatgatctatgtgtttggagctctggtctactggaaaagcaagcgcataccatcgatcaccaagtcgtcctgggagtcggaatacatagctctctcgaacggagcctcgcaggtcgtctgggtccggtcgcttctccaccagctcggttattctgttccgaccatcgtcgccaagactgacaaccaaggagccatagcgagtgtcagaagcggtcagctacacaacaaaacgaaacacatcgatgtcccgtacaagtacgcgagggacatgtacannnnnnnnnnaaagtcctccccatccgtctcgccaatcgagctctacaccgactcggactatgctgaagacaaggcgtcaagaaaatcagttactgggatcatgatctatgtgtttggagctctggtctactggaaaagcaagcgcataccatcgatcaccaagtcgtcctgggagtcggaatacatagctctctcgaacggagcctcgcaggtcgtctgggtccggtcgcttctccaccagctcggttattctgttccgaccatcgtcgccaagactggcaaccaaggagccatagcgagtgtcagaagcggtcagctacacaacaaaacgaaacacatcgatgtcccgtacaagtacgcgagggacatgtacagacaaggcatccttgacctcggatgggtcaagacaaaggacctgccggcagacttactcaccaagccgcttccgagagagacgttcgagtatctgagagacaaaggcggtcttggtggtcgagtgggagctc

SEQ ID NO: 951 - DNA, 2023 bp, Xanthophyllomyces dendrorhous
gtgtggggtgtgaggggtgtgaggtgcgtcatgcacaggcagaaacgaaaagatacagcccggtcagccagccagtcgagcgcatgcctccctccgaacagagtgaaaagcagacaggacgaacccaaagacggcaacgccgagcatgttcagcaggaagatcgccgcgatcatgatcgtacaccagatggcaggcgagtactttttgtggtcccagtactggatgacgacgactccggcactgaaggagtgaacgcaccaagacgacgcaaacacagcgcacacacacagtgcaaacacagcgcaagtgaagaagcacaaacacaacgcaaatgaagtacgaacacagtacagaacaggacatcagtcacgagaggccggtgggtcgacccgaaaagacaagcgatggctacgtacgtgatgttgttgggcgtgacgatgaggtacttgaacaggtagttgtatccgagagagaagccaagctgggcacaggcacacacacaggcacaggcacaggtacaggcacacagatgcgttcgtcagtcgacacatcagaccggtccgatcgacatcaggcacactcacagcagggtcaaagaaccgggaagagtatccagcaaagccttgcttgtgcggcaagaacgtcgcctgctctcccagactgatcatcaccatgtagcagacaagacccatgatcgagtagcccatctgagcgacagtcagagaagcacgacaaaacaccagacgcaacaccagacgaaacaggaggatgagcatgactggaaggcgatcacagcagaagacgagccaacagcagaggagcagagctcggtgcagtagaacccagcagaacacgtaccagcagcccgacaggtcccgactttgacagagcagaaccagaaccgatgatcagacccgttccgacagcctagaagcaaccgacaggatgcagagagagcacaagcgccaaggcgttagcagatggcacgcaaagacagagcacaaccgccgtcacaggacgacacaagatggaagagacctactcctccgatggcaatcatactgatctggatgggtcgcaaggcgcgcgcagcagatctcggtcagaacgacagacacagtccgcgaagagagcgacaagacaaacggagaaaagggaaggaaacaggaaaaagaagaaggaaaaaaaaagaagaaaaaagggaaaagaaaagaaggaagaacaaaagagaagcatggacggtacggacatgtctggccttgagccctcggtgggtcgtcgtgttttcgatctggccgtacttgtcgtcgacgtcttctgcagcaggcacggtcgcatggaaggcgcctccgtccttctcaaagtctttcgatccgtactcctcgtctacgcggtcgtccatcgtgggaagagagcaagagagaggggtgaggggtgagggtgagagtgagggtgagggtgagggtgagggtaagagtggtagaggacacaggagtccagcgagtccagcgagtccagcaagaaagaagaaaaaaaggcgcggacgggtggagaggacacgagcgcaagagagaggaaagagagagaagaaggatggaaaggatggggaagaagaaagtcgaaaggggaaagccggacggatggcgacgattcaagtagtcctcgcgtgcttcccatttttctgtccttatccgtttgcccgctctctttgtcgtcttgtctctcggacgctcagcctgtcgacctatctctgggacgatgtcgcctgtggcctgtgaccttggtgtggccttggtgtggcacggtggggacggtcagtccagacggggctcatcgatctgtttgaaggaggacagcgcaaattggctatcgtccatccttatcagctgatggctatctctgccgccttctgcctcgcgagatctgggtccgattcggggtgggtgtgcctgtgtgtgcctgtgtgtgcctgtggacgtgcctgtggacgtgcctgtggacgtgcctgtggacgtgcctgtg

SEQ ID NO: 952 - DNA, 94576 bp, Xanthophyllomyces dendrorhous
ctctgtttcgttgtctgtatatctttgtgcgtctgcgtctgcgtctgtggactgtagattgtagagccttcaccaggccgttcatcatgaccggcagccagtcgaaccgatccaacggcttatcttgcagccaaacagatgtcagcatcgtcaccatcgtcaccatcgtcaccatcgtcagcctcgtcagcctacaagacacagagaagtcggaatgacgagaacaatcatccgcgttgaacactcatcagcggtgctagtgttcgccaatgctactgccgctttagccgcccaggctgacgctcgtccttttgctgaggctgacactgtttccaccaacggacgcaagctgaacacgtgacccatggaattccgggggttcaagatccgaggacgtccattctcggaaggattacgtattgatcaccttcggttgcggctaccttctattgaccaaatccatactactgattccgtatacatcgaccttgttcccgtcatctttgctacacatatcgagagcgaacgacacactagggcatatagcaaatctgggtgtaaataatggccaagcagcatgtctcttcacctcctcggtcagaaggttctcctcaatacgcgtcagagcctgatcagatgcacccagtagaaaccaaatcaaagttgaaatctgtcgttcaggagtatctgaacgacatcaagccgctgttgatcaagaagaacttcaagaagttgactagatgtttggttgccacgtttgcggctctgattcttctggtcgacgaaaaatcattgaaggttatgggtcaggcaggtacgtccttcaccttgatataccctctctctcttcctcgtatgtaagagtagaaggtagagaggagtccgtcaacgcctcccatgcttagggaaacattcgtcgacacctcctgtctgattgttgtctttccttttcaacacaccgatcttccattactgatgtcatcctcttggtcccttgcttgattgatgtcaaaacgttcaattcgcttcattcgttcattcggttggtttgaaacgatgtaggattcttttgtgcaatggtatctgtcatggttcctcctagtctacccgtcagcctttttttcatggcatgctctgtaagtctcgtcatgaaccatctctcttctcatcgttgttatgtaaaactgagggagtgatcatatcatctgattttgggtttgatcatttggcatcatgaccagacgattttgatgggtatgctttttggctgggcttggggttgtgcagctatggcggctagtcttcaggctcgaagtaaaactctgttggcctcgacttatgagcgggtcacagtcgggtgagtactcatcctctatcctgtgcatctccttgtttccgctagccttctcacggtgtgattggaactaggttgaacaacaatccagatgctacatttagtagtagtatctttgccggcgacttccttgacccccgatcatctaccgtattcggaatctttctattttttggatgctgtacgtctatttctataatcttgattgttcgaccgcaaggtttgataagatttcggtttgctgcatcaagtcgctctgggtgcattgagagcgcatatcccaaaactcactctgatgagcgtatttggatccagtatgtccatctttatctctctctctctcttcactcagactaaaactctcgaactgaggaccttacaaccggcattgttcaacagttgtattggatgtgatgtgctcatatgggcctctgtttccctctcagcaatatacgcttgccgtaagtaattaattcatcgcccccctccttcatcaaacaactcatcacattcttcttcgcgtgccctttgtgtttgctttagacgatatttctgatccctacctcaagctacgtcgcaattggccttgtatgcactgtactcatcttcccagagtccctggcgcacgtctggttagacggaatgatcaacggatttttgaaggtgagcccctacgcttcgcacatgggaatcaaccatcacaaagaaacgttccggattgacacttcactatctccttcttcccaattgttctcataacaatccacacagatttcgctccagttggtggagctccaggaagtcaccttgtctcctaaatttcctttgagctcatcagagttgaagcttaacgttgagaaaggtcgagggttgagaggaaaaatgattgcaggaacgcaagccgtgaagggttccactgggttcgtttacattctcttctgtgaaaacaaacgatcgatctccaagagggtttctcatctctatgtgagggttgtgagatcagtatgctcgatttggaaccgacatatggacgacttggaccgggcgatctgaaaaagtttgatagcaagatgtctttcttgatgaccaaagtgctgtacgtcattcttcctttcctctgtctagaacgattctagccaagttttgactctatgtttctacctgggatccctaatccactcgctgtggctccttctcattgtagttctctccagacgttcgctccgatcgtctatgattctgttgtccggaccgagcaagatgagatactcctcagtcagatttactcctcctctggtatcaccagcaacaaacctcactctcacaagcacgtccagaaccttcgacatttgaagcttcgcacgcagatctctgaaaaggaacgtgcgaacggacacgatcttcaagcgcttttaccgatccttcggtcctcatctagtgaacttcgacagtcattgatcgacgcattaaaaagcttgattagttggctcgagatggctaatagtactcggtggtccaagttcttcaagaaaaatgataaaaacactcaagcccaggagatcgagcaaaagctggagatggagagaaagttggaggcacttcgacaggcgttggtcaagttcaaagagatcgagagaaggaacttggtggaaggcccgttcggcggatacttcaaggaattggaaaagaataaaaaaacgatcgaccgtttgaaccatgaagggttttctgcgaaaagtctctttgtctgtttcgtcttcacgtacatcttttgattctcgtcctgtcttgacttcctcatatgtgacaactacgtctgactacttgcgatgttttgtgggatatcataggacgacactcgaatcatatgccgaggccttcatctccttttttgaatttgccattcaacttcgaggtaaaaggccggcttctcgcctctggtggcctaccggatttggcaagctctggcgcaagatcacagcggatgacggtacccggtcgggcgagatcgattctcctctgatcagtgttgcaagtgatattggaaggccaaggacaagtgacgacaccttgaatcaagacgatctagcggaggaggaggcagatggagatgaagatgaagggcgcaagaagtttgcaggagggatagattacgatgagaaggaaccaaacttgggtaaactcaggataagctgtattattgacttatatatcgactgaccggacttcactctttttttcctttcaaatccctcattgatgataataagcccgagaccccgatgctaatcctcctaggaccggatttcagagaacaagtgtcaagattggggtctttttcggatggctcagatccagcaaaggccttttctctctacgttacgctctcgtctccgtttgcttatggggtgggtcttccatgttcttctctcgtctgaatggcaacgatcgagtctacacacgtgctaaatttgtccatcacacctcctccattcaaagtcattgctgtccatcccaagaccgcccaattcaattaccaaagtcagtctttcctacacctcgctcccactttctactggtttttgctcataatctatcgaatttccttcgaaaagatcgaggactctgggcgttgatcatgtcccagaccggacttgctgtattcgcaggagaacagatcgcaacattcattttacgaatgagtgggacggtagttggttgtgtgctcgggatggtagcttggtatatgggatcaggtcatgggaacggaaatccttacggcgttgtcagtatcgtctcaccatctttcggttttcttcctacggatcacccacccattcattctctacatttccatctgtgctgtcacatgccatccagattgcagctactgtaagtcatgaaagacatgtatgattagatgctcaatccatctgatggtctctcttgatattttctcatcgattctgggatcagctggttcttttgactccgtggatctttatgagaattgctttgcctcaacaaaaatccatgttttacctgatgagcggtaagctgaccagatgttctaaatccgagaggtgcctccttcaatggacttgttccttcatgctcatactttctccctacaggcatgatgatcgtcttcattgttggatactcatgggtcgacacgcatttgaccgtcacagtcaactctggcaaaggatacgagctcttttggaaacgagtcgtccttgtcacgatcggtttcactgctggtcagttcagaacagttttcatgatctgtagtttgcgtctgcgattaaaacacaactgaagaatgttatgcctcgatcatcgtgtaggattcatcatcatgtgttttcccaagattacctcggctcgaaccaccgtccgaaggacggcttgtatcatcaagtgagcttcctcggttacattctgagatctttaagccttctcaattgacttttcttcttcacttgtgaaatagtgagaagattgctggagtattcgaggatgagatcgagatcttcctccttgaagctcgacatgatgcacatactacagtgaatcaggctgaaatagacagatcgaagtctagcaaggagcgtcgaatgaagagcttatcgaaaaatctattggaaacagccgtaagccgtgtttcccaccaattgctccaagttctaaaagagatttgctaaaacctacagatgatgcagatgatcatgcaaatgatcaaaccgtcagtcactgtagcaaagtttgagcctcaagtccgagggccatggcgtgagtattgccgccttcggttgatttgtacgatgagcggatccatgagactcaccctcaactcatttataaaatagcgaaagagacatacgaacggctcttagatgctcagtatgtacctctcgtctggttgctggatttagtttttatcaactgactgcctgctatactttgcggttatagatggaagcttctggtcaacactgctctactctctggagcgctcaccgcgttgaatcctcattggtgctcggtacttgtccatcaggttcgtctttcttcttttcaagattcctcttcatgtcttctttcattcgcctgacttgttcactattgtatatcagactccattccttaacccggagttgataacagatatatttggaatcctgtcactgatcacccaatgcctctacaacggacatcctcttcctccgacgctgcattctcttcgagatcgattggtctaccatgatcggtcccgttcagccttctcgtcctcacgaaaagtttctccagacgagagagatgaggatgacgattcgacaggtacaaacgtagatggagactctttggatccatccactgagaagattgatggcgtctcgatgggtgtgaagaacataggactcgacactctgaccgtatgtccctttttcggctgtcttcctcagttctcctcctttctctcaggttctgatttcctccaaatctctcttctcttctctcacaactgaacgcatggatctcggcaggaccctcaattcccgattcacgccacagcagttgtctccataagtctttgtttgactcagatcgataccatcaccgatatcgttcgagagttgtgtggtgagacgggcacattccgagggtttgatcattggaggtttttgaacgtgaaagatgaggaggagggttacaggtctggtttgaatggacgcagaaagaaactcgattgatcggttcaatagcttccctgttcttctctcgggtctgggatactttttgtgtgttgtctaattgtaattcaaaatagtttgtgactcatgcaatcgttcgagattcatcactctatccatgtatgtatgcttccgttcgatgatccgtgtttccttcatctttggattcgtgagtttattttcctttcgtccttgaagagagtcttgtgaaactaagctccgagaacaatctttcggaacgtcgagtctgccaactccagagcttcagagatcttggagacttcggatccaactccttggaatgattcaggctttcctcctcccttttttcatttcatttgaaaagacaaccgacaaggcattatcaacgaagagttaacacaggaacagagaaggggcacaatatagaagaaagcacacaagaaaatagataggtaggaaagacaaacctttccgttcaacagatcgctcaaaggagcggcccaggtctttccgtcgatcgccttgatctccttgggcacgtagttgacgtacgtcaccttggatgggacttctgggtctacgttgatgatcgtcaccggcttgttgagcttcttcaagttaaggacgaccgtctagaaatcgaaacacaaaggacgaaacaatgagtccgaatgattcgaagttttgaaacaaaagagcaccaagtaaatgaaaagaaagaagagaacgaaaagacgcaccttgagactggcaccggatatcgagaagggtgagataaagagctcggcattcgggttttccttaaagtgagaggtgatcttctcggtaacctagatgacccgtcgtgtgatgcgatcagctgccgttcttcaacctttccggtcaaagacacaaaccgatcagaggatagtagaaagatgaactgacctccttggactcctgagcgcttcgcgccttggcctcctcagtgaacgccttctggatcttagtgtacctctccatgaggtcggccttggtcacgtatgatacatccgacgacgcgagttcctgctcgacaaagaagatacgaagtatacatcgtataggtatatcaatcattagcataaggataggctgaaaaaaaaaagagaaacaacctagaaaggaaggagagaaagtaactatgaaagaaactcacagtagggaaagccttgatggcaacctcagcatcttttcccttgagagcctccaaagcatcggtccgcttggaccattcctcccccagccgggcggtctcatgagcctcaagtccggtaacggcgaccagtcgcctgactcctttagcaataccgtcagactcgacgatggcgaaaccctggatctcggatgtcttcttgacgtggctatttattacaagagagatgttaatcgaccaatctcagttccgagagccgataaagcaaacagaacagactcacgttccaccgcagaactcgacactggtctgcctccatttggggttctccacatccttcgagatctcctccacgctgtactccagcgtgacgacccggacgggatccgggtaggcctctccgaacacagctcgcaagccggggatcttgaaaccttgctctagggaaagctcgctggagaatacctcgacgtccttcttgatccattcggcgcagttagcctcgatagccttgagctcggtctgggagatgggacccttgtgagagaaatcgaaccggagcttggtgggcgcgacaagagatcccttctggtcgatatggtcccccaatacctctcgcagggcgtagttaagcacgtgagtaccggtgtggttctttcgaagcggcgctcgtcgagcctatcgaaaaaaaaaagatacgtcaagcggagtcgatgtgtttcaatatggcaaaaaaaaagatatacctcgtcgtaggtgcagacaacttcgtctccaaccttgatctcaccctcagtgacgactccgatgtggagaacgtaaccgctgaagacctgagtgtcggtaacgaggaattctgcctttccatcgatgatgatcgaaccggtatctccctcttgtcctccagactcggcgtagaagtttgttcgatcgaggagaagtcccaagggcgtagtgatggacccagtcgaatcatggaaggtcgaggactgatagattccctggatcttggaggtaatggaagcggtacctaagtttgggatttcaacagaacgcaagccagtcgacgcgtcaagtgagaaagaggagagcaagcaacaaaatgtaagaaggaaaagcaaaaaggaggaaggtgctcaccaaacttggcagagtcctcggtcttggaaacgattccttcggcatccaacttgccgaggtcgtggacatccaacttgacgacgtcttcaccggccttcttaccgactcctcgactagcctctttggcgtccttggcggcttgctcgagaccagcctcgtcgattcccaactcgagctcaccagccatgagtctagtgagatcgacggggaaaccgtaggtgtcatacaacctccagacatcctttccagcaagctccttcttgccagcatcgattgcctgggacgagtactgagcgaagagcttctctcctcggtcgagcgttcgggcgaaggagacctcctcctcattcaagatcgaaaagagggctttggtgtcggtcttgagctcggggaagaattcacccatctgctcgatgacggtcggcgcaagtctggagaagaacgtgccgatctcgacctggaagtactttcggacgaatcgggcacctcgtcgaaggattcgtcgaagaacatatcctcggccgacggcgtcggggacacctccatcgacgatggcaatggtcagagttcggacgtgatcggcgacgactcggtaggcagtgtcgactccatcagtgtcctccttgccgagcttaccggcgtagggtctagctccggtgagctcttgaatcttggcaaagatcgggaggaagacatcggtgtcgtagtttgatcgtttgtcctgaaggacagagactagtcgctcgaaacccataccggtgtcgatgtgcttgttagggagcgatcggagggagccatcggtctctcggttgtactgcatgaacacattgttccagatctcgagaacatccgggtcgtccatgttgacgaggtgggcggcgtttcgacctccgattcgatcgtagtgaatttcacttttggagaatgatgagtgcgaaaaaagaaaaagaaagagtcaaatccggcgtgagatgttgtgaaagagcttccacaatagcaattcatacctgcaaggtccacaaggtccggttgcgcccatctcccagaagttgtccttagcgtttccggtgagaatgtggtcatcagcaacaccaaccttcttccagatatctctggcctcactgtcggcttccagtccttgagcggcgtcaccttcaaagtaggttacgtaaagtctgtccttggggataccgtatacctaatatgttcaatacgccagaaaagatcaagtttggttgagcgaacgtgtaaaacggcgataaggattagtagacgagataaagattgcacgtacctcggtcagaagcttccaagcccaggtgatggcctcgtccttgaagtagtcaccgaatgaccagtttccaagcatttcgaacatggagctgtaagaagaaaaaaaaaacaagaatatgcgcgttgaagcgaactcagagtgagacgtcgaagagagagagagagagagagagaaaagatgaggtgaccacgtactgatgataggtatcaagtccgacgtcctccaaatctgggaggattttggtttcagtagagtaatgtcacgagaatgaggagcgttagcattgtatgcgccctggacggcaataactagaaaggtgtcgtccgacgtaccgttgtgctttcctccagctcggatacacttctgagagttgacagctcgagtaagcttaccgagagccgacgaggtatcagcggtgccgaggaagattgacttgtactgattcatcccggcgttgacgaagaggagggtggctgtaggaaaggcatgatgaacgagcgagttgtgcatgagtacccgtcgtaggaagcaagtatagaaaacgaagaaagaaaagcagtcgaatggcagaagattgagcaaagagacagcagactcacggtcctcgaacgggatgacactggcactcttccaaaaggtgtggtcatggtccttttcaaagaactggatgaaggtatccctgaccttcttcgcaggccaggcgtctgggtctgggaaggcaactttggttgagggcacggtggacatggttcttgttccgactgttcggattgaaaattgagagatgatatgtggtctagaagtaagtttgtatagcagatgcctgattcccatcaaccgagtgggaacttgaagacacagcgagggtgggatggagatgagagataagagatgaacgatgaggagacggaagggattccagacgaggcagcataaaaaaaatgactgactggcaccggacacaggcgtattagaaggtgtattaggaagtgtattggatgttgtattggaatgtatattagaacgtgtattaggaattgtattagaacgtgtattaggaattttatcgggagttgtatcagcaggtgtaataacaattgtattagaaagtgcaaacatcaaatgtattaggaaacgcactaacaaatgtatcaggcttcgtattacaacccgcaagtggaaacgtattaggaaacccatcaggcaacgcattagaacactcactatacatctattggacggagcattggcaagatcgtcgagagacatccggcgcacacactgtactaaacactcgagagacacctttgtatgatctttgtgagaaatatacagggattggcagatcgatatcgtgtgtatgtgttccatgtaaagatggtgtggtctattgttgctcgtcatcgtcggcgatgctgttgtcagagctaggctgccaccaagcgttgtctcctgcttctgctcctgtccgttgtgatatcctttctcgatctgtacaactcgctctctctctttcccttttctcatccttgtcatatagtgctatgattcatgtctgttagactctgtcgtttcattctaatgacgcccagtgcatacacgctatcatacccttcctcctatcttcgtgcgccgtccacacgccgaaccggatcgctctctactcatcatcttgcctgcctacatcccttcctacctcatgacgtcctctccagttctccctactaccctacacagtctcctctgcctctcctgcgctctccttggccaggtcgtaaccatgtccgccggtaacggtcatggttacgatgattacataagcaagcaatgtctcactaggcgcttttcgttcttccgttctttttctttttcgccttctttccatttcctcaccttccacccatccatcgtcccttccgtcggctgtcgtcgctctcctctcgctcgatttctcttgcctggtctcgacagagtccgtgccaaaggatcattcgcacccgcagacaaattttcgtcgctttgcaggcctttagacagaaagaccaccacaatctatcccgtcgcgttgtctccccttctccccacccagctgaacgcaatcagcatcaccaacatcgagacttccgttccctcgcacacgtctcatagttctctgcaaacactcgtcacttctggaagagaacgagctcccagtcatcctcgcagacgaagagtcgatccgtctccctcaccctcccctgctctcaatccaaacgccacctcacgcttagcttctcgtcgaaggactccaaccccatcgtcaaacagtaccagtcggacgtcttcacaggctccacctcctgccactgtcacgtccaacgtctcggtcacaaactcgtcctttccttcctcgctcccgtctccgtcctcgtcttcgtctgtatcctaccatctggatcgaccgagcagtcgcttccaactcgaccacgcccagtccccattccatgccaacagcacctcttcagctctcgtcccccaatctcatcagccccttccttaccattcagcctcaaactattcgaaccacccttctacctctgcctctacctctatcaccaccacttccctcggtcccatgtactttcatcaccaacagcaaccgacaaacacaccgtctccctccttggtatcccacaagctacagcagcaacaacagcaacagcagcagcatgatgggtggggcagacatcccggaatgttcagtcaacccgctgtctcatcaatccctccctatgctcagtacgcccctcctccccaggtaagtgtctgtgttttgtctttcttcttctgcctagcaaagtggccgcgtgtacaccaggctcctcgtgggatcatcagtggagcggacgtggattcctattgggcgatagatgaacaacggcgcccttttgtcatcaagttctgactctgactctgactctttcctatgtacacgcttctttcctccttctctcgtgctcttccttctccctgtccgttgtttctctcaatgtttccaatctcagcatcatcacccccatcaccctcaacatcaccatcaccaacagtcattctcacagtcccataatcaagcccatcagtcgcctgccccgatgcatcagcaggtcaacggtctccttgtctctaaccttggagcagcaggaagtatcggaaatggtgcccattcgagcccaccgcctcagagggcaggcacggaggacacggtccattggcaacagcaattggtgaagctctcggtacgttcctttgcctttgtttcatacttgcagcgaacattcctgattattgtcttcccctggctaaccattcgccgtcgccatcatgtctgcgttattctctcccaggcgtgtcgacaagcttcggctcctcatcaccgagctcgggcagcagcaatcacgggcagaatgaacaacaacaaatccgcaatttccattcaggaccctaaccgaccaggatcgactaaaccacccggtcacccacttcacaagaaagaatcttccctttcagtcttggctgacgatagcgatggtgatatgacatctccgagaccctcatctgcccgacctgggtcggcagctggtcatccctctagccttctcggtccatcaactcctcctcaccgattcgctgtagagaacagttcggtggccgcgaacagtgctgtcgtttcgcctgcctggaacggtctcgaccttggtgggatgcatcttaaggcactttcccccgctctattcatgtttcaacatatcacttcactctacatcaactacaacgcgctcaccgtgcttcctccatcaatcgcgtcactccgaaaattgacgatcttggatgtgtcgggtaaccatttgacggccgtcccacccgagctaggtatgattacctcgctgaaagaggtttatttgtttgacaaccagctggccaatttgccacccgagctaggtacccttcatcaattggacttcttggggctcgccgggaacccgcttcctgaggcgatcaggctcatgctggagaaagagggaactcaggcattgattacgttccttagggactcatgccctgtgccgatgcctccgccggatagagagtggatcacggttgaggctgaatcagagatggccctcgcggtctctcaggcggccgaaccggaaacgttcaccttgctctgctacaacattctttgtcacagatatgcacctccccaaacttacggttatactccaagctgggctctttcgtgggactaccgaaaagaattgatccttcaagaagtcatgggctgtggagcggactttatctgtttgcaggttagttcttcttttcaagcaaagtctggtcctttcaatgggtttgagaaggatgctgacagggtgcaattctttttctctctctttgatcggtttcacaggaggttgatgacgaccaatatcacgatagcttccttcccaatttaaccaaagagggttatgatggagcatttttccccaaaactcgtgcgcgaacaatgagaacagacgagaagcgacacgtggacggatgcgtgacgttctggaagacgtccaagtgagctggccagaacttttctgttttaaaaaattaatacattatgaattctgacgtccctcatcggttttctcatatcttgtggttctaaacagatacgatttggtagagaaacgagtgatcgaatttaaccaggttgcacttcagcgaccggacatgcgaaactcagatgatgtgttcaaccgagtgatgtctttcgataacattgccgtggtctgtcttcttgaaaatcctacgactggatctcgattgatcatcgcaaacgttcacatgcactgggatcctacgttccgagatgtcaagctcgttcaggcggcaatgttggtagaagagatggagaaggtatctgatcagtttgcaaagttcccacctaaactcctggccgacaacaaacgaggaccgtcctactcggacgcatcaaagattccgttgatcatctgtggagatttcaactctgttccttcgtctggagtctacgagttcctctcatccggtgacgtcgccaaggaccacgaagactttatggatcatctgtacggatcttatacttcggaaggtttgagccacaagttgaatcttaaatcggcctatggatctgttggtgaacttccgatgacgaactacacacccaacttcgaaggagcaatcgattatatttggtatacccaaggatcactcgctgttaccagcttgcttggagaggtcgatcagtcttatctatccaaagtggtcggtttcccgaatgctcatttcccgtcagatcacgtaccgatctttgccgacttcaagatcaaggcacctcccccgtcgacgagagccgtagtttataataccgatcgttaaaacctatcatctctcacctttctctttctagcggcttctttgcctctttttcttgtagatagttcaatctctcttcgtacacacacccacgctcacacctacacctacacccacactcatatccacacctatcccgtctgtttttcgttccttatcaatccttcgcgtactaaaaaacaccactcctctcttccttgcaacatactctccctactttgccagctcaagattgtttcctcttttggtttctcattacttttgttttccctttctgtccatgggatttgattcatccttctatttcaatccgtcgtgctttcttcttcttgttttctgtagtttaccactttttttctcttcttcctctttcataattttgcttccgtaagtgtctccttgttttctttcgcctcccactcttctatatatctatcttttatgagggtccactcgatcaaaccgtccacatcggacagacacaagaatgcaccttctccaacactagaatcattctctctccgtgccctctctctttttcccgacatcactgtccctggttttcgtgggatatgtggtctcttttccttgtgatctttatgtgcccaattcccttttcttgagatcggaacggaaccatacatgacagatcgaacatcacatcgaacttggcccgaagtacctcatgaatgtgatctaagagtgtcccttcgtcacattcatcagctctgagtgttttttttcctttcttattcttatttcctttcgtggagctcggtcaactcggaagatgcttcacaaagaaacgtgatgcaatggagatgaaagatcatgagaaattaaaagagacactgatcagagttggatggtcggtcgtgttgcatgagaagagtaggcagctaggttgaggaagaagatttgaacaagaggatggacaaagaaagagagaagagggagtaacagagagagggaagtaagatcaaacaaagaactgattgaagacagagagagagtagaaccaacgagtaaaaaaaaagaaaggtttgttttggtgtatgtatgcgcggtacaattttttttggaataactcaacgaaaaaagaaaacaagaaaatgaaagggaaagatcaggatcatgtaaagaacgaggaggaaatggggcgaaggggatatcagggtatataaaacgggacgagcggagatttgattgaatgatcttaactatgaagagaagttggtggagaaagaggttataaacggaagaaggaatgaagctgaggtcatggtacgttctagtaaaagatgcaggtacataaatgagttggaaacaagaagaagaaggagaagaggaagatagcaacacgatgaaaaggattgaaactttaatcaggaaaagagaagaggtggtagcatgaatagagaagaggaaccgtatgatgcaaaaaaatcagggcaaccgaaaagagaatttaggggaaggaaagatgacaaagccaccaggaggaatactctgaacaaaagacaacagaaggaacgtcgaagggaaaggaaaggctgaaacgatatcgtgaggaagacaggatatgaaatctaaacaaggttaaaaagagagaaaaacgaaacagaaaggtatcatcaagctcccgatcatcatggccagctgtctttggtcattggaggatccatcaacggccctcccggtccccaatgtttattagagtcgcctcctgacctttgcttcgcgtgacctccaccaaaagctctctgtacggccgaggttgacgactggctttgtcccagatcagtcgaaggaggcggtgaagacgctttaatggggtagtatgctgtcgactgcatatttccgtaaccaccacgaggcggagtagtggaagccggattatcgctcagttcaaacctagggactgtcgtatccgccatcaaccgaccaccatgaggtagattgaaggaggaagtcgaggaggaaagcgcgccgtagctaccgtacggtccactcttcggaggcagatcaaacccttgatctaagatagcttccaaatcgttctcattgaagatctcaccatcgtggtcatcacctgcaaatacgatgggcggcggagggaacgatggattgttctcgttatatactccaatttgaggtccccattgatcgtcgtcgttcgaagaaaccatggatgatgcgtccgaagtatcatattcggaattataccggaagctgggggcgagcgttccatcctcccgaggactgaatgctcgttcgagacgctcttggtccctttgacgacgttcttccctcttgatccgtctgagacgagagcgttcccaatcctcccatcgacgcaaaggcacgctcgctacgagcgctctcttgtcatcgacatggcccaaatcttttccttctccagcaaccttcctatgaatcgatgaagaacgcgcaccgccttccagtttagctcaatgtgaatgcaaaagaagaagaaagagagaagaatatgatatgtttcagacaaaaacgaatgacacgaaccgagtttcaccccaagagaagtcgtcaaaatgccaaaaggagtagaccggtaggatcaagttccagactggaagtgcacacaaatatggcaacatccaagccgcgtagatgagctttccggtcgtgatgatgattagaattgctggaagaccgagaactgaagccagcaaaagtagaggaattgcgctcgtaaaattttgaggagggtcgatgattgagttgataatgagtgctcccgtcaagcagatggccacaggaagagtgaccgttccgacaagatccatgaacacgacgaattgcatcgagaaacagaatgttccacacaagtttcgtactcggacaagctccatcaaattatgaacagtcgagttgatccaccgacgtcgttgagatagcaagaccgagaacgtatccggtgcgacagtgtggcacctggcctgaggacagaacatcatttttctgttcgggaacgttctgagcatcatcgtcgataaaaatcgatcttcaccaaggagcaagaggtttttttgatgcagggtcgaaacctcactctgggagtattctcgaatgatatccggattggtgataacagggatccaatcatcatcgtccatcttcctcgacttgagtcgatacatcgagaaacatccaggtaaacaggtcactccgccaaataccgcttcgaatgctttggattgatagtgagagataaagtactcgaatacttgaatagctgtaacccaagattgacgtttgttggctatccgagtctccccgcaaactcccatgataagcttgtcgtgctgcatgcaatttaccagatgcgtcatggaatccggggaaacaacagtatctgcatcgacctgagatatcattcaacgactctttcgttagtttgacagcctttctttccttctttcctgcttgatgggaataagataaaagaggtttacttaccatcaaacagacttcgaagaaatccggagtaacacccataaggacttgagtcttcctgaaaagatcaaagtctagaggagtcatccggtcgttgtatgtcactcttgagaagaaattcatgagaatgagttgggagtctcgttttcctctgtttccaggcttcttatccgaggcttctgatggcattccgcatttgacaatcaccaatgtgggcactcgatgacggtcttgaccagttccggtaactgtagcgcacaacagatcagatgttcacccgtctttgagaacttaaaagtctgatgataaaaggcaaaaattcagaacagaaacgatactgaccataatgaccggcgtagaccattgctctgttttccttcttttttccgctccccacagcggtataccccatcggtaatgggtttccgaatctctcatccgcctctaacagaccgacacaatgatccggtgtagaaactgtctcaccctctccagtaatcatcccatccgccacgatgaagagtaacttgcgatgatccgagtatgtggtggccgccaacgagtcgcacgtggccttgatggaggaaagggattcggaataacaagtgactagactgacggtaaagagctcggctccgatttgagcttgagtgattagcggggcaggtggttccgtggaagccaattgttttccaggaccagccggtcctttgatgggtcgttttatcgttccccctcgccaaggagcggcaccgttcggatcatgaacggagaactttgctccatgtgagggcataaccatcgggctaacagcatgcctgttcagattctttggagggacgatcattcgtgcagataggaaccaagtgaacacgcaagccatggcgaaccgaatcaagatgacggtcaaaatcacacccagacagaggtagaggaagagggcagagatgaagcatccgggactgattttatcgagtctcccaacggaataacgagccttcagacaagggatcgcctcctcggttgatttcagagttcgaaacagtcgagtggcatctttccctccggatggatgagccatcgtggttcgaatggcggcatcgacatcatctccagagatcacttttgggtttgccgtcaggtaaggatcgagattgaggacgataccgtcgatgaccatgtagtatagagagtttgtcacgttttgccatgagtagccgacctgcctcgtggtgttgtatatattgagactcgaaaaagttgaggagccgagtgttgataatgggcaactcgtgttctgagtcgtcgaggttgaggtacaaggagatgtggtcgcgaaccgggcagtgaaattagagcattgagtataatcactcgcctgtcgggtgaacaagcttgtgacatcttgaccaggcatggctgacgcaagcttgtaaaaatcaacagagttggaaaccgtagaattcgtgatgttgaaagcccaaccgcttataccaaccgtgttggcagtgcctcctaaaacggccagggttgagacggcgtcttggtcctcaaccgggcagaacgtcgagttcagacccatggtgacgaacacgacgattccacccaagaaaatgctgatcgcacagagcgtgactttttctctccaagcttgtctgacacttgattctttcatcccacaggcggccagaacgaatggaggtgcccaaaacgtgacgatgagcgacatgatcacccaccaatcccagacttctgtattcgtgttcgctggcacgatgggtttcgatgaacctgggatcatcggcgccggaggtgtcagaagcggagcggatgcaacctgccgttcaggcctcgtcaatgtctttcctcgacgaagcgtagtagctcgttcatgttgagcaggtggaggtgggttggacgtagggatgatgctggtagagctagccgccgggttatacctagacataattgaaaagacctttgagccagaagaaaagcaaggagaacagaacggatacgtcgaatgctatcagggctgttattctctattttattttgtcggaagggcctaaggctttaatcttctaaatcgaccgactcggatgtccttaggtttgaatatatagaagagacaactggtaatctatcaggacctgaagttcttcttgcctagaagcagaacgcgaagagggagaacatgagtgacgtacgtgaacttttggatgaagccggtgtatggatcctggtctacgggttttataagtcggacaaagggaggagtatcggtcggaaagaacgttgagagacagagaaggcaggatcgttttgtcctggtatatattcaggctgcgtatgtaccgggtcatgtcaacaacgaaagcagcgatcgatacatatcagactgcattcagaaaggagagatattgatccagaccggatcgaaaggtataataccggtctcaaagctgtcctctcaagaagaaatttgtgaaagatagacgtaccggaacaagatgaattcacagcaaaaagcgaggaagaagggaggagatatagccgaggcgcccagcgacctgaggacccaaatatctaacacaaagagaaaccaaactagtcgagtagactatctgtgctgatccggaaggaagagtggtcgtgcaaaggaaagatgggcaaagggaccaggaagggacgagaggctcaagagaagtcagggaatggttgcttgctgacgtccaagagatgatgggacattagagcaaacacagggctggactcttgccggccaatttgagccaatcctttacgtaagccaggtttcgatctaaacaaaataaagatgaaacaaaaacattgatagaccactctccccatgaggcgaacaggagaatccatcaaaaggacattataataaagaaatggccgagaggcgacatctagagcttcaaggttggaaactatctaaatcgttgaaggaacgtaaacgaagagaaacaagagatgcgggtcgtatagaaaaatagatatgacaatttgattcggattcgacaaacataagcgagactaagatgataactgaacgggtagatttagtgatggaaagtatggagatagaaagaggacgggcgtaaaaattacagcctagaaagcagcttattcatctagaatgaagtccattgagtgtcggttgtccgatatgagtcgggcccattcgagatctggacatcaatagggagcaacgatccaacaagagacacaatcagaacgtctgtctcttcaaacaatgtaaacacaagtcgcactcacaaagacggaacatatatgccgtctgtcgcaagagcgagaaagaacagggacgcgtcagatttgattagtagagagcatcaaaaacaaagaagagagacgacaaaccatatcttctcgacgccagctggagagtgaccaagcgcgcctaagaaaacaatcagaaatcaaaaaccctctaaatattagcccagatcgaggaacgtccttggaggagcaaccgtatactgacccattctcggcgatagctctagccattaactcttcgccaatgaattcctggccatccccatggaactaagagtaaggaaaaaaaacacaagagcaaaagtcatttttaatgaagagaggttcaggatcgcagaactgaacaaagtactcacaaatgtcatgatgtcatacaagtccgaaaagtcgactttcaacggcacgtctttgaagccgcgaacgggaagaacggacaagagtcagatctgagagaggaaagaccacgagctatgagtgaaacatacagtgcaaccacggttggattcgatcattccaccactggaaagacagaggaattgtttacgtgttagcatgtatgctcaagagctaacaaagtagccgtgtatagagaggaaggaacgaaattttgcaaatgcatacctcgggaaagatggttgactttatgatgagcgcgttagagttcagtaaccgtttgaaacgagccgaccatgcattctggtcgaacgacaaaggaaaatagcatgagctttcaatcgtctgtgctgaagcagatcaaagttgaaactcatcagacatactccatcgatgtctaggaagaatacagtggcagatcgtcataaagaagaagtcagaaaacatgcagggtaagaagatagacgagcagatcctgcgtacctaaaatgtacttgtagtggttctcttgagagaatgtcttgacgtcccggaaggttatttcacgctcaatatcgtcacctgttgatatcatttacaaaagggaaagaaacggtaattagagcgtttctggaagttgatcaagcatcatcaacaaaatgacaagatgcaacagttctcacaagtaccatcctctcggtcacacctgttgggcgatcaagacagacgagtttggtgagcaatcggctttaattaacaaaaaaaatcaagaaaagagaacatatgggcaaagaaactacgacatactgtatagccttgtaagccaacccaatgtccagcattgccttgttaagttcgccctgattcacttccaagatgacctgattcagagttctgatatcatcttcgtgtgtctcttcgtcttgtctgcgcacgagcgaccgtcgttcgctatctgcagcttcctgtgcagcctctgccttccttccgtcatcatctgaaatcgtgctggatccgactgcctcatcatcattcacacccgttggcaggtcaaattcaggagtagtggtaggtagtgatccgtctgactgatcatctgcttgcgcttctggcggtggtgcaagggggtggggtacaaacttgttggcctcgatccatttaggggatggaatgatctcgaccgtcgtctcgagatcataagatcccatccgggctagacgtggtcgatgagaagatctccatggagtatgattcgaggacatgcctcctgtgtttcggcctcgctatgataggagatatcggtcatcaatcggttagaaatgcagaagagtattgacaaggttcagacatcctgatcaaggacgcgaaaggtcacatacccagaggactctgctgctctctttctcattccagtgcaacgcgccagcatcttctccccattgctcgatcggaatgaccaaaatgtcactgtgaagatttgttttgcctggaagcgaagaatagaataaaaccagacagaaaaaactcggtcagatatgattgaacacaagaaagacgtcaaaaaccggaccgtacttagactgaagatgggcatcagatgggaagccggcacggggtgtagaccgttcatagttccgtgcaatctgatcgaagagttgtgagtacagaggtccattgattgagtgtgatccgctatgaaactctttggtgcacccatctccggcggtggtggcgcttggagatcttccggcttaaaatgaggtcgacggaagccaggggaaagaataacgtttgggtcgtcaacatattgctccttgggtgatgtgtagttgtaggttgggtgaagagcttcgtcgaccgactgtctccatagcggggtgtgtggagggcaggcggatccccaatcagagaacgctcggtcggcttcgtcatccggatcaaagtctgggagcgtggcggagagtaggttcgatcaggcacgggaatcaaggaacctagaagcaaaaaggaacgatacgaacactctccttcctcgtctaaagattttagttcttgaagatgggaccagctgacgaattgagtgggagtgtcttctatcgagaagcaagcgtcaaagtctgggatatgatgcgcaatattcttgatgaagtcgagttggccctgggctcgcgcgtcggctcctgcgacggctcgatcgtagttgattgaatgaatcgtcaagactccgcctacattcttgagagagaatgttccgtgaactttttgaagatctttaactcttgagcgctttgtaacgcatgtcgagagaggagaagggaaggaaagaagatttttattattattaagacccaaagacaaggcggatgagagcatgaagagagagtgaacacgaaccagagtggagggtgaaaagccacggaagggtcctaaatcgaccatgatacggtcatattctgtaggagagagcgggaaaagagagtgagtatggatatcacacgtggtcaaggtcattgcagacagttggcagtggaagcgaacgaaccatcaggaagcgggacattgttttgtctatagacacgatcaaaaagtgagaccgatggaaagatgaacagagaacgtttcaacgcacagaaaaacaagagatcagcttttgggctcggtgcagaattattcaaaagtcgtaaggtatatatccgatcgaaatcaacgagcggggacgaacacgacaaaatcccaccagcggtcgaagcctttgggaggatttctacctccgtgtctacgcttatattccttgacggcttgtgccagagtagtgctctgcctctcgttctttttgacccagtccttctttgcagatcggacgagctggtagatcggatgattcgttgcggataagttcttgttcacctcgagaaggccgttgacgatcaaatgttctttcttgccgagctgagatttgaggggaaggttgatggaggatgcgtaagagggatggatgtcgctctccggctgaatggcaggtgtaaaggcgtaatagaacacctcgagtggaccgagatgtatgatgggatagatgatggagagcgagataaagatcacgatacagaagaagatcggccgacgggccagcaccgacgtcggtttcacgaaacgggacgggaacgcgcccatattgaagaatcggacgaacagaaattcagaagaaggctgaaagtcgaggagttgaatgaacgaaggtggagtgtgacccaaagaagagggctgcttgtttgaaagtcggatagaagtggaaaagaaggtggaaagaagaagaggaaaaggctgagaatgacaagaaggcaaaaagaaagaaggtaaaacagaacgagtgtgagtttagataagttagaggatgtgttggttccttccgtttcttcctcttcttgttattgttgttaccgttgctattgccgttgctactctgggccaagagcccgaacgtgaagagaagacgagcaaagggaagagtggacggtctttatcgggatcaataataaggtatacgagagcgaacgaaaaatagagtaatttgctgacaggggcgatcggcttttcaaacaagagaggcccgacgagagaggggtggtgcgaagtggtggtcaagctttacagttccgcgtacttttcgaagggtgcgagcaggccaaggtgggccatgcctggtccctggtccctggtgcctaaatctattcgcagcctgcagcctaatccctactcaccatgcctcttcagtgaaaagtacgctgctcgacgccacagagcccgaatcgccatgtgtatgttgttcttagcccaaaggcctagatagtaccgaatcgtcaggcgcagcagggttttaacattcaccccctttctctcacagtcatcccacttcacctgttattcatccgaccggctgatcatcgatccaataaatcttgtttatttccagcaggagtagcgttagcgtgatcgttgttcggcgtgttcttcttgctcttgagataaatcacgattttgacagtaacggtagcagcttaatatctttctctctcacacagcacctacggcatcgaacgcacacatcatatgcctgcttcgttggtcacaacacatagaccacacccagcgctatcctgtgtttatgctcatcaaacagaccttcttggctttcttcagtcaaatctccgagagccagaccggctggtagagcaatcagatccagagagtttcattcatctactttcacaaacgatcgtggctctcgaacacgattacgttcaaccgacatgcaaatggacgcctctgatcgagggaagagacgtaagcagtagtaatgtcgacaggcgatccgtcagagatgtaggtctcttcctgccttgtcctctcggcctcactcgcatccttataggtatagataagctagagagagtctaatctattttcgactgggaaattcaacgcgtctagattatcgaccaagcaatcttgtccatcttcaacgcatctcctaacgggagaccttcaaaccaactcacaaacgggttcacctcatcagaattcgcgtttagcgtaagcaacattgacgcgtcttcatatctttaccaaccctttttatctttctttgtctaatctggttgatcgtccacgtcggcctgtcgttcacgttgacctgccatcagaaatcaaaatctcaacttccctggaatccaaatagacctggaatctacgcgaaacaagtcaacactaatcttcagctctttgaaactgtttcttggacactgcttttgaccaggttaggattctccactctggttgcacgaacattccggcatggcgactgaaacctttctgaccacttattacagaatcgggccaaaccttcttcaccatgttctctcaaagacctcgctcttcattcctctccctaatcagtgtctctcccaacttactggaacgcctattactgacctcaagcccaaacccccgttgatatcttccggccagggacgtgagtccagaaaacgaaaagctgaatcagacccatactggacgtccgatgaacttctttcaaaccgatccaaacgaagtaggaagggaaagatccgaacaagacagaacacagagaaagggcaagagccgtgtcgatctaccagaaaacacagccacatgaacactgacactgttcttgattcagctcccgtaatcaaagattgtttgttggacgacaatggcatgttggatctgaacatcgcgtcggcgcttcaaaatccatacccagaaccaattgataaaggttcaaaactattaaagaagatcaaaaaaaaaaagagtacttcgaaaaccaggtgagcttacttttcctcgatgtgctctcgagttttttgcttgcgtcaatatcaccatagtaaccctaactctaccagggtgtcaccggcggatatagcgcttcaacgatcttggattttctatggcagacccgccagacgtacaggccgaatcgaacctcagaagaggatcgttgttggatttccatctaatcgtgaggctgcacgtctttttgcacttgtcttcttgaaaacctcctaactaactcagatccatccttgtctctcaaacgacacgtctagacatccttgggtctctcccaatcgtcccatcagatagacccttcccttcagccgtccttcaactgatcctgatgcacatctttccatcccagtttgccctttcgtctcgttttttcgaaccatcagctcgtccaccgggcgcacccccaccagaacatgttcatctctctatagaaatcgagagaacaaaagccgccaaaggaggaaggttcaagacgccagaaggaaggatgaagggagaccagttaaagaaactgacagaatctcttgcgagacaagctggatccatggatttttggaagtggagatctatctgttgtcccagtaaagtttgtcgaacctacgttcatttcattctcatctccagcccacgacctcgttcacttatcaagccgaaatcatattgcgcaatacagatccggatacattcacccggtaatcagaacaagaaaacaacagacgatcgaaagctctaccgattacccctggttcgtctctgtatcttagctcaccttgggactctgatcatagatatcctaacgttcgacccctcaaaataggagtttgccccacaaactcctcaagtacactcggtgtcatcgtcggtgccaacggagcctttgtcctcgttgtccagaggttctgaaaggagtgttgagttgatgactcaacagatcccgatcccgttcagctcggtcgatcacgatcgagacggtatgtcttttggagttttagagctgatcaacggacaagaaaagaaagacatcgtgaggtttcaggagtttacgcagcctgtcggacaagtatgtatttgaatattgctttcaaacctatgttttggtcaatctcaatgaaaatgttttggttacatctctgcggtcaacaggtttgtagattcgctacaggggtcattaaacgggtgatccctatcgacttcttcggcggacctttcaatcaacacctagttcttcaaagtcagttcttcctttcgctccaccctcgttctatccagtccaccatcgttcttactaattcaaggctatgtcaaccttttctaccaaaggcgtcgacaaattcataagactcagacggtacgaaaccatgactctccacaccgttctccaaggattctccatcttggaatgcggctggctcgaaccaggcaattttgtccgaggaagcagagtctctgaaggagacgctaggaaaaggaaagagttggcagccgagtttttgctttggttgtttgaaggcttcttgattccgttactccgagtgtgtgcctttggtctttctctcagataaatccctctacgcgcgagatgacgcacccttgactgaaatatcattcctctcgtcactccaatttaattcacaaaaaagacttgtttttacatcaccgaatcaacggcatacaaaaaagaagtagtctactttcgtcaagacgactgggaagcgttgtgtcgacctgtctaccagagacttcgttcgacggcttatcaaatagtcgaaccggtgagttttcaaatgtctccaaagccttcattggcaaatacagtatcgagagagaattggtacgactcattcatcatctttatctccatgtttccatggtattcttcatatttcgtctgctctaggatggaatcacccggacgtacactggtgaatgccgaaaactaggtcattcgtacgtccgactgcttcctaaggaaaacggcgttcgaccaattataaatctccgtagaagaccaaagcctccgaagccagacctggagactggaaaaattccctgggattggcaatcaaagtcagttaacggggcattgaaggaaacattcaacatcttcgcccatcgcaaggtgagtgctttgtcgttcccgcttcagttcctcatcagacgggatcgctagtaaactcatctgttttgttctgttctcaggactctgggccaagtctgttcggagcgtctatccttggcgcagatgatatttatcccaaaatcgtggatttcaagcgaagggttacccaacatggtgccgaactgtcagcctggcccttcgttcagaccttattcatcctttttttttaaattaattctaagtcttctgttactttctttagacctcgattctatttcgtcaaagttgatgttagatcgtgttttgacacgattgatcaagatactctgatgtgtgtcttgaatgatatattcgaagacgtgagctttctttcttgtcaatactactccctcacccagagcaagatgctgatgatcaaaatccttgacgtgcgtcgcttgattttcaggacgaggactatgagattctccgatataacacaatcaagctctccggcggtcgaatcaaaaaacggtttatgcagcaagcttttccagagagtaagtgccttccttcctctgacttttctgactacctcccgaattacaagaattcactggttctgttcgggattatagtggatgcgcctaccttcaagcaattggccgatactcttgctttaaagagtcgtcgagagatcttcgtagataaggtatctctacacttttttccagctttatagggttgttttggttgagttaactatctgcgcgttctccagctaactcggctcgattgatgcttaggcttatggaacgacccatacgaaagatcaggccctgagtctgcttagagagcacatcactgataacttaattaaagtcagttgttgagtctttgagctgagggaacatatgcttaccgcggttcctttcgaaatagatcggcccccgatattttagacagactcaaggaattccccaaggatcgatcgtctccacccatctatgtagtttcttctacgcggatatggaaaggaagcatcttgggtttacttctgatcctgactgtgtacgtctaggggtcttttctgcttcaatctatcattcaaacatgaatcatgtgttctgacatgcctttgtctaccattcttcttatgtagatgttagtccgactagttgatgacttccttctcatcagtacagtacgtatcctttctaacgtgtcttttaatggaatttctatccttgaaagagatgttgacaagctgtttacatcctgacacgcgtagaacaaatcgaaggctatccagttcgttcgcgctatgcatgccggtcaccctcggtatggctgctttgtctcgaaagagaagacgttagtaaattttgaatgtcggattcaaggggatctggatggaccgaacgtgaccttatctaccggtgcgtttcattttgactatctacattgggttctcaagctaattcggctataacatgtcttggttgagaaacgtagattttccttggtgtggaaggttcatctcgacgacctctttggagatcaaaggagactacactagagaccggactcgtaagtcactttccccgatcaaagatgaccctcgatcacatctactatgcatctatttcccgatctaaatctttctgttgccgcccggaactaaagatattaaaaagagtttgacggtgaacgctcttcgaaatcccggcttgaccatccgagccaaagtacttcggtacgctctttcaaatttctatttatcaaccttgatcatcgctcaaattaaatagttcgcatgttcatctatttgtttttttctcctctgctgtaattacaacagaaacgtcgcgcagaaatcacctatcgtatttaacgattgcacgttcaatgcattggatactgtctacctaaacgtgtaccagaatctggtccattgtgcgatgaaaacgatgaactatgtcaaagagcttgggttcaatgagcagatccattcttcgtttttgttgagtatgtctctctaggtcctcatccgtcattgatcttgatcgaccgttaattcctcaatcattcctttttccctccaaaccctgcgttgtgcggaaataagaaatcgtcgaagaggctggcgagtttgcattcaacactataaataacgccgcaaggaagcctgttgcggtagctcatcaagctagggtagacattgacccgattgtcgtttcttggtccgtaaaatagtcaatctaaacctacgcattcagcatacatcaaccagatgctgactgtcgattggcgcttccaaatgaacttacaggttaggaaaacatgctttctggcaagttctttccagaaagccaacgttgttccgaagaatgttgtcgagcctagagcacgatgtcatcgggctgaagaccgtcacaggagagagattggtcgatgtttgcgggaaggtgacctctttaggatggagtgggatgaagatgatcaaattctgaatatcatatatgggttgtatcatgtggccagatgttctactcatccgaaaagaatgattgacttcaaggtggcatttgcacatcgactatatgttccctaatctttgaactcttttcgattgtcataaattggactcagttaatattcataggcatacgaaagaagcggctacgaagaccaatgaaagactgaatcagggaaaaaaacaacacgaaaagattagttccggtctctcaaatgtgaccaacaggattccaatgtttgaaaagaaaagttgaggagaagaagagaacgtctcaggacccagttttcaacccctagaggaatcaacccggccgcgtaagttatcgtctccgagcggctttgcgggcacgctcttggactgacgtgcaaatgtctcagtttcatctttgacgtcttcttcttctgactcaagcctgttcttttcttccaacctttagattcaaataaggaaggaactcacaaagtcagtttaagaagggtagaaagaatgatggttgccgagaaaaaaaacaaaatctggcaaggaaaaaatggctagaagtaccagacagaaacctttcggagtttaaaatatatcacgtgataaacgcgtcgaagaatgacagcgtaagcagcgtggcaagacgcgtgatcagacgcgctggatcatcatgatctcgccccaacaaccattcatcccactcgaatcacatacatctgggtctctctctttcaaaagttaaccgattgatatcgccttcgtatcgtcttgcccatcctatgagctctactggaggtattttcaaggacaccatttacttcatcaattcttcggtccctagtcaaataaaggccctggtgagttccacgagaggaacatttacccgtcacatcgagtctggaatctcgagtctgatctcgaatgtgttgcacatatgtttattgatatagaacgaacaagtcctcctcaagaaccaagctcgcgcttgtgatccactcgattctttgaaggccaagggctttccttcatggaggttcgatgtcgatcaggtcactctgattgtcactgacaccttggactttccagagcttcaggatgctcaaagtcgcaagaaggccatcgtcacggtgagttgagatcgaatcatttgttcgagatttcacttttctcatcatcatggtgctcttcatcctcgattgtatttgaagcccgagtttgtggtaagatgttacgagattggcttttggcaagagtcagtatccacttacctccacactgaggttaacgcacccgtcgagaacgcgcgttcttaaaccaatcattcatatcgtttatctagaccgaaatacttctctccagatcccaacaaattcttttcaggtgtgagcgtatgttgcgctccagaggtttgtaatcttgtcctcatgttttctttctttcgagtcggagagtcttaaagtacttacaaccgcctccgaatccttctacttaaagataccagagtctgatcgggaggtcatttcagcaggagttcaggcatggggtgggcagtttaagaagttcttgacaaaagaagtgactcatcttttctgcatgacgcctaaaggagtaagtagggaactcagtatatcgtgttctatcacagtgggatctgacgtatctcttttctatcggtttataggaatattacgacatcgcgcatgaacatggcgaaaagacgggtatcaagattgtccttcctcactggtatgttcttctgatacatttttcatcccatttgcgctcttagtctgatttcttctgttgccataaaactatcaggtttgatacttgtctaaccttaacagctcgcgtccccgaagacatctatctgtttcctcaacctccgatattgacacatccaactcgcgcgcaactcggacatccaaaactaggccagtctccaacaccgagccaagcagccttttttgattcgcttcacgagaggattcactctgcgtccgatcaagagcgacctttggatgggaaacgaattttcttttctgaggatctgcagctaggagggagggcaaaggccattgaaagcctaacaacaaaatcgggcggtgttcttgtgcatgaggcagagaagggggaatatgatgtctatattggaaaatacagagatggcgagagctactatagggttcgttgcttcctcagatgttgatagactacagcggttttcatcgtagaccatcacaaaccaaattgtttcctcttcgatttaggctgttcgtcaaggaaagattatcggcaacctggcatggttccactatctatgcgcagacaacgctttcgttagcccgaaacagagtctgcttcattaccccgtaccaagccagcatatacccgcgttcgaaaaattcgtaagtcatgtatctcgttctcgtaattccaactacgccaacgactcacatgcatttttggccctgtttgatacatatgcagtcaatcactcttacaaattattcaggcgatagcagagagtatctcaaaaggctggtagaacttatgggcggtcgatttacacctgagtttagtaagaaggacacacatgtcgttgcagcatcgtaagtttctttatccatgaagcgtcggccgctatccttaaatatctgctacgtattcctactgttgatcaatgtactctccttgcttctgttttgctgtccatttctgtgggatgacagaatgcatggggcgaagacacaacgggcaaagacatggtcgataccgatcatcaatcatcgctggctcgaagaatgtttcgtcagatggcgcgttctctcacctcatgccgagcaaatctacacggccttccctcctggagtgaactacatgaccttcattggaaatcgaggcttgacggatgctgatttggagccttggactagtaaagcctggctgggtatagacgaagcgaacggcaacaccgataccgaaaagaaagccattctgcccgaaaccacgaaaaccgtccctatatcgacgctaaagcccatatccgagtcgacggtcgcgtctgtaacacccacgagctcgactacaaatcagacacaatttgttcaaccagcatcaacgacagttggacgatctcgacttgccacttcgactcgagcatcttctgccatcaatgtgcctcttttgtctgaatcagatccaacagttccgccaattcctcaactgttgacagtgcctgtttcatctcacacgacacctagcactgatgacccttctcttgtgaataaatcttctcttgtacaacgcgcacccacgtcgtcatctcttgagccttctgactccacgcctccttcagcgaaaccaccattgcataacaaatctcacaaaccattccctgctctcgctcaggacagacaccaagccccacttctatcatcttcttcgacaacgacaaatgctccatctactcctctgccttcatccacgccctcatcttcatccacacgtcatgggggaaacctacaaggcatgtcccctgatgctattctcccaccctcatctaggcgaaaggcagcagataaggcaacgaagaggctacatgacgaaattatgccagatgtattggactatgagaaggccaaaaagaacaagacgttgttgactggaggtaggaagggaagacaagaggaaatcgaagcggcagaagagagggcaaagaaggctgaagagcagcggaaggtttatgaaggtagtgatgatgatgatgagggggaggaggagggggaggaggagatagcaagaaagagagtgaacgtaaaatcaaatcagaaaacaaaaagaagcgaggagcaggaagggaatacaccggtgtcaagatctgtcaagaaggcaaggttatctgatgagtaagtacttcacattgaatggcgactgcctactcaaaattttctttgcgctctcatctctatcatctcgaggatgacgactgatatatgttttgcgcttatacagaactgctctgccttcgagtacattacggacgggcagcaaagctcgatctgcgacccctgcttctgacgcggtcgcaaaaatcttgacaactcaggtaaacctaacgactgttcagaccagagtaagtagaatgtcacttttctcgttcaaactttctatgctctacgtttgatctcaacctatgcgcgatctcactcctctccaggctttagctaaaataggcgctgttgtagtgatcagccctgcagattgcacccgtaaaagccatcatctttatattctccaggttgggtttgattctatactgatctgagcggtttctatctcatatcagacttggttacaagaacaatcgcccgaaccgagaagttcttgtgcgcgttgtcggtttctccgtttattgtttcccaagcgtgggtaacatcctccatcaaggctggaaagcttcttggtgagatctggctcgctccttttctgttttacgtgtgttgagtttgatgagtagatgcaataactaatattcgaatcttattcacttactggtggctcgaccgtagatgaagaaccttttcttctgagtgatggagaagccgaagaaaaatacaactttagcttgaaacaatctctcgaacgagccaagtcgttagcttctcaaggtggactgttggctggaaaacttttctatgccaccaaaaatgttgagaccgactatcaggtcctcaagcggattattgagagtgcaggaggccaggtcggtcttgtcttgtctggaaactcgtcaaggttcagatcgttagatccttgcttgtctgacgcgtgtcgcttgatttctgccgttctgattatgaacaattttgatagctcacgaacaagattcctcatgccaagatattcatcgataaacctgacgactgctttctcatatcagcggaagcagaccgagacctctggcgtcctgtaagtacagatttgtctatttaattcggagctattcaggaaggaattgataatttttttcttcctcctccctacttcctttttaactggacgaacatgacgatagttaaagaataagggagtcactgcttactcaagagaattaatcttgactagcatcttggctcaaaaagtgcgttttatcctcatattgtctctctgcttgaagcgatgcatggcatggactgatcgataggtgttcgggaatctatagttggagttttcgaaacacgcattagaataaagactggaatgattgaaaatcgtgataagaatgcttaatctgcgtggatgtcgacagagctgtcctttctgatcgtgtgaaaatattcctttatctgaacaaggacatgtgtgcacatagatacgatttcagtttgaggaacagaagcaaacataagggtagttgaaagaaaggaggacgagagaaatgcaaggaaatgttgaggaagagacaatgctagtttcgaggttttataggtgtgggaaccggatcgagaatggaggcctcaaagtgtggaacagaaacgtggtgatgggaagaagagaaaagcaataatctcgttaggaagatagatggtggaatatgaaggataaagaagcagtggtacccggacgatctggcctcgagctcagaaccccaaacgagtgaaacaaaagcagagaaaatgaaaaggagaaagaaaatatgcatgtaacaggaacgatgaggggacgtgcaagagagtccaagacgtaggaattttggaagaagggagtattgatgatgttacgaaccaggagaaagaggaagtgtgaagaaagcgcaaagataccggaggagatgacaatatgaagaaaatcaacaagaacaggatagagtagggaaggaacaaagaagactcgagcctcgacgaaacaagtgaaacaaaaactctgaacggaactaagcactctcttcctccagaccatcatcacaaccaagatcaacgcccagactatcgtcgctcgtcgatttgaactcattcggaggttctaacggtggtagaagatcccacatgtcggtctgaatatgaattttgtttacattctccatcccgggttcattcttcccattgggaaagacaccaacatgttcaacccctgcgccatggtcatcggctgtgtatccacaagtgagaccgacgtcatcgttgtttcccatatcaccaccggcatgatcgtcttgaatcgcatccacctctacctcctccttttcaccgtcttcttcatcgacgtcaatagcgtcgtcctcttcgtcctcttgttcttgttcttgttcttcctcttcagactctccgtcgatagcagtacctcctccgagatcactccatcgttgtttggaaacgtaaccggcagagtcggccgcccaccaaggaggccgttctagtcggtcaaggactgtgtcgagttcttgaaagtgtcggtcatcaagagcaaaccggcgatgtttgcgtgagatgacatgctgaatgggttgaaaaaagaaacgataaatgatgaggtgaaagggatcagtattagttttggtttttccccagaaagacgatgacatcagattgagacaaggagagaggatgcagaagacatacaaccgagaaatcgtcaaacttgactctacagttctcacaatagcctggcttctttgtctcttctctgacaggtagtctgacccgttctttctccctacgctcaaagttaccgggtaaagaatgtctctttttgatcggcggtgggtccatcctaccatgggtcacgcttcttacaggctccacgatcgtgaccgtcggttctttcttgggttggacatttcggtaaacatgatcggccaaaactttagcatctaatcgttgatcttcctctctagctttggccgtgttaatcgcggtgacgttgtctgctccggtggcagtagtagtgcttgcatggctggcagattcactcggagcagtaggaactctaccgagaggatctaggacgggggcggccgaagataggtctgtgatcgcaccttcggtcggacataatccttttatagcttcggaagtggccgcaaacggacctctggacgcaccggccgccatcgggaccacacgcttgtttagctcagcgatcctcttctctcggcctctcatcgctagaagtccggtagtgccaccttgaccatggcctgtccctgattgctgagatgtaatagcagaggtgatgttgacagaatttccggaggccgccatatacgccgggttgttatcagcttctgctgctgctgctgctgccacttctgctgtggttgcccgagcgagattgtctccgacaaacgggtttcgattcgatcgtccgaggttgttgagcgagacagatcgtcggagatctccgttggctccctcacctctaagacgggctgccgtcgtcaggtgggaaggaatattggcaattggtctatcagttggtttagaattctgtggggggtgcgccggttcgggcttgattcggggttgagccggttgtggtggtggcactggcggacacttcaggaaatttccatggaggaccggccaatctgggacctctccgttccgaggcttctcatactctctagcaaggattgttcggtactcgcctgtcgcgtcctcgcacaagacatagtaggatccccgagagaagtaatgatgattcgcccgaggagctgtcaggtctcgttcacgcgttccatggatcttttcatcttcgaggaggtgggataaatttgagttgacgctagttttacggtgatggttcaagctaggcttcctggcaggggagtctgcgggtagtagtcggttaatgaccgaatggaactctagggcgcacacacagtccatcgtagaacatagaactcagagtcagtaagtaaaacggagatgacatggccaaagcttggatgtcggacactcactctcgacatcccatactttcatcttgaaagtcagcgcttttgctaggacatccgactggccggtctcatccaaaaatgggttggccagactgaataccgagttggcgtgagaggttaaacagaagaacgcgcagagttagcatatatccaagtttccaaccggaacgggttggaagacgactaacactttcgatcgggcgtttagacctcggtcggcggttcctatgttggagtttcgtctggcaagggtcgccggcgatggtggagcaagttgtttctcagatagtacagggattggtcggcaggtgatgacatgggtgacatgtctagagaagaacttgtcgatacgctatagtacgtgatatcaacgataagaggtcagcattattgatagttgacgagtagaacatgatagcatcgagacaaggattgagaaggatgagaacccgggaactgaaagagagtatactcactccgccaagctccatcaatttgggtccgtaaacgccgggctcaaccgagtcgaaatggaagacaaagctcggaaatgcctttgcatactttgtcacaaattcctcctcctccttctgaagcaaagccatctttgcctccttgtctttcttcagagtgagcccggctgttgatgctgatgctgtagataccgacaccgccgttgttgaaggaccggcagcggtggatgtatccgggcatctccctaatggtttgcgcggcgttgaggtcggaagggtctgataattaggcacagccgagccgttgacggttttcaactttttggtcactccggcagagatgatggagttgatgagggcgccgttatgggagatgttttctttttcacgatcaccccatctggaggcactggctgcggctcgtttgagaggagtgatcgaattaggtttcactttggcagccatccgtggaggagcggaggcgttaattgtcgatggacgggtcggcggatgttctggagtaggaggattggccgaatgagttcgggcaggtggaaggacaggtgaccgagggatagttatcatgacaacggacagaggagaagaaagatagagtatggaatgaaacttgaaagaagaagaagctagccaccaaacagatgggatgaagtggccaactttgcaatgcagggctgttgataaacaccaaagggcgggcgaaagagaattgaaagagcgtaacccgttagaaccgcctgtcctcgaacgatgatacacctagaaagcaggcgaactcgagaagatatatagagagaacgatactgaatgactactcacgacgatcagaagacacacacacacacacacgattgagagaaacaacaaggagagtgttggagacagagcaagtcgaacgacgaaagagaacgggaaaatggttagaaagtgtgagcagttacaagtaaaggtctggccccactatatcactgacgcgcgtccggcgcgtctggcgcgtccgagtcgcgtaatctctcgcgtcgtcaggcagcccttcggactgagcatcaacccggaaaccgtgccagagcgaaatcgaaattaaaagcgagaagaatttctcacgcaaagaaagagtgcagaaaagttgtcctgaaactctctagtgaattaacgagttaaaatgatagggaaacgaaatggaccaaaatgacaagaaaaaaatgaggtcttacccgggatcgaactggggattccagaagacggaactatcatcgtagatgatcagtttcaaaatctggcgtgataaccacttcaccataaaaccttggataatgataggataaattaaatcactatgtacaaattcaaatctcatcccttaatcctaaccttaccccctacttaccttcagctcgtttcaattgcaactggcatggttgatccaagtttggcaacatcagaaccccatttcatgattttgcttatcattgacaggaaaaaagaaaagacccatgtataagacaagaaaccagatatgctctagtgaaactaaatctataagaataatgtacgcgatagaccagacaagacaacacaagagaagacaaaataaaacggcaagggtgagaaagaaggagacggtacagagtttacaagatttctagtccttcttgaacgtgtctctaaacttggcatcctccttgacccagattgagacgctcaccgcattacacgggaactctgatgtatagggaacagcaaaatgaaaaccataaaggaatgccattttcagtattgacagtcaccatcaagaaaactccaatcggggagactcaccagcccaaccatcttctccgatgacaacctcgccttgtttccagcccaacagatccgtccatttttgaccagctcgttctttaccaacctccattcgcttgaaaccatcgcctccgttggaaagcacaacggcacacccgtcaggatgttcctcatcccccattcgaacccacccaaggctgttcattcaaattcgaattgtgacggagatttggataagccaggaaacctgtgtttgtagctgtagttgtggactcatcgagaagaggaaactaaccagttctggtgatcggagtaatctcgaagctctccgtaggcgtaccacttccgggctcgaataaagtcctcgagctgagtgacaggctcttgtgggttatctcctccgcaaccgtctgataaaatcgattccgatttcaacaggaaaaacattggaaagtcaatcagcattgaacgaagagagaaaagatggcatgatgaaaatcgtctttctcaatctgcattggagtactcacaaagatctccatagaatacacatgggtatccgtctactctgagcaggatgagcgcatacgccaaaggtttgaactgagggtttacccaagactcaagactctgcccacgctgagtatcgtgattatcaacaagagtaacagcatcaattggtcgactctggacgatcgttccgtcccagatctgtcgcatactttatttttttagaaccaagatggaagatacgccaatattatcagttttccaggttatcaatcaagagacaagataccggatagatgagccagacttactcgaactcggctcctctctctccagcttccttgaagttgtagtgaagcgggcagtcgaacactgagaattgagttcccagggtatccacatagttttccagcgagccgagcgaactaggtttgtatgtaacaatacggtgtgaggactgattgtcttatatcaccctgtttgtaagtaagccagaaagcataatacatactcttcccaactagtcaagagcagtagcgtgaagaaaagaagcgacgcccacgtgagcaaccgtagaaactaaatcgacaactaaaaagaagacttacaactctcctacacaaaacaacttatcgttcccaatttcttttcggacgtgcttgacgaactgtccgatgaattctcgatcaatatgcttgattgcatcaaaacgaaagcccgcggcaccagactctttcaagatccaggttccccagttgttgagatcctttttgataacaaacacatacgacggaagaaatcagatatacaaccagattcatccgacatttgcaagcacgagaggggaacgaacctcaatgacctcaggatgatggtgatcgatatctgcgaacatcaagtaatcgtaattctgtaatcatgaagtcccattttcaatgatccataatgagtaacataaacttgttttggaaaggaagagcgagaaaacaaagagacaaacgccgttttctccagacacagacttggcccacgtctttccatctccatgaatcttgaagatagctaggaagtcataagatcatggtaaattagatacttcgcatgaagagaccagttcagagatagagaaaaagcttaattacacacattttttcttgcccttgtcatcccagtctacaccggtgaactgatattggttgaggaagggggaggtgattagagttcatcacacgacgaccctaggcaccacactttctgagttaactactgacgtggttgaaattccacttgagcttggaatatttatctcctcttccggggaagctaaacccagtccatccgtcgatgtcgtaagcatccgtgatctccttgtttcggtctgtgtttgtccgacgtttggaaaagagcaacagccgtttgagcaacggcaacacacatgggtttctcagtatacggaaagatgtaaatgatagtaaacacttgccattagaatccacctcggttgcttggaaggtctcggtcttatccgctccggccttgtgattcaacacagcgtcgatgtacgtaagcactccatttcccttcgcagctgatgcccaaacaaccagtcacagtcagtttcagattcgacacaatcgtcgctgtcgccagactcgttttcgatcggttcataaaactaattattgacacgtactttcaatggcagaaaccaactcttctttagttccccagtgagttcgctgaccacccttctggtcaaactctcccaggtcatatagatcgtaaactagttgcacagaagagaagaaaaaaaggattaattagttcgctctggtttcagcatacgatcttgagcgcgtcaagagataaggaaagaaaaagggccagttgatggctggaagaaggtggaatgagatatgatgatgatatgagatgacgaactgtcgtagcctgtggattccgtcgagcttgcacaagtcggaggaggcagccacgcagccgtgattcccatgtcacccaacctcttgctctctttcgaaaacttcttccagtgtacaccattaccctcggcatactgtttcaagaagataagaagagttagggttatcagtcatttgagcagactgtgagtccgaatagatctagatgcaagtacccattcaaaatactgaatcatgctgttgaacaggatgataagcagagttgatttatatacgttcagtcgtctgggtcttcacgttttatcacatgaacccatcgacatacgtaaagttggccgggacggatttgatctcggggtgagagagctcttcggtagcggtagcctgaataggagatggccgaattatgagctaatcagtcgattgaaaactccttctgaagagcattgaacagaccattgtgttaaaagtaacgagtggatagggagaacaaaactagatggagaggataggactagatgaagaggagtagataagactagatggaggatgaatgtagaaatgttgaaagaatcagaagcggtttgttcatcaaaacatcgaagagtagtcaccatccggttaagtctactgctgcgtattgagaaaaggtctaggcttttcttgaatgacgaccatgacatcatcatcacactccccgaaacatacacacactacacacattacacacatacacatacatcacaatcatacgctagatctcgatcaattcgccaggtaagtttcaaacgcatgggcaaaccgccgttcgattccaccatatcctaagtatcggccaagacgagaagtctcctcccaggaaaagagaacagcacatgtatgccatccgatcggttctatcaaggtcgagacttgaatccctgcgctctccagcgaccgagtaaattgtttgatctccgagtcaaacgcttcttgtagtccatgatgaatgaagaatgttgtccctgcagactgcagaggaacaagaagtctggagacgagctcggtcacgtcctttttcgatgttggatcttgatttggtgcaggcgagaacagaggatgacgctttcccaagctagcaaaggcagctggatccagcaggttggacaattggttaacagtaaaggattctcccgtttcaatggtcggaatgtttgtcaagtatcgctcagaagcggttaccatctgattgtaattaagaatatcaagccggatgttgttttcgagcgatggttgagacagagacaaatcgagccagggctacagaccgtgacagaggcaacggtaaactgttatgagtagacacattcttggttcagagggaaaaagaggagcccaaaagacataccgaaatgagagctacctttccaggaacaccaagattgagttcatctttcgatatcgtctcctgcagtatgctgaggtatgagatcaagctccacgcaagctatgtttgatcaacacattgaagaataaatactttaacaaccgtaacgttgaataggtcaaaccaaggaagatcaacaagaagtcataagacttactccacctccagcgctactgccaaccaagacgatattttcaggcttaaacataacatgatcgactaggtatatgtagcatgctagtgcgtccatgagagcccccggaaatgaaccggactcctctgttgcgagtctgtagtcgactgtcaatactctagtattcttaggcgcgcgacgaaggatagagtaagcgaatggacccaaaagaggagaccctgccctacacattcgtagaaccagaaagattgaaaaaggtgtttatatccagtgggtcagacaatcgaatgttaaaagcgtcttcgaccattctataatttataccatcagaggaaaggaatgcttacacataacctcctccgacgaaataaacgagcactttttcgtcctcacttgccattccgatctttcgactttcctttccaattccaaactctcctccttcccgccatagccacgaggtgacaacctcttttctcttcacatgtccatccccagcttctgttccgtccccgaacccattcttgagtactcccaaacacgcttggtccttagcaggaggaattacaagtttttcactttcgatataaacactctggtcgttgggtgatccgaaaaggtaaactgatagccgcagggccccacgagccatagcagagggaggtgcataggtatcaggtgctggatctaacatgccataagtagcagaaaaaatgagacatgatgtccacgcaatcacagtgtcgatcaaaacactggcttccatattggaatctccgatcggctcgatcaatcatttacgtgatcaaggacaaaaatgtcaagaaaacccaaactgactttcttcctttgaccgtcggcagaccggggcctccaaaaagattgatgatccctccgatgaatatcaatggagtagaaataagcagaatccactcaagtcttattaatcggatgacatatgcccacgggcctgtcataggaaggtactctcgtagacatgctggaggaatgaacggaggctgcagaatcgcgagaggaatcaagacaggtttgtggcccatatcttgttgaggaactaagatgatatttggataaagaggatggagagaggagaatagcagattgatatatgtcatcgagagatggtaaccaacgggcgatcggttcctttcccttatctgctcacacttccgatgttgaaaaggtattcacacatcatgatgaatactaacagtacatacatcatactcttccgactaatatatacgtatagagatgaaactctttcgatcaatctagtatccggcgatgatgtctttgtagccatctactttgtgacctcttgagttcaccattatcgtcatcatcaccctcgtccccacgtgatctgatctgctcttcgagcagatatcagacttcagagtgttggcaaatcctgaagtcgaagctctcagtattcccattgctgttccttttgaggaggctgaggtgtcaaattaacaaggattggctcgtcaacatacattttaacagaagagcaataattgctgatcaatacttacagcgattaattctcctaccatatcacctttgtaacctttgcagctgagaaagatagaagaagattaataacacactgttagtcgaaagaatcaagagaaagcggcttttgtctacatgaacgaacacccaatatgcctcgccagattctaatcgatcaagacaaacacgaattagttctaagtgccctgaaagcttgacattagagcaactacttgcttaccagacctcgaggcttccggtttgaacaaagtcacactgtcaaatgatctgtctagaaaggtccgtttgaactcttgaagccttggataggtgaaatgctttattctgtatggaattagacaggtacgacacatgttacagactcaaacataatggggagcacgaagagttgcttgaagtgcgcacactaaagttcctcctggccgacgaacgccatccgcaaatacctgacccggagaaaccacatacacaatcagatggaaggcttcaaaatgttgactcgtaagaggtagaacaaaaactcacatgtccgagtctcagcccagtcttacaaaactcccaaacagcctggcaaatatccattcctgcttcctcatccttgaatctgtttccactcaagtctcctgccatatcactcagcacaagatccgccttgttgtgtccatttccgttggtcgcattctcgtggagatattcccgaattcgaagttggatttttggatcgagaaaatcaccctgtatgaaatggacatttggaagaggagagaacgggaggaggtcgacagctacgatagttttcaaattggacttcttggactgcaaagttacttgacaccactgaataaggggttgaaaggtagcaagtaattagaagacgggcaatggtcttggatcagttatcgcaagacgaatccgtcgttctgaacaaacgttgaaactcactcctccaggggatgcgcctgtatatttagatatttgaagcagccgggaacgaacgatcatttcagtgagaccacaatcataacgtattgtgcaagttgagtcacacttaccaagatcaacaatggtcctcacagagtctttaaacaagttgtactttttgcccatttcctgaagcttgaaagccgaccgggctcggaacgctcccttattcaagacgaagtgatcgtttttctgcctacatgtaatatcagatccatggtgagttgaccctgtacagagcggttgatgaagccgtatcagagaagctcacttggcaagccagagtgtagtcgacttgctggaaaccaagcggcaagccggctggatgacgttcgacaaacggtcgacagacacttcccgagcaagagtacgggggggaaacgataacattctattatgaattcttgatacgatacggaatatatctacaacggaaccaagcgaaatgagtcaacaaatgaggttcttcggtgttaggttcaaggtcggtgtcgaacgacaacaagagggtaaagaggagagcctgggaaacgcctgttgacccgatccgcatacgactctcaaccactcggcagtacacatccatcatcccttcgctctctcaatccaacaattagagggaggacgagaggatttgaccaaacatgtccacaagcactatcttaggcatgcttcctcaattcccgttccacctctcccctccatcatcttggaagatatcccggcaactttatattgggctcttcctgggcttcactatctctctctcttctactacacttgccctcttttttcagcaaagaagaactaaaaaagctacctcaaaagtcccgccacgacctatagagcttagagcggatgagattgtagatggggttgctgggctgattgggaatacgcctttggtgcggatcgccagtttgagcgacgcgttaggagtagatatcctgggaaaggctgaggtatgtcaagccctcgatttttatgcagagattggtgcactcgtcatgattcttatttttcttatgatctatagtacctgaatcctggaggttctccaaaggaccgggttgccttacaaagtaggtagaacaagcttctcttcattgactctgatcctcacatactgacagtcattttgggattctgaacctctcgcagttatcgaggatgctgaagctcaaggacttctacaccctcataccaactctcggatctttgaaggaacagtcggatcgacgggtatttcaatcgcaacgatcgcacgggcaaagtttgtgttgtttctgtcccagtcttttcctattgctcaatcagtctgactaacatctatccaatcctacagaggatacgagagtcagatcatcatgccggatgatgtggcaatcgagaaagtattgtgagtctatcagatattcttttttttctccattcaagagcaatctgatactgagtccaaaccagagttttgaaagcactcggcgctatcgttgagcgcgtccgaccaggttggttggtcatgaaatcgtaggaaagttgcgttcatcgtgctcaacatgatctttctttccatatattactttatcaaccatatctttccagcgtcgatcgtggatcagactcaattcgttaatctggccagaaaacgtgcacttgaatttgggaagacggtgatcacttccctacctggggttcgggacgatcttcttgccaatcgacgagaacagggagatgaccagggtctaggattaggaaatcaagacagtgggaaagtagacctggtcgtcagcgatcaaagtgaaagcattgatggcggttggaagaagggcgttggtcgtagaggattgtgagtccggtcttctatttatcatgaacctcctatctgttggtcttactgaatataccataatggttttgtataatctaactttatctcgtgtgaattagcttcgctgatcaattcgagaacccttcgaatcatcatgctcactatactactactggacctgagatttggcgtcagacgaatgccagtatcgatgtctttgtctctggcgcgggaactggaggaactctatccggctgcgggcgattcttgaaggaagtctccggaacgatcacaaagagaatgtacgccgacgaaggaaagcttgaagaagaagaagaagaagaagaagagaaagggagcattgtggataagctcaaacatgttggatcagaaccgagcaggaaacaagttaaggttgttttggctgatcctgttggttctggtttgttcaataaggttaggatgcgtctcatcgtcatctactgaaggggccttgttctgaactgactaggctcattcgaaaaaacgtctgatgatttcgaataggtcaaatacggagtgatgtatgattcgaaggaaagtgagggaacgaagaggaggcatcaggtggacacagttgtcgaaggaatcggaatcaatcgagtgcgtatcagggaaacctgagtcgctcctctctatatctttctttctccagacagttcactaatcaccataaccggtctttctcagatcactcacaattttgagcttggccaggatcttgttgacgaagcctacaggttggttcttccccacacgatatcttttctggctttatttcctttttgaattagactggatccttactcgtatatcttatataacccctcctctaccaacaaaacattcgtactccagagtgacggacgcagaggccgtcgctatgtcgaggcaccttgtcctgcaggatggactcttccttggctcctcctccgcctgtaacctagttgcttgtgtaagagccgtcagagatggactggtaccacccggggggcggatcgttactatcctgtgcgattccggaaacagacactagttcgtcatctcccgtcctgattcttccgtttattcttcatgcacctccgagattgttttcgcagaccgcaaaagcctgatcaacaacccactttccccgttttgtttatgccttccggcatattcttttgcttttttagctccaaggtgagtctagtgtcggcctttcatgtttttgtctcttgcacatgtgactgaaccgctttctctcgcataacagttctggtcagatgaatatctaacagcacacgagattccaatttcttccgacatttcttccatcctctatggatgattgcctgttcacgctttatgtccttcttgctcgctgatatccatgattatcacttggcttcaaagacgaataaggtttgggtagtttgtgtgagtgagggaaaaatgaccatcgaagaacagaagtaagaaggtcttatatgggtggttgagtttacaagacatgagggtggtcctgataggtagcaagattgatccatatgtatagggttttctagactagtggaatgtaagggataagaaacttggtaagggtattgtaagggaaaaataggatcgaatgattttgcaactaacaacgaaatacatgaagagaacgtgcagattcacgaagcaagaagacaaggaagcaaagaagaacataacaagcttacaaggtcaaggagaaagagaaagagagaaaaccgaatagaatataattttagatccatgatcagaacctcaaaaatcccttcttctttttcttgtctttttcctcgtcctttgtcttttccttcttgtccttcttatccttctttccaagatccttgttgtagttcgctccggattgagagtcctccgtgtaggatccctgtggaattccactcgatccggacaagcgagagctgccaagactacctggcccaccactgtgcctagacccagataccgaagctgctgccactggcggcggcgggggtggtagaggaggaggaacgaatgtcgtccagtgccgtctgtcaagcgtcaactggtatcgttgtcctaaggtgtgtggtggttgtaccgaagcgagggggaaggaaggatgaagtggatgtatattcggggggtttgcaccgacaccagagcggccaactgccttcaggtctcggatgaacgcttcaggagtgatgatgtgtgttgatcctgtcaattcataggagaaacacacaaccatgaagatgttcagttcaattctcagcaaagttggacacgttcaagaagatacatgaaatcgatggatacgaaccgatgatgacctctctccctaaggcagctccaacttgatacgcactcctcatctcagagtaggtgattcctccagcgacgaacaggatcagccgctgctttaccgtatcctttgtatttgatgctccagatgctcctgctcgatgccagttagggcgctgagaacgaagtgatccagaactgggcgcgatcgatggtaccgaagtcgaccgggccactacttcgacaggcgcatcttttacgtaaggaaactctctggcatctaacttattggcgatatggtcctgttgaatcgattgttgttgaaattgatagatacggttatagttggtgaacttgaaagaacaatattgatacacaagtgcagcctcaagatgaaaaccaatacagacctctaacatgattttcacagccggctggtatcttgacagttcatattcatcctcggcgttcgtcggtctctgtttgagtctttttttgctatctcgatcatttgggttctattcggaacagagaagccgagaaaatattgtatgccgtgtcatatatgatttttttctggcatcagtcgcgtgtcatcaccagagaagttacggaaggtgtgtccttaccttgacaacacgccgtcctaagttgaccagattgttgatagcatcctgttcggtcaaagacagcttggcatgctgaaacaatctccgtcgatcttcatccgggactccatctttgaatagtatatatagagcgatgattcgaactttatccaatcgtctgttcggagataattcgttcaattgtggaaatgacggacgacggaaaaagtcagacagatacgatgcaacgcgttcgtgacaatgaagaacaacctgattcatccacccatgtggatcattgagaagtctactcacgaaaccacgctttcatgctgccccaagagcggtaccatatcatccacaagagacttcggcattttcccttctggcgtagtcccagtcgcacagttctgtcctcccacaagatattcgcacaacaaagagagtcagttcagatttgatcaccgcttgaagagtaaacattacgcttcgatctaattgtctcatgaagagctaaagggcgaagaacacaaacctgttcaaccattccagtatccgaaagtcgttttttctcaaatagatccatcgaggtctgggccatactcaggtgaagcgaatactgcctccccaaaaaaagaaaaccttagtacaagtcagcgtctttctcgcgattttgagggaagcaagcaagacaaaccttctctctcaagtcggtatactgtggtaagctagccaacatgtccttcatatcattcaggctgacagccccctgcttagcactaaatccaccatgctctctaacaaacgcgttaaagtctcgcatgagtttatcaatcgcgtctttcatgtgaagatgtcggacatcgacccaaacagtatcttgctcgctaagcacggcgtctcgagtttctgaatggccgatagaggtctgaaaatcatatctaagaagaaccagaccaacgcgcgagaatatgagatatttttgaggacattatccgattgtatagattgcacagtaaagaaggaacatatgacggaccgatggattttaccatcttcaacctcgagtaggtcgttcaccatagcctggtaggtgaactcatgtaggaaaggcgcgacaggatctatcgatcgatcagcgatgaacagacagccctgaggtcggggcggctcagttttcttctactcaatacaaggaagccatgaggttagcgactgagcttaacattgacggtcctaccattgtattgaaagagctggaaggataacaagaaagagaacatacagggaatccttcgttttccgctttgaacccctgtagttccttctcgaccatttctgccaacttctttgccacacctccccccccatctcctaatccacctgatccagtacctcccctcgagatggacgaccttgatgctagtgccgatttccaacgctctccatttccggacgcattcgccctaagagatgaagacgccatcgccgttgtcaaattagacatgcttccttgaacgctcaacggtccgacagcaggcgaaggagcatatcgaatttgggggtcttcttccagaagagagagaacattgatgatctaattcgatgggatatatgtcagaaaaacgtgtctacgctcgcccacgttactaaggtctgaagaagaaagattgggaaccaacagttcggctcatgatcgacaagtcatcttcaaacgcgtccatggacatctcgttgttgattgctgaacccgggtttccataaagactatagaacgaccagggtgtctgagtggagaagacctgtgcttccacagctttaggcgtcacagtcataaaggggaaagccatgaagaatgagaatggatgggttagaacagaagagacctttgttggagccttgttagacaaggtaaaaaggaagaacagacgaacgccagagattcagatagacctcttcaaccgacttgagtacatctggaggaacgcctgctgccagcatctggaccagctcatccggtgctacatcaataaagatgacatgtgcctctttataacctcgtctgttcttggcaaaatcagctacgacgcgctgagcgttctgggtggttggggtgagcaagtagatcgcaggtagtgatgcttcacatggacggggtgcttggagattgtcaatgactggtttcaatacaatcgatcaagagaaggaacgtatcatcagccacgactgacaagcagattgatagtgttcctcaaagcattgtcatcttttctcagatctcctgatcgcctgcatcttcagcgcactttcgagggcatctctgattgatgctttccggtctatctcctctctggatgaacacagtgagtatcaaaatgatggtctaatgtgacataccggtaacattcaaagcgaggatgtcattagggctgacgacctcgtccaatagcttcttcgtgtgatcatccacgatcaaggtcttccatgcattaggacaaaccgacgcgatcttgttcaacacacctgtatgtagtggagtcagagagaagttagaaacacagaaaagtcgccagtcaaagtagtgtataaagctgtcagttccaagaactcctaggatggaaaggcccatactgaagatggaggaggaagaggaggaaaaagagacttgcgatgctttatgagagagatcaggttcagaggagccatgctaaacggacagtctgtttatagatcccgtaactaagagtagaaggttcttccggatatgaaaaacttagagatgggagtatacaagatggatgggtgcgaagagtgaaggtttagatgtcggctgggtgtatctgcattgatggcaaggtgaggaagtgacagtaattcgacttcgtggcgttagtcaccatatctgactggctggcttgacccctgtatcttaagcctgacgagatagttcgaaacaacatgtttacagacatcatgataactctaacaagcgagagagaaaagaagaaagaggaggtgacatgaagcacaagtggttgaaaagacgagagaaagtgcaatgagaaaggaacccagtgtaaagatagtaagatagaagaggatgggaagatgagagtgaacacagaggtaacaaaacatctactggactggagacagagaagacaacaatacaaggcgaagcgtcagtgaaatgatcgtgagctgattgagcatgatcagcagaagaaaaatactcacgaagagggtctcggaagtgtttttgcgctgttgaaagacagggcaagaaacggaagaaacaaaacaaaacatgaagacgtatgtgttatcagtaccacagaacatcagtaagtgcatcataaggtccagagaggaaagtatggacgaacagttgtgactaccaaaaacaaacgaacaccgttacacgtcagaatgtttcaatctacagctatatacatagtgaaaaaaggaatacagatacgtacatgaagccggtcctcatcttgaagttctccctggcctgctgtcctcggaacggatttttcatgacgttctttgcctctcccttatttctcgctttgacgacctgaccaccagctccatagtctccgaaaccacctctggcagggattaatgactgatcggtagcctccttgatcgtacgcctctcaactggaacaagatctctcgtttctggatgcaacgaagcatacgacggtcgctggttgtaatacctttgaagagaccgatggccgattcgacgacctgtaggaaggaccaactcaaaggtttccggatcgaatgatacacctccagcaccggctcggtaagcagcctctgcttcatcatctgtcgcgtccgtgtagtccgatccattctcatcagatgagtcactgtcatcggcttcctcgtcttcaacaacctcgacatctgagccatcttcctcgtcgtcagcagtctcctcggtctccatgtcttcccactcttcattgacgggcttgagagccttaggcactctacgtcgtcgtcgtcgaggcggaagagctccatacgaggacgagaaatcgtagtaatccgatagctccattcgatcgatttcgtttccataagcaagctatagcagacaaatcatcacatcatggccgttagctcgaatagtcaatggctcttgagactagctatcctatattgcagacgtaccttgcagtggctcttatcaatcatgtgtttcctgacagcctctagactcttgtactccttaccctttccgttgcagtacaaacagacgtttccgattgccaccttctccgttaggtagagcatgagaccctcctggtcaaccaagaactcttgatcgggaatgaagaatccatgagcaatgttcatgtgctcgatagccgcctcctgggtcgcatttggatgagagcaaaacaagcaggatgttgggagaagtctcaatcgagcataggcaatcttgttgtcgatcgtgtcgttaatctcttcctcagtggcgtcaacgtcggcagagagcgtcggaggagcacgaggagcggttgacgagtttgagggaccagagtaggaagggacagtgtcgagctcctcagctgtaggagttcgctcaggcaggttggactcgttggatggatcagcttcggtcgaggcttgcgaggcaagcacagaagcctggaacaatcgggtggcctctttcacttcggcatctctatgcttcttggattcgacgtgcgtgcggtaagctccctgtgaagcgaacgacttcctgtgagtacccacataattgtgagtcgttaaacaaaggtcaattcacgattcgaataatggtaattgtctcaaaattgatcagcaaagacgaacatgcagagtcggcaggtctctcccttcttggtggcggtaacagcgttctcgtttcgtcgctcaatgacctttcggttgaacaaggcggcggaaacgggaggcaagtttgcgacgcgtctctgtagtttgtgagatcgtgcagaaagtcgatgaaacgtaacatggggtgtacaatgagaagtcgaagatcaaacaggctatcagttggtgtatgcttaatcatccataaaacggagacgaacggaccttcatattgtacctatgccaatcactcctcatgtgatctctctgctcatccggagacaagaaagcaaccgagcatgacaagcatctgtatacaaaaagcacgaaatgaatcaatatcggataaaaatcatcataaggaagaaacacacgaacgtaaagagctgatcatggtcgacattggacatatccgcctgagcggtgatattgacaagagaagccgcggcggtggcattcaaattaagccctgcggctgctggattgggaacagccatatcgagtttgtatatgtatgtaggtatgtctgtgttggtgagagcaagcacgatagctggctgagataggtgtggtgtgtggtgtgaatgagtgggggtctgacaacctctctcaaattatcagtgccatccgagttgccaacacagcttgaggatcacgtgatttattttcaaccctcaatccccatatcttactcatccagtctaagtgacaaccaaggccgcttccttctgcccatctgtctcatgtcgcgcgcaaactggaagacaaaaccgggttgatcaatgaagaagaagaagaagaagaagaaagagttacatcacgagacacgatgctgatgctgactatgtcggtgctgatgactttagtgtgggcggtgacgataggaacgatgttacaatggatttgagaacaatctcccttctctttctaccaaccactcactaccctttcgtacataacatgtgttcaacaacttcgcactttgaagcagccacccatcgaataccgggaaatcttcatgtgttaataatcaccacgggtagtgtcgcttccgtcaagcttcctcttatcgtccaggccttactcaaagtagatactcgagatcctgtcttgcaatcctttacacgtacgcgagcgacatctgacttggatctttcgttttgccgtctcatgattatgtccctgcgactcatctatttgtaacacgaaagaacgagaatatatccgtacaggtgatcgccacagaggcaagcttgacgttctttgagcctcaggaggcagaagctgtaggaaaaggagtcaaggtttggagagatagagatgaatgggctgtacgtctagttcggcttttactatcgcttcacgaattgcattgtttactctctgatacatggatggatcgttgagcggttttagacctggaacaagataggcgatcctattcttcacatcgagttgaggaggtgggccgacttggtccttgttgctccttgttcagcaaatagtctggctaaaatagctggaggtctgtgtgataacctcgctgtgcgtgtccctctctgtctaccctctcaatttaacgtatattctcattccatcttcttttcgcaatgatagacttcggttcttcgtgctttagaaccctcgactccaacgtacctattcccagcaatgaatactcacatgtatttccatccgctgacggctaaacatctcagagtagtagagcaagagatagggtataacgtccgtgggccggtgggaaagacattggcctgtggagatattgggctgggagccatgctagaatggaagtgagttcatggatatactccctttcttcaaaatacgttctccgaccaagagcatcgttttgatttgttgcgctactttccgcctttcatctctaacagagacatcgtccacttagtagaggaacatcaccttaagactcattcaacatcaactaccactccttcagagactactagatctcagactggtccttcttctcaactcccatctcttcaggatcggctctgttctccccttgatacattgatatcctactcgcgttccggacagaaccagcaaccttctccgagacgagatcctgaagtattcgacctagaagctcgacaccctctggttctgtctgcccaagcgatatctgagttgcagtcccaactcgttcttccacctagtctggttcactctccatggcgcgacaaagatggtcttcgaatattctggttttgtcccgagcgtctaggggctaggcagctgaaagcactggcaagcgcgcttgaacagtcgactgggcaggatgcgcagggagctatcagtgaaggtaaagacgaagaagtcgagaagagcaagacctggttaagggaaacatatggagagaatgattcatgatttggctacatacgccatgcgtaccacaattgagaccatagttgctggtaaagaagagataccataccttgaagcctgagaagaaggacgatgacgatctcgtttactgcgcttagtagcagaaaatccgctcattctattctttcccgctttatgcgaataccctcaatcgtccatctggatactatcaccgtatcatctctcgttgttgtcgccatcgaaccctctttagtctctggcttttcttaggacaatggattcttcacctcagatgggaagttcgggtactaaaccgtcaagggctcctccggctcctccttcttctgatctcgataggttgaacttagatgacacaggcaagctcttccgtttctgttatgtaaagcgtggcatctgattttcttggtcgatcgatacaatacgggcccaatcggtatgggagaatggcctgagaagagtccttttggtagaagagaggaggaagaatgtgtagaaggtggctgaagatgagttcaagttgatctccggtcatcctattcttagattggaagaaacaccatcagtataacaagagcagcagcagcagcagcagcagcagcagcagagtggctctcagtttttgtctcgcccatcctcctgctcaccatcccgacttgatgtgattcgtgtgatattgggatttgtcttttcttaggatcgcactgacgtccatcgattctcctttgatcaaccccattcttatggtaacagaatcaaaatccgttagaaaacgaacacgaccacccatccctacgtcctccattttgcatccttcaatctcgtcgctcccgaaccacaatgcttcgaacgcacatgttttgactcctctccgagcgcattatctgaaaaagttccttgtcaaccatcagtttatggatgaactcgctttgatctcggacccagcgttggggatggatggtatcgccgcgttgggggcgccattcaaggcacctcttgagcaagttccgggcagggaggaaggaattatgagaaccaagactttgccggacctaccattcttgaagtttatgttcagacagtttgttctgacatttccgtaagtcgtcctttgtctatattctctatctattgagaatctcccgcctgatctcaccatctactctgggtatatatccggctcacatcattcatgcccggacagattcttgacagcggcacctgctagtttctggccacacaaagttcaaccaaccctctcccagttccttgcgctctccctggcaccttcctcaattcctttcttggatgatgatccgtccattgcgacagacgctgccaaacgaagacagatctttgatcgacttgagaaacatatgaccgtcctcctcgggagcgccattaaggtagaaggcggagaggaagtcgtgagaatcggacaggatgatttgcatgtgctcgaggaggaagcaaagagaagagttcagcttacaggtggagtagaaaataaggagagtccagaatttgagattaatgtcattggcgttcgaggtatagccgagaagggaagagtccgaagcaagactcatgaggtaagtcttctccagagtctaatcatttcctcccttagagagtcgtttttgaaaagttaaatacgcgtttttgcattcacaggaattccttataagaacccggcgaacgaatcgaccagacgtatatgtttggagaagatatggagacttccgccggttgtctgatgaggtttgtttcttgcctcttcgtcctatcaagtcgtatccaacctttttcttacatcatttcatatatcctgacatagctccgactccaccacccaaaagaggagatcaggtctccgcccgcaaaagatagaaccacggttaccacaacctctgctcaagcgcctggcaacgtaccatccgcccctcaatccaccagagcgtacctcgcatcttggattcctggtgcatcctcctcctccacttcaagccctcgaagctcgatcgaccacaattcatcttctgtacctggctctcctttcgatccaacactaagccggacatccactgctgattcgggtttacctcccaaccttatctcgtccaatttgacaagggagaagaacaggctgacccttcggtcgttccttcgttcgcttctcgctaaagcaaccttggcaaactcacctgttcttcgatcgttcttgctctcgcagccagtcgagctctcggcaggggaacaaatcgacgctcgacgcagagaggatgctgatcggattcgagaggaaggaaagaaacagttcaaacgggaagctgagagacgggttgaagaactcaggagttccatcaaggagctgagagaagaagttattcagaccggtggaatcagaggtgtgtttgagatcatcaagcagactgagaagaaagaagaccttcctgaggacttccaaaaggttcttgaatacggacgtatctcgtaagcctataacctgagtctgttttgtgttgtcctcataaaactgatagttctttgacactgttgattcgaagagtggcggctgcaatcttccaaacatttgttgcatcggatgatgcatctaacacgctgtcccaactcaagcgtctgcatggtctcatgccttacttcgttctcaaaggaattctcaagatcagtaatcctatggcgatgatccgaggtatgtagtgttctctcaagtcatacaacggcagaatgaatcttcagctcaatatccttgcattcaggtgtcctcgatctgtttttggctagaccgttcggagggcaaagtttgattcagcggtaagagggtcttcttgagtgatcttctcaatgttcctatcgctgaacttaaggccgagttctcttttaactgttttcagaatgttctccactgccatcaacgaggacattcgggatctaaccgaacagatcgatgtcctgagtgaaaaaattggggaccctgttttctgtgaaaaagtcaagcagtttgtcgctgctcccccggagattcaaaagctttacaaaatggatgccggttcgttctttctgtatccgctctcaagttgcgcttgtgacaattgatccctttctcttatcgttgcgtcaacagacgcggaaggaattgatatcttggcagtcatccttcggtccccagacgcacctgcattgtctcgaccacagatgatgagagtaatccaagctcatagagcgtactcccaataccgatccgaacgagtggaatcggccgattctgacgaagacgacggaccagaacaggaagagggttggctgtttgtggatctcaattacgttatgaaactatattctagggtcagggagagagagaaaatgattgctttgatctttgaggtgagtttgatgctctcattctctttgaacattctttctctaaacatcttgttggatcgaattgttcgactgacatcgtgcttaacatactctctgacagggggcaactgcagagttgatgaaggatatcatcactatcttctatgcacctctggctcaggtttataaagccgctgggattgccgattcattaggtgatcttcagaacttcatcaacgatctaatcaagacacttgaccaagttgaagatcgtacgtttctttgattcacaagtgaaacaatcttctatgagcatctttcgtacctaacctctctcttttgaatttacctgatcaatagtgagtcaagagaattcaagtcaaaccgttcagatctttatcgatcttgttgagagacacgaacaatcgttctatacgtttgttcacaaagttcattccaaggggtccaatctgttctcgtcattcatgtcctggatagagattttcctcgatttcgtccgagacggtgtcccttcgaaagctgccgggggacctggaaagattgatctcgaagtcctactccctcattccggacctgaacgtcaagctcttctgaaagaagttgacgacatcgccgtgtatcactacaaactgaaggtggctcatgaatcaaaagttcgtcgaaagttccttcgagccggtggaaaatccggtggatcgggtgaggcagccgacggggaggaggaacaagaactgatcgactcattggtggatgggctgagcattggcaacaccatgcgaagtgatgttcaagagatcgaggaggaagacagtagcgacgatgatgttatctatgagaacgatgaggagagcgatgaagatgcggatggagcaggaaacgatggattcagtactcctccagaggagagtacgatgcctctccaatcaccggccgttctcctctgggacgagaagagtcctccgattttggaagctcccgcttcaagatcactccgtcatcctatccgacacaagaaatcaccttcaaactctagtaccgccatccccaccaactccaacggatcctctacaacaacctctggcaacggagcggtgtcaggtctgcaaaggaggatgccaccgcctggaacaccggcggatggattgtacggcaagaaagagacggcaaggcacgcgaaaaagaaaggaaaagttacaatcactcctccatccgttcgattgctgcctgatttactacccctttttattgaaatggtaggtctttcttggtttcctttcctgacaatcaacaactagctatatactggagacctgttctaaccatacgcacgtttataatcatataggtccgaccccttctcattgaatccaagctcgaggatccgcaaacagctaaatgatcgaagctttctaccatctcccctgctacctttctgtatcgtgctcgcccctgatttcatcgatttgttctattctgtcttgtctggttgaacttcagatttatccacggatttttcttgtatattattattcggtcttcatattcatcaattgtcgcttcaccaattcagatcacttgcttgttggctgttccgtctcgttctcgtttatgcctattcatacatgaattcttgaacacacaaggttgctcgatatatattacggctctcagtctacagtaacgatgatcgaatgaggtcagatgttgagacaaatcgtggtctggaaagacatcgaatcgaagatgcgtacgagtggatgaatgttggtatatattgtacaaaaacgatcttttatctcatccgaactcctcgttctgtcaaattgaaccaatccactctaacaaaacgcaacccaactcgccccttgagctgaaaatagactgatttcactctctctgcgattgttcttttcggtatgccttgttttgggcatctcgtttcttgaacaatttatttctattggcgtccttggagattgatttactatgattggaatgtgacacggacgtgaaaataagatgagatgcgttttcaacaagacagacaagaatagcgtgtgaggaagaagagaaactcacttgacactcttgttttgctctacataactcatatgttgacctccactcaagccgaccatgctacccacactcctctttgccgccggtgcacccgtgtcaaacgtcggatctctacctcgcttaccagccgtcttgtcatagttcgactgatcagagatgacctctgctttggattcgttttgacgaaggacagattcgagaagttcaatctgttctttttgagtaggaaacacaagactgggaagactctcgagtccttctaacttcgtgatgactttgaaggcatatccttggtcgaccaagaacttttgacgttttgtagagtaaaacatctcggtggtatcctgagagactaatgagtaaaaaaatgcgttaaagccttcatcgtttcgtcgcttggctcgaaggatacgaccttgtatcgtgagaatggaggtcgaatcaaagaaatatgacgtatgagtaacaatcgatagaagctgtcaagggcagaacacaaacctaatcgttgcgcctcctgccttctagatccgaaatgactcgagatctgaatcaaacaggtagcttcgggcagatcgatcgatgtgtctccaacctaacaagataaagaaagtataagtcgatctccgatgtagtacaaggaagagatggagaagggaaagtgactgactttcgataagaaaattgtgctaacagccgggtcattctgaaatcgatctagaatacgaattcgctcgacctgtgaagtcgctccatgaatgaaaggctttcccaacttgatagcgtatgtctgtttcaccgtagattcaaagaagtgtcaaaaggagtcagatagatcttgataacaatatccaaaatcagactgttgtacacccgatcaacgctcacctccaaagcatatacgttgtccgaaaatacaatgattttgtctcctcgagtctcgtggaaatcaatcagatactggcagctttgaaacttggtcggattcatgcagtgtagcaagagcttctttctagagccctcccggaggtattccttataaaattcgggtgtcattggacaccaaacctcagcacactatgctcatatatcaagtcagtatttcgattgattataccagaactgtctaaggagtacataatgcgtctgttgaagagctcttgaaaacgagactaacctggacgtttgcgatatgacctttggcggccaagtccatccagttggcctcgtagagttttggtccaataagataatttagatccgtgattctgtcgtcctctcgtacaagagttgctgtaaagtcaaaaagatacgaatggtattgtttttagccttcttgatccgagacagataattggatcgcgatttcaacgatctagaaaagaagaagagtaaagcataactcaaagagatgaagtttgatactcacccgtcagcccgagtttagcatgggtcttgagtgtactgactgctcttcgaaaaacgttggcaggcgcaacgtggacctcatcaagcaacaagaaaccccattctcttgaggtcaagaaatccatcatctttgccgaggcgtgggatcgcttagaagtgttggcaatcattgagtatgtggacacgacgattcctgatggtccagtaaactacaacgtagttatgcataatcagaggaaagtgagtccagagagaatgagatggagttagagatgagaggaagcgtgaacaaagcacacaaaccatttctttctcgtctgcagtgaatacggagatttgcttttcttgaatattggagaaatgcaggaattgttgtctccactgcatgacggatactctgtaaaatgatgctgtcagtaaaatgtttgagccttcatatacataacacgccaacgaggaacttacccggaagtgcacaggactagcgtgctcttcttgatagtacaagccgcggtaataccgaccagtgtctttccggctccacatggcaacacaataattccacttcgtgctcgactgtgataaatcgcatccaattgatcgttaatatataaaaaaacgctcaagagacgtagaatcacagatttacttacccgtttccaaacattttgctaagcgacttctcttgatagggtcggatcacagtaattggtttaagatctatctcaaggtccgggtttatctgatcgttacgaaaatcgtattcctctagaactgggtattcaatatctttgcagcgcttcttgacgttcttttaagtgcgacaacatgacgcgtattgtctatatcagttattcaaaattcctcttcttccgggctcagggaaggctcgaattgaaggaaaaaacagacctcaatctcagcaggttgaatttcgaatgtatgaacatcctcatcttcgtctaactggtcctccttttctaagcccacatcaactcctttgaagaactcgtcttcaacctcccgtcgtataagaatctcatcgtcccccatctctgtggtctccttcgcttcctccaactgttgaccttggccagctccaggagtgacagatccaccagcgatacccaatcgggctttcttagccgcctctgtaccaggaatgaccagacctgcccgtttgggggcgatgtctcgtcccagacccgagtttgaaccagttaaaggagtcccgttctgagatccagagatagggggcagagctctagcttttttgatcacatcgtcccgaaggagtcgttgtagaagttcaggatgagatgattctaaatagtaatggttgtgttttaacaccagtttgattttaccatatgaggccgtccatgttcgaatttgttgtagaaggtcttcgggtataggaatctagagattcgtttgattcgccatgagaacaatctcaatacgagttgaacagggtagaaggagtacgtaatcgtacagtataagacaacagaacctactttagacagtcgattcagaacctcgataatgtcctcggtttctaggccgacggacatggcagcatataaagaatattcggtgagcaagtactcatgaatgaaggcaggtctgttgtttgatgaagacaaaaaaagggacttgagtcatgcaatccacatgtattcaagcacaaccacaatcaccgagccctaacacggatgaccatagtgatcgaccattctattactctatcacgaaacggatgtactccaattactcacctggacaccggttctgctacggcaaccaagaaatcctgagcttgttcggcgataggactgaacccttccaggatgatagtcccgttttcgtctatccacagcggcctacttgaatgatcacccttgagccactcatcgcccaaatctatcgggaagagcgagctgagcaaatctgagggagatgatccagtgagttgaggagaattttctgtgagacgtccttcttcggtaggagggataatgctctcgttgttagaagaagcagtagaggccgtagccgtatcggtggcggctcttcgggtgagcgccgagaggttgattcttggaccaccacttgttgagccagtggtcgatggttgagtgagcctgatcttctttatctgtcttggaacaggtggaggagatgacgcgtcggaatagaaatcgatatcttcatagtcaacagcgtcttgggtttcttcatcttcaatctctgtgacctgttctggttgattggtatgggcagcgacggtcgactggcggagggaagacggacctacgatttgagatgggaagccagcagtacatcagacaaaaccatacagatcacatgtactcgcagaactatattaaatcttgccaaatatataacgactgggctgacctgctctaggaatcatggtatcagtccgatcggatggtggagagaagttgaaggtgagcagactcgtcatgaaacgggtgacactaagatcggcacagacgggtggcgaacgtgagtcacgtgcgtgtcaggctgttggtaggagagaagcacgaacatggtcatcgtgatttagatctatagaattcaaggtgagatcatctattgtatcaatcacatccttacttctgctcttcacttagaacggcactggtgtatcgtatgatattcatatcgggcgctcgtattgagttgtgttcgaaatgggaacagatatatgtgcgtggaaggtcaagtgaagcttctcaggtttccatagacctccccgaaggaagtcaaggatgttttatgagtacgccaagggtgtgcatgatagacagttgacccttctgacggttcgtcgcatgcaccgtgatttgctagcaacaagatacttaccaacatcttgaattcccgtcgttttattctgggacatgcagcaaaaacaggggttcttctacttaattattctttgctcgatacgtaggagaatgcatgacatggtgcttctattgagtctacggcaactgagagtcgactataagatctcttgttcatgtgtctgttcttccctttccatctctcttcgttacgtacgactccttatcacttgcctttcgacagcgccagcggaattcgactagcatctcttaacaacagaagacaccatcataatggattttgtaaagaatcttgcaggcaaaggaaacaaagacaacgacgacgatagcgatcgaacctccaagaacaatgtgaccaatcctggtccgcagcgaggaggtgattcaatgggaatgggaggagacactatcggccaagatgcaggtcaagatgaaggcatgggcatgggtcagagtggcatgggtcagagtggcatgggtcagagtggcatgggtcagagtggcatgggtcagagtggcatgggtcagagtggcatggactccgatctgtcgggcgggggatattcgggacagagcatgtccagttctggaggttatacagaccaagggaacatgacaagttcttcgggacgccagactatgggaggcaaccaaggttagtatcttgtctttcttcatctgcttgtcttcatccttgttgtgcttccactcatacaacagcaagattcttgggcaatatcgcaggtaaagactatcaatcggacctcatgggaagtgactcccagagtgtagatcctttctttggaagaaccggagataaccaggctgctgatagtaagcctattgaaaggaaaaaatctcttagaggacacataatctgacatccctctgattgcattgcattcgatcaatacaaacaagattctggtggcggtaggcagttcgggtcacagaccggatctggatactaaacctccgatatggcccgaccatcccatgcgttcttcttcctgatcacatgcccttccttgctctcttgcgtttaccgtgctgtctgtctgcgctgacagctacattatgtattctttcatactcttccattgcaatatcttgctgctgcatatacatgatgatgtagtagagtctgatcctctgggcctacttctggctgctacttgtgcttcttggcagagagagatataacggagcatataattgttacatgcacctgtgtattaaatcagatcttggacttgaagccctgaatatcctgagtgtagttgagctccaaactggaaaacagtgtgatcgatgatcaaagagaccgtcagaatcgaactcttttgtcaaatgattgcagactgattggactaaacttaccctgcagcaagattcttagagacaagctccttgagcgcctcgcctttaccgtgttctttgaaagcggccaagttctcatatttctcataagcgaggaatgtatccggttggtcaagctgtcggaggatggtgtaaataagggttccaggctcctgtatgatatagaccaagtcagaatcatagaaaaccatcagccacgtgatgttgcgaaaaaaaaaacacgaggatgatcacaagtcaagatgaaaaaataaccttgttggacttttcgacacagatattgatagcttgaccgagctcgtctgccttaccgggcttggctgtagatacagaaaggtcagataagacgaatcattatcaagatcgatggtaagaaaggacattaggtcgcaacaacgatcaagtctgtgcgaagacgaaacatagacgtaaagcatgcataagaccaagatcacataccaatgatctttgcaaagacaatcaaaggagcatctggtcgaacgttatcggggacagcaggaagagacatgatcacagttgaagcgaagattgatggaaggaagtgatgatgatggttgaagatggtgttcggagcttggaatcgaatggtaagttattccctgtttttcccggatattctggcgattacctataaccgaacggtgaatgattttgaactggctgacgtcagactaagactccaccggggttatcgcattttgtatcatctcagaaacctttataactcaagtgttccctccgatctatcaagcttgcttaacccgtccttctcttccgtcaaacttgttcatcatgttcttcttcccaaatggagcctacaattactcgctctatactgttcctgtagcttggatcttgtcctgttagtagttgatcgatcgattcgatggctaaacaaagcgaacagttacttattcgtgtgggataacctggatgatatatacagtgacccctcatctttatgccgtcaacaggtggaactctttgagaaaggatgaatgggacaactcaagtatgttgcattcccatttgacttcactagcccattgatatagcaaaatttggttagagtcggctatcgtcctatgggcatttcggctttgaatttgaaactacatcctcatagttgtcttgcaattcactaacatccttttgttcaaattcataatatttctctcgcaaagatcctcgaggattcttgaatcagctgcagaagaaagagaaactaaccaaggagtatgtcagacgttttctttgcttttctttaaatcggtcttttgttcaagtgtatcggtgttcggtctctataagtagtaaggcataagatagccctaggctgacgtgttcccttataaccctgttttagagagaaggtcattgtccgagccgaagctgctcagcagaatggttttgagaatctccccttcttcgcagttgctctggtatgaagtttcctctcgacctgtactttgcattcgaccttctaggaacatggcgtcgatctgacgtctctcctgtcttcaacagctggctggaaattatgccaaactatccaattctaccttgaacaatttggccgctacatacctgatcaccaggtatgctcaagtctacagctctttttttaatggtctcctgctcgaaatcgagtgagctcacctcactattgacatcttcctaatctgtttttaatatgaagggctttctacaatcttgcatatatcaagatcgataacaatcggctggcgcctattcgaactgttcttttcctttcggggatagggtgctgcttcactttgtttgttaaatctgccaatgcgcttttctgagcattgtactttctacattgtacatctagcagtgatggacactcaaggaatattcgtgatttgctgtagtatcgatatcttcgataatattaccaatgttgttgccattacaaagttcaacttaaagcgataccgcttttgaccacaacacatgattgaaaatttatttcgataatgcatcaatctttgagttggtgtagagactttgtacacacttgacaacctcaagcgacaggaagtccccactgttaccgaccgtacatagtgaattggacgggcttggtttgaacgatgtcatcgatctctttcaagatctctggagtcagcttggggatgacatcaagcgctttgagattgtcgatcacctgctcaggtttgctagctccgaggatgcctttgaaccatgggaaagagagaacgttgtaagtcattagactgatgatcgaagagagagagagacggctgttgaaggcggagagaaacatacatgaagacacattaggatttgtgatagtccaggcaagtgagagatgagtcacggtgcatccgagtttcctatcaatctcgacaaacgtaagtagaccgctcctgttcgtgtacatatacaagagtatgaatatcgaaacctactcctcagctaatttggtcagcttcttcaccttctcgatcttcgcttgaccctcaggactcttgagagcagcgattgtatcttggaattccccaggattagtcgcgtatcgagagttctctgggattccgtcattgctatagttattgcgaaatcaaaaaaatacaacgattatagcagactgccaattctggaagaaggaacaatgagacgtactactttccagtcaggaaaccagagctaagaggggaccaaatcattgttcccagaccatatcgatcaaagataggcaagaactctctctcaagtttatctcgaacactgagggtttacaatcaaatttgtttgaacaagcaaagaacgtgacggctaattaggggcatgacttttatggacgtacagaagagagtattggggctgctcgacagttggagcaatcaatccaaatttgtttgcaacatggaaggcctcttcaagttgcagcgcagtccactccgaagttcccctgcaaggaaaaaaataaagacagtcagtatgtaaatcagctcggacatcgcttcaagatggcactgaccagtaaaaggccttgccctggtttatgagataagtgaaagatcgaacgatctcctccatagggacagtcacatcaggtctgtgggcttaggaagtgtaacaacgaacatcgaaagaagcgatatgagcacaaaaggaagagtttaaagaccttacgagtataacgcaccgagaacgatatcgagataatctaaccccagtcgcttgagcgactgatcgacaccctcgatgatgtgctttcgagacaatcctatttccagtcacgtgattatagatgatgagctttgcccagatcatgacgccagaacaagaatcgaaaaagaagcctattaacctcggtcgttgggaccctttcggccgacaccagagaaaactttgctagagacaacgatgtcgcttcgtcgaataccaagttccttgaagactcgtcccatttcaaccctaatggtacaaagcgcgaagtgacgctctcagagatcagaagtagatgcgcgaatagatctaagggggaaaaagatcatagttcatcaccactcactcggattgaccattggagtagttctcggcgttgtctatatcgaagagaagggacgaatatcatgaatgtaattccaaatgacaggcttgtcaaaactctgcaagattcccaagcgtgagacaccatgttcgtataaacgcaccaaagaagtttattccattttcaaaagcagtcttgatgatgtccttgactgggtctcccttgactgccccaccgtaagtcaaccaccctccaagggataatcgagagactcgaagcccggaccttcccagccgggaaaagatcatctacagaaaacatctcttcgcgatcagaccagagtgtttatgatagatcaaaagaaccagccttacattcttgggatcatattcgatagaaggcgaggaagacatgattccggttcttttgaaaggggtgtagaatggggaaggtggatgttgagagatgaatgcgatctcccatctaaatcatttacggtagacatcttgttcggcatgagtttctatctcggtcaaatccgaaagccgaagttgactgagccagttgtgtcgacttcgatttttgtttgatgtttgattcttatttgatttatgatttttgtttgatgttaaatcttgatcaaagcaatcatgtaagagaagagcagttctatcgtgtcgtgattgtcgtcatcccaagaaatatacagagtaaagagtgtccattgagtagatgcatgttgagatgagagaaacaaagaatgaacaagagatatataaaaagagccgcacgtcaactcagatatgggctttccggatcaccatccggagaaaaatgccgtgctcgttataggcttcagtctctccaccaagactactctggtagggacctccttggcaagcttattgggtcggcctccgccatcactcgaccagcggtgatgcttccccttgtttgtcttgactcccccaatgccccccaaactacggatagaccacagtgactgggtcattgcttcatcttcgacttcttcatcttcttcctcgtctgcatccgcgtcgacatcagcatcaacgtcggcatccgctgctccatcatttgcatccatcctctgcgaagatgtcgaccggctcataccttttggcgtcgcaaatccttccagtgacgactccacaatgccatccaacgacatgcgcgccttatgtcccgacccagacgagctgaaacttcgacctctagccggtcgaggagcaatgggtattcgatgccggctgggaggaaacctaaacgacgacgacgactgttgtatgaatgatgacgattcggaatcatctccatcggaaaacgctcctctggagtactcagagtggccggactcgtcttcccctgcgtctatcgatttttttctaactttacgcattcgtttctgaagtacccaaatcagatgagtcaatctcgagtctcagttcacccatcaactaacgaaactgtcaaccttcggatacaaacaatccagagaagactaactttttgggttctgtcaaacttgtcaagagacgctagcgcagtaacacctgagtgtccttgaaatcctctccagaccgtttgaggacttccggagatcggtgccggcctgaaagatgcaagggatgggcacgagaaggttgaggctccggcagaaagtctcgcctcggagctgtgtcggtggtctatggtaggtcggacggacacaggcaaggtttcaacagaggcatcgacagagaccggtgtcgagcccagagtgtctgcgacgagctggtcggttatcggatcgtcagggacttcaatctcaactcgaatgacctccatcctttcacgcctacacaattccaggggaccttcgtcctgagagaaaataatcaggttaaaacagcattgtgtaagctttgtgctcgtgacacccatctgcacaaggaaagtactgaccgtagttttcaaagactccagtaagctgtatccttgtcctttcaactacaattgaaaaattcgagacaatttagtcacggacattaattctcagagactcttcaccaataggacgattcagaaagaatacacctacaacagcgagctgacgttcccacatgtcttctgaaaaatcactgtcgagctcgaatcttgatgttttgtgtgggtatagattagtagaataatcggcgatgataatgctcgcaagaagatacttacagcgcccggagctccttggttgtttgctcccaccacgccggggacgagaacaaaggaatgaaatgttttcgaatcgattcactgaaaggctgactgaaaaccagtagcgatcgtaccgacaaaagaagtcaattaaatgatgaggtcgtaatacttgggcagagaattgtcttacccaattagggaaacggggaggtatagccatccataagtatagctccgccatcctttaggatgatggtgagggaatgatagtgaattatcgatcgctgaagaacagggagataggtaaacgattaattttactgcatggtttcggttgttcgttatgagatggatatacaagaaaaatccttgcctgcaatttgaattcttggacggttctcggttgattctggagacgtcgtttggaaggctttgcctatgttgggcaaagacatgctcgaaggaggctcagaaatgacagttggtacaaattttggcgccggcggggtcgctggggtgtattttatcatctgatttggcaatgtggattatcaattgaatagagcccataattatttactggtccttcttttctatacgtacatagttgtccatccctgaaacccgagagagatccgtggaagacatgttggtggcgacaacgagacaagaggcttgagaagagtgaaatcagacgcaacatcaactatgcagacgcacctcgatccgtgttgtgcatcaacacgtccaaaacaactagcttttgaagttcttcccaaaactgagtttttaaatcggccgtccacctgaaggtcacatctcggccagtttgttgatacccttgttcgttgtagctattttggtcttgttcatattcgttcccatcggcatcccacgtgtcggctcctgctcgaccgcagaccattgcacctgcccgaagacatctccggagatgatgccgactgctgtggtgatccagagcttcttcatcatagaaaggtcctggccaaggatgttttttaagctaaaaaaaacgatcagttccatagatacgaatttaatgtatcgggattgaacggatcaagatgatgatatgtacccattccgtagcatcctgatatttgcatagacacattgagattagctaatgaacccgatatcagaatttttagtcaacaaggcgtttacctcgtacccggtcatgaatatctatgaggttcaagaatatgctttaagtctcaaggaaacaagagaaaacaagattgaactcgatagtagcttacctctgaaatcggactcgcattgcatgagaaaggacggacatcatgaataatgtatcaggtgtatgtatcagttaaacaactactcacggaagctccccgccttctctcttaagggctttccattattcctgtacgccgtcctctgaaaatgaagatttccgggcaagatacaatcagccgcattcctgtcataagaaggcaaaccaggcttacgtcgatccaatcatagaagaatgccggactagatagagatactagacgggtacatgggacaattcctaatcctaaccggtcatccaagcaagatgccgcaacttccgagatgtaactggacagaccaagttgatgttacatgaacttgtttagctgcgtgcgaattataagcaaatagagattttcgaaaaatcacctgagattggggattaagcacgctcttccaaatccgacccaccaaaacagtttccgatgaatccatttagtccactgagagaaagacaaaatatattagaacccatttacattaaccatattgggggattttatgagatgcctaccttagggtttaaacgcccgtactgagatgcctcggacagagtcagtatgcatgcgcttcggttatgtcgttatagctgccacttacaggctcttcgtcttttggtttgaacacactgcatagaattccatcagggatatgtgtaaacttcacgatttatgatcaaccggacgcgggccgataggcaagtgagaaagatcatggggtagagatgcactgacgccacaattttcgatgatgaatttacagcaaagtaactgccactagaacccttcgtgatcatctttggatgaattccaagcgagatagcttcctgaacagaggtgacaaccctgagccaatggttgtaggaaacaaggaactgttcaactatatggtcttcggtttgtgacacccattgagaggagaggataacaaccgcgcgcttactcttgaaactgactctccgacataagttgggtagtaaaccctgccgaagaggcaagaggcaaaggggaccctgcctgatgaagtcgtgtttgaaacagtttcaggacactatcaagatacaagccgtttctgaatagcaagcaatatgcttacgctgcctcctatgccgaacacgctcttcatcaacatcttcgcctcttgctgtcctcgaccggtgtgtcgacgttttttcatagaccttatcgacatacgtttccttagggagactctcgatatccatttcgatagacctgcttcgactgatcccaaatcaactttggaggacgacaatctcttattcgaagaggacgaaggatctgggcaggactctcgatgagataccgccggcggccgcggcgggaaagtaattctcggttccggagaactcgacgacggtagtggctgatagccactgtgtgaatgcatgtaagcggaaggttcttttggctgatatatatacccgtgaaagagagtttgtgaaactgttcttctcgtttctcttcctcggaagagacaaagaatgaagagaagctcttgagatggttgaggtgttgtccaagttgaggccgtggaaacatcatcatgtcccgggcggcaccggttacaccgaggttcgggtaaccatgatatgataacgatgagagcacgtgcgtccggcttgacggcccgcacatgggtaatgtcaatgtcttgatggaacaagcagatgaacaagcaaaggatgcaatgcaagcatgtaaaagtacatcaacaaagaagtacatcaagtcgatttatgtacaaaagagtttgtcaagtcacgatgtacaggctgcatctaacagagttcgttcgccttggatcatactaggccataaactccgttctaagttatcgctctagctctcatttttcggtcaccccgtgttccaccaggaatgccaagaccatgtgttcttccggtttgagagatcacaatctcctcaccatatctcttattatcatcgccaacatcgagtcctgttcaacaaccatcatctactttgcaagaatattctccatttgggaaacagtatcgaggacgtcgtgtaaatgtcgtttgctcaccttctactactgctagcagtcgcgcaactagccgagtcacggatactcaaacaccactcttcaggtgtactatatcctccatcgtccaatggaggtccctctctggaggaattagattcttcgctaggtctacaatccagacagacttcgactgatccttgtacagctttagcagtagctaaaggaaagctttataacgtagctgacgctagagcttgtcttaagtcagttgattgtctcctccccatccatccttgtctccagtatggacctcttcaaacgtgctgaaaatgcgtccgaatttcttattggtcaaatacaggtcggtgcccttcaatgagaccattcgaactaacattcttagcgtggttaacaaggtagagcatacaatctctttggtcctaacttcagagaacgatattggtctctcattacatgttgacctggatgttcgcttgttcacgtaaaaccactctctactatctaggtgtatgatctggatgtgagttgttctagcgcaaacaggaaggcttttacctgttggaatagcgtagacacgagacttacatcttgttcgttccatcgtgtgcttgcatggcagttgttcgagtatgagcaaatttcccaaccgttaccgctaaaccagtcaaccaatgttcggttcgtgatgctcaaacttgaatcgttcaaagcttcggacttagcccgatatatctcttgccggtacttaacttttgcatcatatgggctactcgttatcttccaggaccgagcttgatcggatcagtaaggcgacttactcttctgattacgacttcaacaaagatttgtatgatatgttcagaactctcaatgacggtcaccattattggagtgggtgtttcttcgttccgacttccttcacaagtcgcctttcttgaccagtggatctttccacgctccattcaggttcctgctactcgactgccttcgttacattcatccctttccctttggtcgccctttcctcagcctacggagcaaaagatgtcaagatctacgttgcgcctgattcgcaatatatcggctcacagtacaatcggtacttcttaggactccaaagctcttatgagagattagggataaatgtcacggaacttgctggcgcagaggtcgaaatgattgacggtgtcgaaccttggactttgtaagcttttcactgttctcttccttctcagagatctcaccacagctgccgatatgttctctgtttctttgtcatatcgtacgatgatagcattgacaaaatcactaacaatgagagcgggtcctatcaagaccagcagatccggcgaaatgcagccttggcatcttacacgctcatcgggtcaacttggtgcgtacctctttcgtctaccttgtataacgatgacatggcttcacttttgtgtttcaggctctgatccggaatatctcactctcacattcctgggtgttcgcaaacggtgttatctactatctgtgtacaggactcgagacctgggtgatattgctcaacagaggttgccggagcgagacaacatcactcttcagattgccaccgctacaggttccaaacaggttgtggttcgtatcaaggttgttcaaaaagtgtggcagattgagagtgaaacctaatcttcattcactttacgcactttaaatagctcccgtatttttctcggtctacttctgaacaagcatattcctctaccgcaacattcttcgctaacaactgccttgctgagggctcttcttctggctcgaattctacgggcttgaacactgaaaccaccatcatccggcatcctctggctctctttcctgaactagacctggctgaatctaaacaagttgagaagcggcagctcacgacgtcggcctgctctaccgcaccggtcccttacctgccgatgaggcttgacccttcagaatctgcgcagtatctgggaggaagaaatgtccaattctttttgttgcccagcgcggaaacgggtggaactaaagtcggagtcatcttcgtgcgtgataccagttttttctttatcagaaaagagaattgtctaactatgtatgaacacgttgatatcttcttcgtcagctggctacttttgacccagactcaggctgcacccagcaatttattactgatacggatgaaggcttccaggtgagatcgagatcaggtttatctgtacctttgctttgcgtatcaactagcctctcagcagtgtctaatctcatacatcggaaatcatctcatgtactttaatttgtcagaattttacaatcaatggggtatcaaaggtcatcatcgatactaccgggaatgtatgagtcttgattttcttcttttcgtctcttcattcatttcgaccttcgaaagatcatatctgatttttctcgagtcaactttcgtttgttgatgatgaccaaaacggtcctatatagggaggaggttctgtcgcactaaacatcatttggcaatcgcttttctctgggagttcttacaccaaatatctaaacttccaatctgtgttcagatatgcgcctcttgcggagaaatttgtcaattatcacatcagatatcctacaatcgacccggggtgtgagtccacttgtactcatcgatcttttctacttattgttcgcaatgctcaccatggtaatctgcattcaccttgtttagattatgccccgacatctttcaggaaagatagcggctcaagcttcatcagcacagagagtttctttactgagaagcgaagtttgacagccaatggccatacgttccagacatctgagctgtaagtgatagcccagatacgttttattttatcgagggagtcaagctcattggtcatgttgtgctcacggaccacaatacatacacatcttacactatcagtatcagagatactctcccgtcaacatcatacttatggacgtcttccaatccaatctatgctcctgaggatgtaatcgtctatggtgatggaacttgcggaagcgcctgtgccagttttacctcggtaagctctatatatcttttcttcaactgacgagtgttcaaaaaagtgatctgagtaggttgtatacagcgaatactaatctggcctggctgttcagtttatcacgtactacaataactacaccacagttgtatccactggtcgccctagtaaataccttttctccctactctgttttttctttcaatgctaagtctcaacacttatactattttggcataatcactatcaaacagatgaaccaattgaatttcaatcattcgaggcaggtcaagcagcatcaagcaccgcggtcttttctgagatgagactcactgggcttgacggtgatgaagatgcgcctccgtctttgcttgttcagggatcagtggggatcgctctaagaggacatgtttcgcctagtgatcctaacaagtttatgcgttcgtacgagtttgattggggagttatctcggtgatatctggtcaaacttgagctgattaatacgttcttttgtttctcgttcttctcttgcccatccttctttttcttgaaacggatcttcaacagaatatatatcccgtcccgcagacttcagattcaccctaacagaggagggttacttgaatccgctaaagacacatatctacctcgccaatcaggtttggcccaattctacaacgagctcaggttcaaccccgggtttacaggctggaaatacgacggaatcttcgtctggttccaccaatgaggggtcgccaaagagcaaagtcagacaggtggtacgattcggatggatatcaatgactgtgggagtgatcgtctcaggaatggacttcttgttctgagagatatccttccttctgtatttggtctatctgtttatctatccaagtagatcatactcaatcttctctcctacattttgttatacattgtatatgtgcttatatcttgcttctgctaggatctctcttgcgaatctactttttcttcatttgttttcttccttattctttgcacttcatcctctaatgaaatgcttactatcagaagttccgattatgagaataaatgaatgtctctcatataagaatgtaacagggataaattaggagtgaaccatgtcgcgcggtggaaaatgacgtctcgggtaggtgacttatttagatgtagttaagataggatgcagaaagtgggaaagggatgagaaaatacatgacagaggccttcaaggcttcgaggtttggtcatcgatgttctaagtaagcaacaaagagaagattggaatgatttaggtctgaagatatctcacacaagaagcagatgaacaaaagtgacacaaagatgccctagacataccatgattcgtattgtatccggactgcactcgaaccttagctgcttgcccgacatctcgccgggagaactattcactattgtcgaacctgcagatatcgacctattataggaggggcggaatgatctatcggcatcaaacgagaagtttgatagagacggatgatacatcttttgacaaggattcaaattgagtaagattgatcagaggggaaaacagagtgttacttcagaagaggagatccggcgcacgagataagaatcagaagctcgtctgtgggaagacggcggtgtgatctgtagaaaagaagcatcaggggctgactaaatggaatagatgtttgttcagcaagtctgtcagtatttattgaaggtaaacttcaaaggcgccaaatgacacaattgctacacgaaaacaaagttgaaacgatgcaatacgcactcctcttcttctttctatgcataaaccgaagtcaagctcatcatcatctatcaggcagtctcgtgaaggtcgtcctgatcttccggacggcataccctggtccattccgaaggaccttggtggatttctgctattcaactcgctcggttgtacgcttatgtcgtttcgcatcaagtaaacatctcgggagcattgggtgctcccggtcgagttcgaagttggccgtcggctgttgaggttgtaaagtatggtgatgacatggattcgaccgagtagcataccaagcattgttgccacttttatgcgacaagtggacgatcaagaatgagaggatctgatcagttgtttgtcgacagagaagagggagggaggaggtcaaaagaagtgacttagtacagttgttcttcatcgtgttgaagcagatacaggctgccacagcgataaccgctgtgcaaatgcccgtctgagcagctctgaccgagagcctctcgatcaaccgttcactaccaccaatcggacttatagtgccgttcatatgagcaatatcctctataccacctgaatgatttggagctgatgttgccgcatttgaagggtcgacgctcgtacatggtgcacattgacatgctggtttggttttctgacgaaaagcactgaatacacaagacggtttcgttggaaagaagaaagatcgtggagaaggtgttgaacggttagatagcgctggagtagaatgtgttgtcggaggagacgcagggatatgtgctgagttggtcctcctcttcagggagcgcaaggcgtatatcatcatgatcgtgatggaaagatcactttcatgtattttgttttaaattccgcaagacaagtatgcttatatgaataccgtaaatcatcattcacaagagagaaagaggtgggtaaacgtacgtgacggccgatgaacagaaccagaaattgattgtccacatcatattttcactataagctgggtgatccatacctgctaccaggatagaggcccctagagctgaaccaagctgaagtatgaccaaaaaatatagtatcagcagtcattatagattgttttgtgcatatcagtatgtttttatgtgagaccatataccccagtgatgatgaacaatcccagcgcgattggccagactagctgctttgtcaagagaaagatccgcctggtcaagaagctctgggagatgacagcggagagtgcggtctgtttatcgaatgcaacgtagtgatcaattcttcctgtatggtaaatgatattctatatgaatgactgacacccatcatgtagaccggtactgataagggaggtcgtgctagactgatcacgtcgcctagaaccagccgaaaagaagatatcagaacaaggatccgggcggctagaccgatgaatagagtttgaagacataccccagcaagacacgaggtagtaccaagtcctaagaaaggcaacaggtatagattaactcgataaagcacacaacttgtctgagatatatcatgactcgtacgtcaccattacgcttcccatggccatagcgtcgacgagaaaggaaagggacacagcagctcgatttactaccgagtcatttctatagttacgaaagtattggcaaacttgaatgaatctaggggtaggaagaataagaactatgaattagatcatacttagcgcatgcgcaaagaatgaaagaaaccgactcgtatgtgaacaaggggctgttgatccaactggcgatgaggagcatgccataggccagaacgaagtctgaagaagccatgggtagtagaatgttgattaaagagaatcaaagagatacaggatgactaggctctgatagcaaagcaagcaaaacacagggccgaaagcaaggtgaggaagaggaaaggctagatgagaccagacgagtgaggagagggaagggtgtcgtataggatgaacgatgaaacaagagagatcagcgtctcggtggagagtgttggggagaaatgagtgaattgttaagtagactgtgttagttcctgcttccgatgttgtcgttttttccgttcaggaacggacgaccccaaggggagatgggtgcacaggaagctagaaagggcgcgtgtcctgcttgttgggttcaggctcggtcagtcgagatgggtagaggtcagtttgagcagagtcgctatttggacaagagatgtcagcgctcggtctgtcccaacgaatttcttcgtcgaccatgtcaacaactggatacatcggccaggtcagtggatcagcaacctgcactcaaaccccaggatactcagaaggaccaaatcaagaacacacgacaggccctggatgcgagatggagtagagcgtctttgagtttaaccctaacaaactttgatttgtcttattgtttttttctgccataactctaatagaactctcttgtgttccgtattcgtttgagatggcatgcctttctaatagaaaacacatcggctggtacaactttctgtagtcaaccgctccattcgaacatcatcagttccatccagcctccatctcgttcgcaacgaccatcgagcactgatcctaccgactgttcaccatggattactttcgctccctaggaacgtccatcttgcagagctctggagtcgttcttccgttcgctctgggcgagaaaaatgcggcttttgagcgagaaggcaccatctggaacatgcacaatgccatcaaacgagtcagtctagtcctttccttctctctgtttccaacatagtctcgctcgtgtgtttcgatctatgaactctttagtcattccttgttctattccatattcaaaatcaacaggacgacaactctagaatcaccgtgtttgtgtttgattcttctttgccctatgacggccgagcagacagaaaggcgctcctgccagtagcaaagaatgcgctaaagaagatccgtgcaacaagacatcctgacgtgtcagtttcttcatctgctcgtttttttctaatcacattttctcatttctcaagcagaatatctgatcagacttatggactaaacactgctcatcataaacagtctcaaatttattgatgcctacgagacagaatctgtcatttacatcgcaacagaaccagttcgttcactgagcgctgtgctcgattcgacaagcaacccttccttgacggacgacgagctggtttggggtttacatcgtatcagtgtgcgtatgattcattatagttgtctatcatagttctcgcggcctgctcttctctgtgtatcttgcaggcttcacaagctcactcgctagaactaccttcatcagcgtgccgtcgcgttcctcaactcccaagctgtctccatccatggacttgtacatagacgatcttctatattcctgacggactctggcgagtggagactcggggcactggacctcctctcatccaccagaagcgaagagaaagacacacaagtcctctggacgacgggcggattagtcgttcgcagaggagagggtgtcagtccggaggtgatgaaagccggctggggtgttctgaaagagtttgttcacccatgtttatttcgttttctcaacctcttctactactttgttcttacatctcattttttttgaacagcgccgaacccacgtcaaacgatgcttattccttggcgctcctgatccatgctgtcttcaatccgtcacttcctttgccaccaacagtaacgcctccacaccctgctccacagccttcctctcgaggcgcaattcctcaagcaattttccccttgttcaaacggctgcttaatccgaatcctaagacgcggctcactgccaccatgtttcttcaggaggccggtggggctgatggtacggatggaagtgatcgaagaggattctttggaggtaacaggctggtttggatatgcaagggtttggaaggttggggacttagtggagagggtgagagggtcgaaattttaaagtatgttacatttttcggatgcgtacaagctcttcctataggacgatggtgtacttgcagcgttgcgcgaggcatctgaccgcccattatacgtcttctacaaacagagcaattcaagccccttcacctcctcttccccctcttttcttaacccacaagatcctaccttctcttcttcatacactatccctgccttcttctcccaacacgtcaccctctgctgcatcctccccttcgcagctgctaccattggtgttgaagctaggaaagttgctttctccagaagaataccccaagctggtcttggagccggttatcggcttgttcaagagtcctgacagaggtacccgaatggctttgcttgaggggcttcctcaatttgagagtttcctgagcgagtcagctgtcagagagaaggtctggccgaacttagtaagtgacctctgaagttctttctccttcgggatgtgtgcatatccttcttgaatctcaccaatcgatctcatcctcgcgaaccaatgatctgcgcagattacaggatttgctgatacagttccagtcattagagaagccactgttcaagccattcctttgattgctccaaaggcacgtttcctttgagcttttctccttcatgatactataacttgacaaaagtccactctatttcattcagttatccgatcgattgttaaacaacgacctactccgactgctcgcaaaatctcaaatggaccctgagccttctatccgaaccaacacttgcatccttcttggccgactagttcctcatttaggaccaaacacaaaacgaaaggttctcgtccctgcatttgccagagcgctcaaggatgggttcattcatgcaagagtcgcaggattgatggctttcatggctacggttgaggcgttcgagatggatgatttggcgggcagagtcttgcctgtggtgtgtggagcgttagttgacaaagaaaagtaagcgaatatttggcgcgacaaaaggtagtttggttctttctaacttatatcatcatcatctctttccgtagactggtgagagatcaggcattcatcgcagtcaacatgttcatgaaacgtcttgaaaagatggtggcttctatggtgtgttttctttttcgtggtctcagatgatcctctcgttcaacactcatctcacaaccacctgaattttgaatcaactgctcttccccccccaattctgtttttatccttgaaaccagcccgaaactattgaaccagttcctgtccgaactataagtggccagacgaacggtttctccgcagacgcaccgacgacacaagcacaagcgtacggtaacggggatggcggaaaggcgattggttctgcagccggtgcggctggagctttagccggttgggcatttgcttcgataggaaaggtgcgtgtcatcttttcctgctatacaaccatattcatactcctgaatgataggcatgcgcttccaatattcatctatacttttttttctagacgttggcttcttcagatctgcaatctacgatggctgtacctaccgcgtccattcctggctccttcaaccctccctattcttcatctccttcaatttcacctcgaccttctaccagtgggccttcatctgacttcagtcgaccggctgccgctcctactcccaatatcaacacaaaaccatcaaacggaatgcgtctcacctcctcctcggcgttctcatcgaacgcaaagaaaactcagttcaacatagatgaaatattagctgaggaaaccgaggtagccgatgcctggggaatcgatgaaggaggagggggagatctgatcgatatggatagggacgaagacgactggggtggatttgaagaagcgcccacgccgctttacccgtcccatcctacaacttcaaccaaacctcaaaacacgtctacccctgcatcgaagcagaaaccaaaagccgctactacactggtatcaagatcatcatcagcagctcagccatcgagatctcgatcggcaccgcctgtcgttgaagcagacgatgactgggggctagacgtcaaggatgaagcgatagctgcccctccgcctgtcgttcctattcgaacgaaacctaaaccgagtccaatccctacatcaactactccgactctcaagacaacatcttcgaccagctcgactcccgtcaggtcgatttctcctgctattcctgcttcaagcccaagtgcggagcagagcgctccacaggtcagtctgagtgggctgtcaaaggaggagaaggacaaggagatggcgaggaggagggaggaacggaaggcacggatcgctgaactcaagaagaacaaaggctgaggaaaggcgtgtatcatcttatccatctgacttatctgatacgcagcattgatcttctgagatgtactttttgaaggagaaaggtctaagtgacatcttctcgtttcagtgatgaattcagttggagatgcaacaagtcaaaatcaacgtcactatagaaagataaggatgatcaaacagctttgaattgtgtatccaatttttgcaagaaattcaatctactgtcgattgggggtataaagcgggatatcaagatagaataaaaacaaagcgcagtgaatggaagatggtactggagcgaagaacaaatgaacgaacaaacacagatcaactggttaaaaaaatagagcgtccttgcgcttgatgaatgatgaaagcaagtgctgaaaacgagaagaaagaacaatatgaagatgacaggaaaggaagaaacacgataaacggatagacttcggctcagccgaacaagcctccaaaccaacatttcactctctgccaccacgaccctctccatcgttcacctctttgttcctctcctttccacatccgaccggtccctacaccttccaatacgccttttcccatcgtcattccatctagacctcttccttcttcaactgaccggattggatccgatccagttttgggcggaccgacgtaaggaaatcgagcggtcttggaagctgattttgtgatatgtgaaggaaacgcgcggataagagatttcagttccgggtcggatagattctcaggtgaaatccatgttcgccatcgaggccgaagagaaccggcgtcgagttcgccttcgaatgtatccgattcgaacccatcttcgtcatcatcttcatcatgcctatagttgtcatattcttcatcgagcagagcaacacctgcttcagaaaactcagttaccgactggttagacggtcgattcccggaaagaaggagagggtcctccactcctggcgtaataggctctttacaatcagcggaagacgcatttgagcgtgacctatcgccggcattattggcctctaggatcgaagggtgtggtctgataggaaccggaggggccggccctcgtctcgaagaaaagcctagtccatgcgatggatttgacatgctcgaacgactcatctgttgttgttgttgttgtaactgctgttgctgttgttgctgttggaggagctgttgcttcttggcttgtgcatgtgggtctgaaaacggatctgaagatgcccttcgccggttgttgttgtttgtttgtgaaggaggcggaggcgctttcccacgttttcctaaccttgtatgattgggggaagttgagaaaggggcatcatggtcggaatctcgtcgaaatggggaggagctcaaagaaggatgtgtcattgaaggtctactcagcctcggttctgaacgacggcgaggttttatacgagggatatcctggaatccaagaagctaaaatgataaggaaacagatgtataaggactgttagcaaaaagaagtccaggatcgttctgtcgtcccaatccgagtttacgtttttgtcaattggagcgagacttactcctctaacgactgcgatagcttcaatcataaaatctttgccgccagcctccatccaaacagctaaacaaattgaaatttacccaagtaccagatgagaacgtgttcggaagccatctgacattgcctccctgtctcaaaacttctctttcatataaagaaaaaaaaagaagggggggggg

SEQ ID NO: 953 - DNA, 10549 bp, Xanthophyllomyces dendrorhous
gtattcaaacaaggaatacattcggactgagtaccaaccaaaattgacagatttgctcagaaaaaagacagacagaccttgtctttcctttttttgttcttccctttcttgtccaccatcatatggctcccattcacatcgtcttgctttattagtttgagtttttgctgttgtttaggtaaccgttccatttgctgctgctgctgctgctgctgctgttgatgttgttgtatcaacaactgttgctgttgctgtagctgttgctgttgttgttgctgctgttgttgttgctgctgttgttgttgctgctgttgttgttgctgctgttgttgttgctgttgcttttgttgctgttgctgcagcaatatctggtgatcgagatgttgctgttgttgcagatgctgctgctgcaagtgatgatgctcctgtctttgttgttcctccctagctttgacctgggcgtgtagcagctgctgctgttgcatcattcgaagttgctgaagctggccaggggtcattcctcctgacggcccaagcgaactatgacctcctagtgtatatgaaccgcctggaccacttacattcccggaccctccaggagttactactactgctccacgaccctgattgccctctaaaccaggccaactctgatttccagcatttccgaaagagctttgaggatgaaccggacgggcgttgtgaactgctgcctgctgctgctgctgctgctgctgctgttgttgttgttgctgctgttgttgcgatataaacgaagcaggcaggattggagaaggttgatgagaagtagcactggatgaccttgcgattccttctaacggattccctgaatgattgttgccagatatcgacccgttgctgacgacgcgactagaagaagcctgagcaggcgagtgatgaaagtaagaaggctgttgctgttgttgtgattgttgatgctgctgctgctgttgctgaggatttggtggatgtggaacactagcaggatgattaaaaaattgacttggattcagcgttgttggaagttgctgatgggccggagagaggttccgatgggattgggatggagaattactgtagagtaagtgggtttgtgattgcgatgaagagttattaaactgaggctgataaaccgattgagagtttaactgtccatgttgctgctgttgctgttgctgttgttgttgctgctgctgttgctgatggaacgctctaggatcaaacatggatgggttgaatcagtatacttgcgtgcatgctgagagaaggaagaaagaggcgacggtagaaagagcaggggctcgtgtttcgcagatgacgcttacataatcaacaccgtaaagctcaattaaacatgtcggtcgatatattagtcaacctcatcatctacctccgacatcgacatggtatgtttctcttccttgtctgtattggtctggattcatcaagctaaacattgctgctggtccttccgttatgtgtgtccgtttgaattataccagtcagcgctccttcagccatcaccatcgtcctctttctcggcatctacgtcaaccacaactacgctcccacctcaactggcttctctactcctcccgctctctcaatctcgctcggtgctaggagtgcttgttctttcgagaacagcaaactcttacacatcgaccgctaacatcctgcaggcacaaggtgcccccttcgaagggagtgcaggcaaggactatgcaggtcgggtggccaagatggtggctgctgtggaagaagggtgtatagccgagaaggacgacgacaccgttcgttttcggttctttccttttgagcttgtagcgcctagttgggagaaagagatttgatataacattactgagctgttttctccttctttttctttcgatgtttggtggggcgcttggaacatgcgaccctaaaggatactctcaagtttcttaggatcaggactactaaacatgaactcattattactccgtgtatgtttttctattcagtcgattcaactcctgttgatcttttccaaagcaacctctcactgaaacagagttttgctatatcactgaaccatcgatttgatacattcggatcgatatgactatagcgccagccttcattttagttgtcctccatgaacctggccaagccccctgattgatctaccctggcgaccaagctttcattgtcctttccatatttactccttcatgacctattgatgacattaacgcgctttcttcttgctgtcttgtccatcacttctccttctttctcgagacacaccattgtggtgcaagactaatatatgcgcgggacaaaacatccgtacatgtgctaaaactaacagttcaatacaatatagcgacaacaatcctctgttgaaacgaatactcgatgtacgagcgttcaccaatcttcatcttcaagcatacctcctggcgtctctttccagccctctggttcgctcgcccaatcatcatccgatccgtcctcgattccttgaacctcggccgtatctccgatcccccagacttcccgcttgactttatgtttctcttttggtcgatcccaggttcctacttctagcgccgatcctgaacctgtcggtggttgaggaggacccatgaacttggctccggtcccaactacatctgttgattctctactattaccagtagctttcaaacccccgttccatctattgggtctcgattgtctgcctttgcctctaccgttcttgaatccacctggtcctctcgtcaattctgctccagcgatatcgtcatctagtccgttttctgtggatgcggcctgatgagctgggacagcgaagatcgatttgaacgtttcgtctctctttctggctaccttggccgatgtggcctctggagatcgaagagaaagcaaagcaagtagatgcggaggcagatcgtcgttgatcattcgggatgtcgcgcgagacgaagcagagcgagaagatggttcgatcccgtatggtgagggatatgcatctagacctgtgtctaattcattgaatgagccaggaatagacccagacggaccaggagttccagaggaagaggaagacgatgaagagggaatatcgttaggaagcccataaagaagccgtcggtttgatgaacgatgtttcttaggactttgatacaacttggatggttgaaggtcggtttccagatcagaattccacatcccttcgtccgacacttgaacctctgccaccgttccttcgtcatcttcatcgccatcgctgtcatctttgccattcttaaaggtgacagcctctgcctcgttggtcggctggttccggcggaaaagtcggtctttgggaataggaatggataacggtgcaacagtcaagtctcgtttaggaacgcctaacaggtgactccgtacgatccggaagccttcttgttcttccttttcgccaccgttggttgttgaagaaactttctcctcgagctttcctcctttaccacctgctcctccatcatcttcgactgcttcctcctcgatctcctcgccagccatctctctcagtgtttgttctgcttttttcgccctagcctcggccgccgctccgaaggctgagcctaccttgggctttcctgaccacgctctcaccttctttgctggtggctttccttcgcccgtcatggacaaggatctgcccctcgatgtttttgtttggcttgccttctttgtagaagattttggactaagtatcgaagagagcgttggtgggtcttgagaagtggatccggtgggcggtcgagtatcccatgctttcgtagtggtaaatgtgaatggacgtgttcgagaagaagacccagctattgtggatatcgatgaagatagagtcgcaccagaggcatccgtcgcagacgacagaacactctttcctcgggtaaataatgatctgggcgttccttggattcgacctttgcctttgctagcacctgctggttcatccgaatcggtttcatcggtgtagtcttcatcagcatcggtgctcgcttcttcatcgtcatcagaaatacctcgggcagcagaagaagctgttggctgacgatggcgagcaggcagggctctacggggctgatcttgtggtttcataggactgggtccaaccacgtcctcttcatcgttgccgttctctttgacgttgtccagccgacctgccttcctcctcaccttgtttcttccatatcgatcgtctcctcgatcatcttctctcatatcatctccagaatatatccctcgtcgtttctttcccttcggcgtgtctccaccaatctcgccgttcagacgtttccgcgcttttgtccgtggggtccagcctatggcggtctcggtcaagagcgaatcagcatcgtgaacgatggaatgaggcgcagatgtcgaggtagttcggtggggtctgatggacgaatcgggtgaagcatcggaagatgacgggcgggtaggggagagaaggaacgggttcttgggctgaaaacgtcctgaggaacgaggtggagaagtgattgtcggcttggacgccatagtggctaaagaagaagaggaggagatgccggttgatacaagtttctttggtttggaaggtgtggaagggcttgagatcatgtttgtggctggtatattcaaagtagtcgtggacgatgccaaggtcacgctgccagatggagccacagaggagggagtgatagtagaagcattaccagtacctgctggaagcccatcctttctagacttattgtagaccctgtacttctcggctgtacacatcgacagacagtatcgttcagatgggattgttcgagatctagaatgatggcaagccagaattgagaccgactacaacgtacctatctctggatcctgcttgatgtcctccttccttggatctctcccattggatgctttaaacgaacgttcccactgtttgagctcgagtttgacgacctgcaagtctgacattggagacaaatatcttcctatgaatgctctgtctctgatgcagtccggtctgaacaacagatgaaagtgtgatgccttccagaggagtcgtcggtctgttcttgctggatggtcctagttgtttgttcattgacctacacgcgtcactacagatgatgattacataagacaaatgtaataagtaaccctgtccgagcatcctcatccatcctctgcgtgtttccttctctttcggccatcaatctcctaggaatatacacacctacgtctttgactccttgactcaacacctgtaaactatctaaatgagtgggccgcgacgtgtaggaggacggtttgtgacaactgatgaacataccacttgtccgtatgaatttttgtctgctttactctctgtcgtcgcgtctgaatgtctcttttgtcctacgttctcgtatgcatccgttgcattcgttggtttggaatgacttggacataccatagacacccgagcactcgttgctcctgcagccgtttggaaaaaacaatgggtcgtaccgtccggtgagttggcttttgccgccttcacttccatactgtctcacacatattcgcgtctttctgtttggactgacttccaatttcttaatacgcgattgaggacaataggtctaccacaagagtcgaaatacaaagtacgttctgcagagtctcccagatgtatgacaggatttaatacccgatgctatccttgcctgttcataggtcttgaaatgggtcaaagttgacagtaaacaggtgagtttccttcgactttttgtgtctactcacgacacgcttctcaccgttctcatgtcgtcttcatgatctcttcaggatttttccgaggaatcagactcgtctccagagaatggtctgtcgaacgtagaaaacgataaaccaactctcgagcttcctcctgcacctgcactccggtctcacgtgtcatttgccgtagatccaaaaaccgaggtcggggccgaggcggaggatatagagatgttcagcgcggatactaacgcgaactcagctcccatcttgacttcgactatcgtctcagcgtctgctgaagttgtctcgtcagctgatactcctgcctctgtctctgcttccgcttctgtatccactcaagcgccagtcgctctctcatcggatcttagagatgcaacgaagccgtctgtgttagacggattgaatcatcatggatcagatgtcgctcagatagtagagagtgaattgtcaggcatggtggtagatggtattgaggaaggtggcgatggaaagggtgaaggagctcatgccatagcccaagacgaaagtttggaaagttcggacgtggcttctgcgcctttagcaggtgaaacggccgctgctcgtatgccggtggccacgacagctgcatctgcactcgagtctgcacccatacctccgacaacaagtccgagtgcgaccctcaccgccattgagtctacaaccgactcgacggcggttccattgaagcccagcagttcaccgacagacacggcgcttccccccgcgcttccgttatctttgccgatcgcatcaggctcaccgagcgcgcttcggttatctttgccgaccgagccagactcatctagcgcgcttccctcccctcttcctccctcgactcaggctctcacttcatcagacctatcgacaccgcttcagctgactgaagcttcatcttctgtaagcacgccaatctcccgagctaacttggctgaaccttccaacccggcgcccaaaccagacacggcaactgtccttccggggaccggagcaatggatattactgcagctggaacaggagaagacccggtcggtgaaggggcaaggattggaggaggtcacaatacgttggctgatcagccgggcatgaattgaagtgagaaatgggtgacgatgtcttgtatgtgtaacggatgaaacctctttaagcaattcacggctgggaagcggttcttgatcaagccaaaactgtagtcacgcgatgggcaaaaattctgcatgcataaattcaaacttgtttgcacgagagaatttgaaataggtaaacggaaggagaagacttttcgatcacaccggctcaactcaatgttgagtgtgaaatatcggctgaatgcgacgacttaaaaacccgacgaacgtaatagatgggatcgaatcgtttaaattctgtcctttcgccagctctaacttctcttcgcctctactcctctactcctccataccaacttacagattcaagacttgaaaaagaagcagaaagatgatccttccattcgccttcctacttattgcagctagcggaactctagctagtgaacaattcaacccctggctcgaaaaattcggttcagcaggagatctatccttcaccggagttccctctttcgctcatctgccgcacatacggtgcttagaagaagcttctaccgattttgatgtcgctgtgtttgggctgccttttgattcggccgtctcgttcagaccaggtccgtccgttagtttttcataaagaatttctttctcataaaggatcgttgagcctggtttggcttcgctattctgattactgctgatgctgatgctaaatgttggtctcatcacttctctatcaggagctagattcggaccgttcggaatccggtcaggtagtagaagacagcttcctgctagaggatggaatgtggcactaggtacaaatccataccaatctggagcaaagatcgtgcgttgacttgtttcgctgaggatatcatcaccagaagttgcactcttgatctgacgcgttcttagggtctcaatgataaaagttggactgtggagatgcaccaattactccatatgatcctgctctagctattgaacagattgaagctgcttgtgagtatagtcctctcacaaccagtttccacgtttagcgttttgatctcacatcttcatatgatattgtagacacctcactcctacaccaccctactcattcgacgtatttccctcagcttggcgagaagtctaagaagactcacccgaggattgtctcactcggaggagaccacacgatcgtcctgcccattctgaggagtttacactcagtttggggacctatcactgtcatgcaagtttcttcctttttcccaagccattggactacctcatcatgataagtctgaactcaactttattctaattttatttttgaacgaaaaatatgcagtcactttgatgcgcacattgatacgtgagtcttcaatcaattcaccggctttatcattatgagcttgttttcctagctaaccgctcgcttttataccttttcatatgcagctggaacccagtccgatatcctggttcattgacggctcaatctcagatcaatcatggcacgtttgtacgttgctttacccttctctctccttcttgattccatccaagccatctgtcttgacgatatgtctgtctctcttgtatgcgtgtttggtcttatatagttctggaaggcatatgaggaaggactactccgtggaaatagttccatccatgctggagtccggaccagacttaccgtacgtgaatgtatctacattacctctatatctcgctactcagcggacgcaacgcagttatgaaccttgacttactcttccatgcttctttgacatagagcctagcggattatgaggacgatctaactgccggtttcgaattaatccacacattcgacattgatcgatttggagtggaccatatcatcaaaacgattagagatagagtaggaacgacgaaccctgtctatcttagtttcgatatcgacgtgattgatccttctatggctcctgctagtacgtcgatttttctcagcattctcttttcttcggtctctaaaagttgcgcagtctgaagatgtagcggttaaacaatatttctttcttcatatggaaatcagcgggcacaccagaatcaggaggatggactacgagagagatcagaagaattattcacggcctcaaaggtctcaactttgttggattcgagtaagtccccttccttcctcttcctcttctgttcatcttcttcaatatgaatgtacaaatcgtctgactcgctggtttaatgcttcatagtctcgtagaagttagcccaggtaagcccactttaattccttgactccactcaagaatcgcctcaatgctaaaaaaaagcccttttgcttcagcatacgacacaaacgccgaactgacaaacatagcagctgccgatctcatctttgacttcttgtcgatcatgactctgggccaggaagaacttgatctggccaggcaaggtcatggtcaagtcttggcctcggagcaggagctggaggaagggcaaggtgtggtggattttgagacggagcagtacaagttgttcccggatgagatctctctatgatcagatttctttctcaatgggtatttcgtagagatagatggatggagacagatgtgtagatagacggcattttctgtatttgtcatattcattgctgtatttacaaatgtttatgtatgttttgacagaatgcgaggggtcttctgctcctaaggcatggtgagagttacctcagccgatggtagttgtaaaaggcccttttagacttggatatcctcagaccacaaatcaccaagattcccatgggttgcggggttagtctgtgccagcctcagcctcggcctcagtgaccagcgtggtagcagtggtgtcaaacaccagcattcttcctccttcgttcttttcctggtgaagggcaaggtgcagcatgttgcgtgacgcgttcacgtctctgttccaccaagtctgagagcatgtatagagcacagtgagcaatcgacacataatcttgaggcacgcaacacacatcactcactcggcagacgctgcgacactccttgatcgcccacgctttgctccttccagagaactcgccatggcactttgagcacaccctcgacatccgaaaatcccggactttgcgaacatggagcagcggagaggccctcagcttggcatacatcatcttgataggaccaggtgcatgcccacgagaagacgacgagaaggcgccgtcgccggaagccaggaaggtgcgtggacgtcctgctgacagacggagcgccaccttgtggtacgcttgttcgcggctgatgtgtgcgccccagcgaagacgtctccaccgtcgagcagcgaagaaggtcgcgagccaagagaaggactgagagtgcgagacgagagcagcgcggagactatcgagactggcagatctgaatcaaggaagatccgaataaagacatcgaagaaggacacgaggtgggcaaggcagtttgcgaggtcagtaaggctgttcatacagtcagcttgagcgttagtgtaagcgtgagaggcactcaccacggagagtggttgacacttccgcatgattcttcatccacagccgctgttt

SEQ ID NO: 954 - DNA, 5355 bp, Xanthophyllomyces dendrorhous
cccccggcgacgagtagtccgtcttgcagccgcatcttgggggccatgttcctcgaagatggtcagcacccggtacagagggcgcagataggaccaccacgaggccttgatggcctcacacgtcagaggcagacctacgaagatgtgatctgtgagaaagtcgaacaacacttggagttgagccttcaccgcccttcgctggcgaggagggagacatttcagaagccagggcggggccgccaaggatgtggcagcttatggtatttcctcctctttctccttgttcttgggcaggggaaggggagaattacgcccagagttgacgagagagggccgtgcactgagaaggatcagccaggtcagtcatcgctatagtctctctttagatacttctctagacatctcggtcaccttcacctgattgacactgatccggctctggatcgcttctctgactctcgtcttcagccaccagaagatcggcctagaacgtcgacgcggtatattgaccacggcgtggctttggcaggccgtgacccaggatatggcctcagcggcgaccatatagttcaggtatctagggtattaacgagtcgatgagtctatgttagcggccagtcctatcgtcgccattgccaaggagatcatctacctcaagctgctgtaatggtttccaacaagggagagaagcgtctcgcatattgttgggctcttggtgccgtgtcgttgtctccttgcgcggatcccgttcaatcttgagcatagtgatcgcctggaagcacacgcgcatcaacgaggaaaggcccggaataggaactccgatagagcagatcgtcaagatgggacgcgtcggacgataacatacatagccgggcaacggcagactcgattgaaccggcaaggggactcaaggagagtagggagccaaagccgatcttcaccgttcgctacaccagagggaccgctgcagcagcccggatcatcaccctcgtcagagggtgatacaagggacagaaatgatttgttctcatttagtgtccaacctgatgacgggctgatatctggtggtggtagtagtagtagttacgaggaaagactttggtggagcctaaaccgttctcttgcgctctatttcgaacacaaaaggagcaagacttctcagtgaccaataagtattctcgtgtggaggggtgttttgatgtggatgattgttctcgtcattccgacttctctgtgtcttgtaggctgacgaggctgacgatggtgacgatggtgacgatggtgacgatgctgacatctgtttggctgcaagataagccgttggatcggttcgactggctgccggtcatgatgaacggcctggtgaaggctctacaatctacagtccacagacgcagacgcagacgcacaaagatatacagacaacgaaacagagagaccaaaacgaaagagaaaggcaagaagacagagaagatggcattgttgtcgaggacgttgattaacacatcctgctttgattcatgtcatatcttcgtacaaaccttctatcagaggttctgtcatcgacatgatttctaagaacacagtcaagaccaatgagagaagaagaagaaaaagataaaggagaagataaaccacgaaaccactctagaccggtccttgaaaaccttgtagagaagaaaaaatccaaaagagatagagagagaaggaagaacaagaacgaaatacaaatcacatatcttcaatgctccacatcttcaagatatcctcctgactcttcttgggaatgggatggcctttgaattctgcgattctctccaccgtcgagtcggccagactaccgtgcgagaaaaatacaccagacgtaaggtgcgcacatatcgggagaagaggagaagaggagaagaggacatgaggacatgctgacaactacaatatggatgtgaccagataagattgaagattacttacaggcctccccagttctccgaggcgcctcctccgatgtccgatcctagttcgacaaaaggaatgataattgggggggttgccgaatagccttggagggcacccatgctatcgttggtagtaagaaacttgaatgggagatcatgatcgactggttgtgagaagaggttgggcaggttgtgaacgtgaccattcaatcgacggagacctcggcgggagagcgagtatgcatgggtagccatcgggcggttggatttgcgaagaccggggtggaaagtgggtttgttcactcgttcatcgccaaggatccaaccaagataactagaaaaaggagagttagaaagaagaattgagaaaaaactcaagtaaatacgtatgcatggtgacagcgactgcaacggtgtccaagacgtacattatatcccagccttcctctgagtcggccaaggagcgagtcatctccttccaccgttcgacaagcgagaactcagcgtcgatgtcgtcctccaggatcagaacatcgtcgtcgtcgttcttgagggcagtgtgccaggtcttgagatgagaaagatagcaagccagaggagcatctagattcagatgagacgccgacaataagggtataaaccggtcagtgcggcggactagagaccctgacatcacaatccaacccagtactcacagggtggccaggctgggaagttaaacatcacatccgggtttgttccctcgacaacaaactctgtatctttgtcgtcaaaagacgagaggacatattctctcctgtttaggcacatgcgcattcggaagcgggcacaccagatgagaaaggtttgtccgtctgagagggaagagatacgaacgcaagaaaccaagaacctaccaggtcttgccaccccagagtctgtccgctatgctcttctccttcgtgaagtcagcgccttccctgattcgatctttcacgacatgttcctcccgcatacggtccataatccagtggacaaccggcgagtctttaaggacggcttcgacataggtaaagttgagctctagagcttgagcgatgagatccatatgctcttttcggtctgcggaaagtgcgaagcaacgatgacttatcaaagaccagtccgaacgcagaatgaacacagatcaaagacagcgagacgtacctgaacgggtagccatgttgatcacatagatattactccatgttgaggcccggtcatggccttggatactctcaatgagttcgtccctgaaggagagttttacgtcttcattcttactgaagaagaaactccatataagaaagaacaagcacacagaaccggccgccacggtagacaaagtcgaagaagggcgcatatctatgaagagacaattctgtgaatcctgatatgcgcagagacaaagaaaagatgaattgatgaggtggaagtaagaagacaataatatggagggcgagcagggaaaaggacgctaccaagactggaatttagagtgtagcccgaggtacccacaaggagaacccacactaggatttcgatagatcaaaagcatgagcctgtgccgatggaggtcccgaactaacaacgttgaaaaacaccggatcttgagttggaacacaacctgaagttgagtggcccgtcactgccgaacaatgctcttcgagtgggtcttgctcgctttggtctcactggcactggttgggagtcgtgatttcagcgcccgtaaaaaatgtgataccattcgaaagggtgaccggatgggtgaagagatggagcgaacaagaattcgagtgccatgagaagtctatacttttgttttcatctcgcatactgccttttctttgtgctctggatgaacgcaatgcgttcagttattcctagacaaaaggaaccattcagttttgtctaaaacgtccgtcgtttgttcaattgttcggttagccgattggttgattagtctgtcccttgggatcttggtcagccagccagtcagtcagtcagtcaaccactctgtgaatgctccgtgtgtcattccagacgttcacataacctctaagactcgatggacaacgtctgtcactgctctcatcagtcgatagagctggcaatatgcttcccaagataccagaatgagggagtcggaccggtccccgaacggcgggggaataaatccggggaaaacggctggaccggccaccccagtgctagggttaatcgcgcggatttaatcaatcaacaccttacggggagccgagacaacgagggcgatatctatttatattattgaaatttatatgctttggcgaatgatatatcaatcaaggcggccgatagatcttttgaatctaagtgccttcagagcacaaaccatcaaggtctcatcacttcaaacacagtttttggctctacctcgagaggcaagagcagctgcgccaatgtcagataccagcgtcctcgcctcctccttctggccaaggggtaggtagggtatgttccgggacgcattagtatctctgttccaacaagttcaagagagagcggagaaaacaatgagcactcgacacactgttatgagacaccaccataagatatataatagacacacaacaaacgcacaatacatgtcacttactcgacaggcgcttcagcactctttgaccgcccacgctgtgcttctccccgagaactcaccatgatacttggagcacaccctcgacgtccgatactcccagactttacggacctggagcagaacggagtccctcagcttgacagacagcatcttcacagagccaggagcatggccacaagaagtcgacgagaaggcgccgtcgccgaaggccaggaaagtacgtggatgtccttccgacaaacgaagagctagcttgtggtacgcttgctcgtggctgttgagtgcaccacatcggagacatctccaagactagtagttctgaatcaaggaagatctgaagcaagagatcgaagcaaaacccgaagtgagagaagcagtttgtacagtcagcttgggcgtgagaagcacttattaccaagagctgttcgcacttctgcatcgttctacatccacagccgctgttttcgaaggtctcggtcgatccccgcaaggcgcttccatgacttgagagagagcgaccactgagcacctcgttcagccagactaccgttgtccagagacacgtccagccctcctgtggtcgtcgagagcagcgtccgacgacctgggtcaagacccacgacctcgtcctctggccgcacaccccacggaacatactctacttggtgatgacccttagtttcgacctacccatctccatccatggtcgttgacgtcagatggaggcgacgtcggtctcagcac

SEQ ID NO: 955 - DNA, 14965 bp, Xanthophyllomyces dendrorhous
acacttaaatgcttggcttgctaagttttgttcttctttcgtcggatatacttgctcaattctgccaaatgttgtagacagagatgaatataagcataagagtagagatcgttacaaagtatcaggtcttataagtagagtaattaataaaccattggttagcgataagccaaaacttgatagccgtcgatcgtatgctcggtacctccccagccaatcctgagaacccaggaaaagaaacaagaaaagcccaataaagatgtcaaccacgatggtgatgaggaggatgagtgctagacagccaggtccagtgtgtctgaaaagacgtacatgatggcagggttcatatagtgaacttttcctggatgggtgccactgaacattgatcgtaccaaagttgtcaataaagcgtgtaagtagatgcatacatcaagacattctcaccctttcagttgacctggtttcaaagattcggataagtttggggaggacacagagagacggcgagagaagaacaaagaaagacaaatgagttgacactcagcctccggatcctgatctatatgagatcaggcaaggtaaagggatagacaaacctcttcccactccaatccacatcccatccttctctcttccgccttccacaggcctgtattgaacgccctggtcccatatggcgccaaagacattgttatcaatctcgtactcgctgcctgaaggtaccgtcgaccatcgaaccgcattctgatcaccgcatagaatctcgaattcattagaaataaattggagttctctgccggcgtacgagaaggaatgtcgttttccgatatgaggcgcacacttttcacgtagaatcccaacagggttgaattcatcagatatgacatatacaaatatctggcaaagagaaaagatggtattcaccttgccaatttgtagagttccgttatggaaccctcgacaagcatataggatctgattgttgccttctcgctcttcaccaatcggtagcgcatctacagggaatggctcgctcggatccaagtaaacccacctgggagacatggaaagcaattagcgtgaatctctttgctttgaccataggacaaaacaagacttcaagactcagtttagcaagactcgcctcaaggagggatatattgcgcctggaagttggtaatactctattctagcctttgcactcagcagccaagctgctcttccatcctctacattgtctcttcctagaacccttctgtgaacaccctccttcagtctttccaaagcctgatcttcctttgagaaactccaaagcccttttccaggagtcttgaaaacaacttctcccgtcgcttcagagagcaggacattgggttgacgttccaacgaagcctcatggtcctcaagcgattctgtcttgggaggtgatggaatgtggactaaggacggctggaatcgagaaggaagatcatgcgcgctgttgaccatgccccattctggatcttcctcgttctccaggacatggacgctctgaaatgaatcgactttgaaaagaggagaaacaagttgagactgatgagtaggaactccttgatagttgactcctaagtagacccaaggatgaggaagtgcaggctatacatattaagggccaataaaaccagggttagaaaggctgaatgttctgatgagaggaacttggctcaagaaacggacggtttgcggttgaaaacaaggaagaaacacctgggtctgatacagaccgccattgtattccacaactgacagaggaggatactctgttgaaggactgaacgtttgtaccatagatgaaaaacaagatgattgttcgaagatcgatgatgattctcaactgatgatggttcatgaccgatgacgagagtgggggatgtgacctgagtgttacaccccggtaaccttctcctgcttctgttccttctcccgcttcattagttcccatcctttctcattgcatcaacatacagatatatggcattccagcgcagatgcctctagcaccttctatggttcatcctatcatgcataattgtggagtctgaggatgatacataatacgagattactttgtcacccatagcttagtctcccaagtttggattttttgttatctctgatcctttccttgttccctggtcctcgttttcttgtccttgtccttcgtgattccatcaatcctgttttccagttctgagagcctgaacttctcattggaagcctaagagtcttgtgtggctataacctccgtaacctcaccgttaccctcctaacttacatctcagctcatagacccttcactttcgtctcttttttttctctggtttcccacgtatgctgtgtcttatgtatcatgtctcccacgtatcgtatgtgttgtgcaacgtactgcgcgcacattccttccaaagctcataatatctaagaactatgtacaagacgggcatcctcgaccagttgtccatagatagctgaagcctgatttctttattactttctactttctacttttacccttcctcgtccttctgtcctcgtcacctagtgattctgtcaatcctgtttcccttgttctaagcgcctgagcttctttctttgaacctcagattccttctgtggctacttcaattgtagccctcctgttatcagcccagtcctggatcccaacacaaaagggcaccaagtcacgtgagcgcttgctgctccttgcacagctttccaaactatttgctatcaacttcgacatatcctgatatacaacaccaaccatcattctgaacacacatcatagagccatggcagacccaacaacatcgtctcctgaaaaccgtgagaccgctgaccagattgcttccggttctactctttcaccaaatcgacccggcgattcagaatcacacgtccttcgagcacttccggcgtcactccttcccaaatctcactcgaagaagaaaggaccgtcgcctgggatcgtttatatttcgaggctaccaccgggtatgacacctcagaaggtgaagcatcttatgggcagatggggtcaggtcggcaaggtgtttgctcagaaggatgataagagcaaggaagcgaaagggaaatgtgagtgtcatttcatcatgtgtatgcggtgtcactgtttcagcttctgtctttcttctattttggggcaatgtgagactgagatagaatatgttgtatgtgtctggtcatgaacagctcacaacgtgaattattcagaggcctggattgaattccttaataaatcgattgctaagtcggctgccgaaatgctgaatgctcaacctataggtgggaacaaaggcgaaaagtttgtccaccttgtttcatttgtccgagtcacttctatctgtagtgagaaccgggtttaacactcaagctcttttgatcctacctttatcttactcaaggtggagggacgatatatggacgatgaagtatctgcctggattcaagtgggaaatgctaggcgagcagatcggttcgttctttccactcttccgttttcctctctttgttaccccagctcttggcctcaggaaatttctgctaacctcggtcaatgtttcccgtccattcagcctatgaacgtaattctcacaccgctcgacttcgacaagagctttcccggtcgaaagccgagcagaacgagtaccttcgaaacgtcgaccttgcgaaatcccttcagaaacgtaaagaaaagaaggcgctcactctcactggcgaaacagaaggagaaccatcaaccgccggggacgatgtggggaaggcgaagaggacctatgctcagcgaggaagagaggatgaggctggtgagggtgggaaacgtgggagggaaaagaagaggaagacagaagaacagacgaagaagggtgaggcgaaactcagcgatgtattggctagtgtgttttgatcgaaattcaagccttgctctctacgtagatgtcaaagatttccactcattgttatgttctgtgagactgatataatattgagagaagtagagaatgacagaaagtgacacccgagttcgcaaggtttcactgagatattgtatgttcatttcatatcaatccctcattcaagaaaacctctttctcgaaatcccatttacccaacactcctgcccgggggtgttctcccgttcttccaagccacctagcccaccttgttgcgtcttctccccctttgcccctgacaatcccaaaggcatctgtgacctgcttcactacactctcgcacttttctgtacctgctccaccccacatgatcaacacctgagctagcgtagcgagcgcgaaagcttcttccaacttcaaaccttccgcacgacacgtctgaaccaaccgaatcgcgtctagatatgtctctcgaggggacgtggggaacgatttatcaatttgaagcttcagagcctgaattcggcttcgtcgaatatcactttcagatagcgctgatgaaatagtttctgcacccatttcctcctcctgttcggtaaggaagatcgagggacagacgggacagtcgcattcgaagctaaaagacgacaggaggtgttgtttacgatacaaagttggcaggaggagcttagtagatagataagatatagtgatttcctgttggggctcgatgggatgtgtggcgtatacttgaagggttccactcgacgctgagaatgtagcttcagcgttgggagaacaagaatggtttaatcgggaggcgagcggaaagatcccagacctgttgagtttatcgacgagaaaaggatgaattagatcgatagactgaagagctacagcgtttgatgaccggtgtggtctcgcttcggcgtatggtagcaccttcaaagggcactgcagaccttgaagcttttgtgcttggtctcgtgaagagtttcttctcgatcaacgcaagaccacaccaaccatctcatggcatgggtctttctcactcaaacggactcttgatgttttcgacaagttacgagggctgatacgggatcacttactcttgcggtcctgccggcaaaacgtttgtctatttcaagtacttcttgagcactctcggttcacattgcaaggcagacgataaactgggaaaggacataccttgaagattcctacaaacttgtttccacctgctcgacagttactcaattccaagaaaaaacaaagtttctccttcgatagcgatcgaacggccttgaggacatcatcctctgactttgaggcaagcggtagagtgaataaagcgcggtcctcgaacagcagtgtaccaggggggataacttgcgacgatgacgaaaagagagaagctccggaactaggggtatgcttgaggacatataatgaaggcgactgagaagacatgatgtctgtatgagtctagatagtgatgaggttgatggtatcaaacaggatgatgacgatgatgtttgataatttacctactttgacattttcatgacctccaacgctcgctcgctcgccgactaccaccacccttcctttagcaattctctcaacatgaatccaggctcaggatacaggctagtattcagatcgtctggattgcctatccgcacacatctaatactttgctcgaaacgccaagtcggacaccttccggcatcatcattatcgtcgatagagggttggttctcgcactttttctgatgtgtcgacgaaggcaacgatattcatcacttgtttgattttgatcttgtgttttatgactcatactctaggtactacttctacaaataagtcctctccagagtccgccatctccacttcaagcccaacaaataccctgtctgccaaccctttatctcgtgcagatcagctgcccgaagaatcagttaagcgatctcgacgtcacactcgtgactacacccaaaagcaagatgtagagcatccgaaacaatctgaagattcaaagaagaataaacgcgataaacgtcgaggaacgctcactggacatgctcttcggctccgtacaaaaacgcctacttcggagattaagcctttatataatgcaagctcaaaaaacttcttcaactatgtatcggttgcccaataccagcagccaagtccctcgacacgaccttcagtggtccctgatggttcaaccaccgatagccttgattctttgccctggagattggacagagaatctttctcagtcgcagattcacctcggaagaattcgaagagggctgtcgcagattggcccataaagacacacccaggtatctatcgaccgttgaatattgcctacgcgtttcacaacaagccttggcgtttatctctttcggccttcatatcacccaaagaagataatatcccggataactacaaggtcaaacccgaaataggtcgagtgatgatgctttccaatcggtcactctcgtcaaagatgggcgcactccgacattttggatgggaattggttgaaaatcgcacaaagatgcgcaaaacgattgagggtctgacagacccacagaaacaacaatggatggggttgagtgaatcaaggatcaggacattggtcgtacagtggttgtctctcataggacaagatcgaaaggttcgtccaatttttgttttttatttttctagttgttctgtgacttcaaatacaaactgttcagcttggatctattcttgatactctatcagcacgaccctgacgaagtagtcttcgaaggctcgactctagtggttagtctccagacccatgaagctagaaccaaacctgcacctttgaaagccgcgtccgatcagagtccaacgatggccaccaggggcgtgaaacccatcaggtcattgacagcatcctctgccgaaatatctgaatctccgaaccctttccccgatcgtactccggggataacaccaagcgatatagctctcgcctggagtattgaggcattcatgaaggatctaggagcgttgggatccaagccccccgcaaggctacagacacaacctttcgaatggacagaatgaaaccttggctttttccagaacgaaacctttagctggtgccgacggacatgacacacatgaatttcccttgttgtgaatacttgcgtaatctctacatgtcttgattgcaaacaaaacagaatagtatctggaaggaatcgagatagaaatacagtgatacacgaataatatatgtaaagaggtttgacgattgaccaaagaaacgtagcagagatcaagacatcgaacgatgcgctggagagttttgctctgaaagggttctatttctttctcgatcggtaaaacgaaagagctttctcaaccgattccacagtcggagtaagagcctggaaatatatggcgggaaacaactgagtgaatcacaacctttacgaacgggacaggatacgacgatacgaatttacataccaatcggacctttgtaccttcctctcctgcttcgatgaccaaagcctgaactcgttcctcaacctcgcccaaccatttgatcatctttatgactttggcttgtttctctgctggagtcttggttgaacctattcttccaccgccgtgcccttgtccaggacctgaggagttggcaagataagaggaggaaggtgggggagggagaatggcctgccagaactgacgaagaaactcgttgattgttgaatgaaaagtcgtcgttttcttgaggagtataggagggatatcgtcttttgaaaccaagtcgtggggatgttagtacagggatctatataaagtaagaggacgaagaaactgtggatcgtatgctgagtagagactgactctttttggatttggactcgactcgagctcgtacacttgacgtcaagcccaacatgacttcctccgccgctttcttttcaaggcgcatctacagaatgatcaagataaatttgtcagagccgaggaacaacagctaatgtagatgatgcgcgctagaaagcgattgatgaacaaaccccatccagacacggctgccagcctctgaaccgacttcgcattgcgttcatgatatccgatacctcctgttgttatcggaaaagaaaacaggaaggtaaaacgggtcacccaattgcgtcatgagtgaacagcactagcgcgaagtagatggaacgaacctcctcgcctctaacggctttgccatctacggtaccatcctctccgaccactccagtcgatcggccctcaaagtatttctgccgatcctgcatcgccagatcgagatgtatctcagtagagggtgtgttcgtgtgaagatcgtccaggtcgagttcggcatatcgatcctgagcgatcaacagatcacgtacaagtacaagatgatttcagaaagatcagacgatcagtcttgttgttgctttctcgcgtgatatgacagacggaaacgagtgatagacatgaatggttggctaaccttgtctttgttattgacgtttgaatcgtctagtcggggtcgcttaccagaaggttcttctgatttgattccatcgttgattctgtatagagattaccgtacgcgtcagcacatcgaagaagcatgaccgaagcatgatatgtgcagtctcaatatagatctgattcaacaaaatatgaggaaaccccgattaaacagaaaggactgacccattatcgatcgccttcaagagtttctccgagtgctcattaaacctcctcataaggggcagggagcttcgttgttttcctgcctgcattgtgatgtctctagcatttcctgactgtattggagaagtccggaaggaatcaacatagaactcaacaatcaaggtcttggggggaaaagaaagaaaaggacacaagaaggaaagtaatcacctcgccgtgatcttcttctgtggctgctagatcgagaaagcggttcttgacagctccaggtacgtgtcgaggagtgatatctatgatagacacatgtgttgtttccgaggtcagtgtatgtaaatcaacccaatcaagtaggcaagacgaaccatcatcaggatcttcgagatatttatcaaacatcgcgtccggtttagcagtgccttgtttggagcttcgaacggacgctctgtgtctttcccagagtctggaattgaagtatctcgaccagaactgtgtctcgttgactttctaagaaaatgaacaattgattcagacatcaacatgctgtcaatacctccgtttctttggcgagtacgaaggaaaactgcacacacctttggcacgttctccttgtgagctttcatcacctcagggaactcatcaaagatatctctgatgagatctggagtgagagagatcgtgcctgcgcttgagctgccggcgccttgcttgcctttgcctttggcgtctttggcagaccaacgatcgtcgatcaattgcgaggaccgaccggctgattgagtagaggatttcgattctgacagaaggagcaactgcatggttggaaaattcaagagtaaagtacggtcagatgatggggcacgacaaacatcaaatgatgcgatgcacatgtgagagaaaaatggaaaggggccaacctctctgccttcccagaactcggcatcactcagttggccggtctggacgagctcgtagtgcaaggcggccaactgaggattcttgaccagaaccttcttatgcagatcccagtccgtcagcacatctggtgtttctgatttcacagtcgagtacaaactggccgagaatccgttcggcttgggtttgttttttggaacggatgatgggagggctgaaggacttgctttggcagctccattgccggtgacggaggaggatgccaaagcagatgttcccacagcggcagaagtagccgagccgttcgaaacaggaggctgggccgctttattgagggctgcgattcctgctagatgagctttgagagtcattgcatcggcaggtgcggtgacgggatgggtgaagacaaacgtcagagcagaatgggaggacgacgggttgaacgtgatcttgaggttgtgcttccccgaggcgggcggagacgagaaaagagctatcgaaccggagagacagagagaccatatcaacatagataggtcgacaaagaaagatccatcagcccatgttgagtaaaacacacggcacccatcgagaagagaaacaggaagaacgataccttcaatcttgtcgagtgattcttggatcgttccatccgtccgttctgtcggtctccatgagacaaacgttgcggtcacagaaagaacgcctggctctttcttgtgtgatgcctgtgcgaacagatgagccgagtctgatgccatctatacgatcaagcggcctcctcgaccacgatggttggatgatggtgttggagaagaacaggcgaaattaaaaccctagactttttgccttttgaccatcaccatcgaccgaggtttcctcatcttccatcttgtatccacccggtcagacctacgttcagaagctcatagatacgaatccgcacgctcacagtcatggcccgctctcgctctccagaaccgtcgtcttcttcgtcgaaaagaagtaagcactcgtcctccagctctcgtcgagatcacgccgacaggtctccctcacctgtaggtcatttgtctcgaagacacgacgacgagtattctcatcatcgagacaggtccagtcgtgatggagactacgaccgaaaacgtgaacgcgaacgcgaaagggactactccagacgggatggaggagatagagacagagatagggatagagaacgggaacgagagagggagagggacaaggcataccgaaggggggatagagaaagagagcccaggaagtcttcttatcgatcccctccgccaccttccagtacttctacatcctatccttcctatccttcgtcctcctcatctgcataccccaaaccgtccaccctgtcgagacagccagttccaaccgaccaatctcctaggtcttcttccgaatatgcaccctcgacgcgtcttccttcggtggcatcgatacctgcttcctctcatttaccattacctccgcctcctgttccaaccccggttttggctcctgtttccgctccgacaacagctgctcccaagcttacagcagaagaagaaaagatcaaagccaagaaagagagattggccgcctggaaggccaagcaaggtctgtccagtgcatcccctgctccaaacgggggagcctccccgggccttggttctgccaaggtatctccctcacctcagtctacaagtataggtctccccctcaagaaggcaaacaacgagagagctgggttctccttctcgtcgtctgccggttcttccttgtcttcctcagctgcattgactcgaatcggtcttcccttgaaaccgtccgcactcgctagaggatccaacctcaaccaatcttcttcaggctctatagtagccaacggtggccgaggcgctgtcgggttagacgactcggccgcccctgtgagaaagttcgagaagctagaagacttgccagaggtcgacaagacatatgtccatgtggaggatgacgacgaagaactggactaccagccagtcgccagtgtcaaaggtggggagagggaagttatctcggccacatctggcggagggagcgcacagaccaactcgggagcagaagcaatggacgtcgattccgagtctgtctcggatagtaggaaggtggatgagccaatgaaggacaaaaaggccgacgaggaagaggaggaagaggatcctttggaggcgtacatgcggggagtcacacaggagaggaccaaagttgatatggaagacaaaagccgaatgaaagggaacggagcgaaaccgaagcctcgggcactaggaatcgatggagaggaggacggactgggaagcgaggatgaggaagagcaaaagcctaaagagggagatctccctctcacagccgaagatatcatggcgtaagtccatctgagctttctcctagcattcgttcactatgttttgcatgtttcacctcttcctttctgttcactgatccattcaataattcttgtacaactttcgcccttctaggttggctgctaagcgcaatagacgtaaagatctaccaacagtcgaccatcaaaaaatcacgtatgagccattccggaaagcattctacaccgctccatatgaaatatctgaaatgaccgaagaggaggtcgacctgatgaggctcgagatggatggtatcaagatcagaggagtggactgtccgagaccagtcaagcgatggggagccttcggtctacccggaggatggttcgtatcctctttttcttggtcgtaactgtgttgtctctgtatgtcatagtgcagtcgattaacaactctctctgtacgcttattttgactcctttttcctgtggcccttagtttggaagtcatcaaacgactaggctatagctctccgactgctattcaagcgcaagccatcccatccataatgtctggtcgagatgtaatcggagtcgccaagactggatccggaaagaccattgctttcctcttgcctcttttgagacacatcaaagatcagaggcctcttgaatctggagaaggacccatggcggtcatcatgactccgaccagagagttagctttgcagatcgttagggagtgtaagccgtttgcaaaagtcttgggtattactgtacgtttttattctctcgtctctatgcattcaacctttttgtcgttgtcttaccggtgtacatatcttgctgaacaggccatgtgcgcatacggagggtctccgatctcggagcaaatcgccgagttgaaaaagggagcggagatcgtggtctgcacccctggtcgaatgattgacctcttaacggccaactctggaagagttacaaacctaaaacgagtgacgtacatggtgctggatgaggctgatcgtatgtttgatatgggtttcgagcctcaggtgagggttccatcttttcattttgttgttttatcagagacgctttcatcaacctgtgaggaggaaaaagaaacgtaatctcaataagcatgtttctattgaacatttccaggtaatgaaaatcatcaacaacgttcgaccggaccgacaagtcgtcttgttctctgcgacgttccccaaacagatggacgggctggcgcgaaagatccttcagaagcctcttgaggtgacagtgggcggtcggtcggttgtcgccaaagagatcactcaggttgtcgaagttcgaacggaggacacaaagttccatcggttgcttgagctattgggtgaaacctatcagactgaagaagacctggacaccaagcgaacgttgatctttgtggaacgacaagaatccgcggataatctgttactcgagcttcatcaacgagcgtaccgacgggcgaactctcttcacggtggaaaagaacaagtcgacagagaccagacgatcacccatttcaaatctggtgtgatccccatcgtgatcgccacgtctgtcgctgccagaggattagatatcaagcaattggtgttggtcatcaactatgatgtcccgaatcacatggaggactatgttcatcgagcgggtcgaacgggacgggcaggaaacaagggaacgtgtgtgacgtttatcacgcctgatcaggaaaagtactctgtagacatatgcagagctgtggaggccagtggagtgactgctccggaagagttaaaagcgatgtccgaaggtgagtcgggctttctttgggggtttccttttctctggtgtttttgatgttccgttgttgtgagcatgaacgttattgactctctggccctttcttttcttctcttcttttttcctctcctaggcttcctggccaaagtccgatcgggagctgccaagtcacacaccaacaccggtttcggaggtaaaggacttgaccgattcgaatccgagcgagaagctaaagaaaaggccgaacgttcggcatttggcgagaaggacgagagcaaggcaaaggacgaagagggtggaaaggacgagaagggtgaacctgtggcgaaagacgaaaagacgatcctgcctggcttcaaggtggacatcgtcaagggaccagcgcccgaacgtgttggctcggctgctgctgccgctagagccagaccggctgcccctgtggcgccacccgctctgcaagtatctggaccgaacaaggaaggtctcaccaaagtccaggcggcgctcgaaaagatcaacgcggaattggcggcaaagaaaaaggcgatggccaccgctgccgctgcggcttcttcgacaaacagtcaaccctccggaggggacaccaaaggacagatctcgacagagaggaaaccgaaagacccggacgcgacagatttccacgcggtcgtccagatcaacgatttcgttcagaaagctcgatggatggttaccaaccgagagtcgtatgtccccccctccacccctttccttccctttttctttttttttcacagggattgcctttctctcgcatcctgactttcatccggacaataactgattgactgactgtgtttgatttcgtctcttcccatttcttttgttcttccacctcatgcaccactcttgtcaggatgacgaaactgatcgacttgacaggttgcgcgatcaccaaccgaggaatctactacgaaccaaccaaagagccacccccggggggcgagccaaagctctcgttgttggtcgagtcgaacgacgaatggagggtcgagctggccgtcaaggagatcaccaggttgttggtcgaaggtaccatccagggcctcgcgcaggaacagagaaacgcggcggctgccggggggaggtatactgtcgtctaaggtccgcgcgaagagatcggccacgg

SEQ ID NO: 956 - DNA, 6531 bp, Xanthophyllomyces dendrorhous
tgctttcctttcactctttgttctttctttcctcttgctttcttcgtcggtgcttacccttcacttgttagtttgaacgatatgatgggtctttctgttcagtccggtctttttgcctacgatgtgaatctgatcaaccagaaaaggcgactgactggacacgtgaacgttttggagaaacagggttcgatcgattgagtctccgaaaaagaaaaagaaaagcaagagaaagagagttgcaaagttgaagagaataaacgaggagggtgacaagagggtatagagactctataggtgacggaaacataggaaaggagacgctcgttgtatatttcgttgtgttgttgctattcgatcggagaacatctagagagagaaagaaacagaagagaaagggggagggggcaataaatttgaagaaaaggaaagaatggaaaagaggaagaaataaaaactgaaagcatcaaggataaaaggcgaaaagtctacgaccagacgtccatcaacaatctagatcgttctttgagcgacttgacttcagcggctccttcgaccgctgccgacccgttctttgactcggccaacatggcagccaacttttgttccacatccttcgacatatttcgcccatcaccacaaatatacacgctcgctcgtttctcgacgatcgcgctcttgatcacctctttttggtcccacaaaagatcctgaacgtagatcttcgagccgtctggctttcgagggccggatcgagaaaaggcgacgtggatcttgaattttccttggagctccgcctcgtacgctggccattcctccgcgtagaggaaatcttgctcgtctcgggaaccgtagaacagatagatcggtgcccaatcggcgagcgcgtctggcccgttcttggcgatcgaccgtctggccagggcgattcgctcttgaatgaatcctctgaacggggcgactccggtaccgggaccgatcatgatgaccgggatctttggcgaggtgggcaacctaaaggtagatcgtctgacgtgaatagggactttgaacagttggtcgtcgtgcttgtaggaacctctcggaccttcgagtgtatactttggggcggacacgtgttccggtacatcgtcctgtccgtcgctaatcattggggtggtctcgttgttggcggcctgcttgacgttcaacaggtagtttgtgcccaatccgaagacccacctggccgggtgtcggtcagtcgcctgtgattcatacttgaggatgacggcggtaacgtggatggagtttgggtgaagtttcggagaagacgagatcgagtaaaacctcggctgaagtctggaaacgtcagagacgacgtggtcaaacggaatattccacaccgtggtgttctcggccgtgggcatgacggtgatatcgttccccgcggccaactggagaacctcggctagtcgaagatggccgccgacgacctcggtgtggtaggcctgcttgtcagttccgagtcgagtgaggaactcggcagcctgctcggacggagcgtactttgcgagcaccgcgagtgtctgccttgacgccacggcagatatgtcgaggtagtgtctgaaaacggcgtcgtacgtggtcggggtcgggaaaggcaccttggccaacgtcggatcgagcgagacgacctggatgatcatgcgccgtttctctggagaagtgagaccgaggacggccaacagccgctcgacctcgacatcagggttggaaggccagactgcgacgtgatcgccggtctggtaagtgattccggaaccggtgatgtcgaactcgagatgaatgcagtttcggtcgccgccggtgaagagttctctgcaggcaagtaccggggaggcgtacgggttcttcgcgtcatgcacacctttgctgccgaggagcgctctggaggagagctcgccctggaagactttctcgatcgggtggttaggaacctcggttacgacaaagtcaggggtctcgcccgaagcgccttcctcaaacgagagcgtggtcgccagggcggcgaacatgtcgtccttccaagcgaggtagtcttcttccattgacttgtcatcgtctccttcaccccgttcgccgactcgggtggcacccagggcggtcagccgggcgtcaagctgtctaccgacgacgttgtactgctcgtagctgtgcagcgtatgagcgtgggtatgggtatgggtatgggtgtaggaaggcggatatttgagcatatggagtttacataggatagtgtaacgatgaggagaggaaggaaagagaaaagaagcaaacaaagaaagatactcacgtcttgtttcccaggccaaacacaacatacttgaggccatcgagagtagacccttctgaaaactctggatcatcctggctgatcatctcgataaactggacggcgttgtccgtgggttcaccctcgccgtaggtggccatgcagaacacgatcgcacagtcttctgggacctggtcgagcttttcaaagtcatactcttcgatgtcgcacacgagggacgagactccgaaccgggacttggcctctttggcgatccgggtggcatattcttcggccgtgcccgtctgggagccgtaaaacacggccaatcgttttttcttttatcgtgatgaagggataaggaaggggagaggagagacgacgacgacaacaacaaagggttagtatagtgcataaggtgatcgagggtggacagagcgttggccatggcaagcgggactcgttggggattggtgggaggagagaaaaaagaagggcccgtgcacagaggagaggacgcggcctgtgcgcaagagaacagagtgggaaagaagaaaagaagaaaaagggacgatacctgatctttcattcgcgcgacaaaatctctgggatcgcctttgaaggcgttgccgttcccgctagaatctgtgggcttggatccattggcggtggctgccgaggagcctgaggtggtggaggccgaagaggaagaggatcccaacagtcgatccttgttatagaatccaagggcgaggagagcaccgaggaggaggatgacaagatcggagagtgtggccattttaattggatactgaaggagggttctgctgactgtacagggtcctgactgacctgagtgaggagataaagggagatggacgagagagacgagagaggatgatgatgataatgaagaagaagaaaaagattaaaggaaaaaaaaagaattaaataaaaaaagaaaacaaaagaaggactgggaaagttagagggtttgttgcctagtgggctttgtgttaagggttgtgttaagtgttgtgtgaaagattgatgaatgttttttgatagttttctcgatcgaacgactttgtatcttcccggtcactctatctgattagacggtggctggtggaagtcacgtgagcgtaattttggctacaaaaccccaagttctggttacgcatcgccggtaactacggaccccggagcgatcaacagacacgcagacagactgattgatagctcgaccgatagacacataggtgatgcataggtgatagatagatgatacattactgataggtagagatatctatctacgtcatcatgtctacgcctaatctaaccctaaccgcgttcaatcgaccatccaaccaactacctgtgctatctcttcacttatagtcgcgcttgttcgagcaacaagtattcccccgtcagaacagggcatactgtgccttgggtctgtataagtattcatctatctgtctaaccatctgtatatgtatctacgtatgtatccgcacaagcatgtattcattcatctatcagcttatataatctttccaaaccctctatattcatctatttacttacacagctatctacatattcacctatatttcatctacctgtccgtctacctaagtacccatcgtcactcgtcaccggtccctcaaccttctccatctttctctcgaatcctctcttcagcgctctctggtgtactctccgtcgtgtctggtcgtcgcacatctcttgcgcgttggtgatcttgtcagctgcaagaccgcacacctacacgccgcgccaatggggaaaaggtcatcgtatccgttaccttcgccgtcaccctcgccgtcaccatcaccctacagatcaccctcaccaccgacctcgttctttccctctttctcctcaaacatctcctctcatcccaacgagccagatcgagctctcctgttctctcaacagccatcttcgcctgctccgaatccacattcgaatcttccacttccatctataagccctgccgtcagatctcgctcctcttcagatgcctcacacagctcactatcctaccggcctggctcgacctttcccagtcgacctccggtctcccagtcacactcggcacgcaccattcgccagagaccgtccgtttcggcttcttcgaatgtcgaatcgagccaaagttctggctcgagtcaaagcccaatcaacattcctgtagccctcgcccacacgcttactcctagaacatccttctcgtcaacctcacttgagaccctaccaaactctcttccaggccggactctcaggactgcctctccagattctagttcttcgtccttgtcgtctccaccagatgaccacagggcgcctcccgccgcatactcctctctcccaccctcccctactaggagttttgccgacctagacgaatctccccggaaactagacactctggatctcagcatcctccaaaggaggttctccactcagcccaccctggttcacgaccatgataccatccaggaccagaaccaggaccaggatcaacctcacgaggacgccgagctcgcgccagatgacacactcgagcatcaaccagtccaccaagagccacagccaaaggccagtctgtgggaacatctccaggaagagatctgggcaaacgactatgaaagcagtcaagagttgaaatgtctgtcttcctatccctatccactgtctcttaaagcgttttttgacacccaaagtctttcctttctctctccattctgccctcggctgactcgaggtgccgctctctctttctcattcacttggtttctttacgtgcgcgccgtcgaccgcaaggggaacgagtgtccaactttatccaagtccctcttgctatcgaaaaggtaccatatcgcatgtacagatcatgttcttcttacttcttactaatcaaaccccatcattttctttcttcggtctcatctcagttgatcacattcggatcactcgtctgcctcgattcgtttctctacgtgtttaccatcctacccatcagatcttttatcgcgctctgcgtcctgctcgaaaactactggagcgcgcttgtcaaaaggaagccacgtcggtgcggcccaatcgtctttgtcgttttccttccccttctcctcgctcgagtaaataactttaactaactttactcttcttttgggtcacatatttcccttctttcctccctcaagccatctggctcctacccagcggattgacatcatcaagtttctccttgtcttgtttagttgtgtcatcctcatctggggaactgacgcaagttatatctaccattctattagagggttcgtcaataatgtttcgacagaaaccaagctcggcagaatcctttctcacattctcagttgactcaaatccgacacatacaaaacagacaagatagcatcaagctggtcgtcatctttggagcgttcgaagtatgttccatcgatcgatctttttcggcgacgcgctatccttatattcatctctcttttcgtcgtttcttcctactctgtcgcccctcagatcgcagataagttgtgctgtgcattcggtcaagacgtccttgactcgcttttcgcaagggaaactctgtcaaggcggccaaatggctcccaacctcattttagaccagtctttttcttttgcttgagtcttggatgcgtcggtgaggcctaaattgtttatagcctcgttacgatacaaggagggtaccacaacgctcataggacgcttttttctttctcgcatagtggcccacaccttggtctttcttttccagttgatctcgctcaacgtggctattaactctttcgacaacgctctcctcaccttgctcgtctcgaaccagtttgtcgagatcaagggctgtcagtgtttttccgattcttttcatctcctttaggtttttttcttgtcaaacaaactctaactatcttctcgtccttctgattcttcttcaatagctgtgtttaaaaagtttgagaaagaaaacttgtttcagattgcttgcgcaggttcgtccgtgtctcctgttctcgaccagaccagttcgcacctatccattcacacctaccctgactttcaacttctacttctccctatcgcccgtaacttcagatatcgtcgaacgttttcagctcggtctgatgctcgccattatcgcc

SEQ ID NO: 957 - DNA, 14109 bp, Xanthophyllomyces dendrorhous
cattatcgccttccgaaatctagtcgaactgagtggttcagatttttcaagcttacccaggagctttatgaaaggtgctagccatgtggaagctatcctttcggtcagtcttttctttctttctgacatgtttctctctctttttatttttcgatatgacggtcctgaagagtgtattgatcgcctcgttcatctcgtgctgctatccttgaatagccggccttggttgtcttgggctcggagatggtagtagattggttaaaacacgcatagtaagttgcctacttttttcttcttaccttttcttgtggatctctccagatgttcatccggtctactctgtaccatcatcgactcggtcatcagtatcacaaagttcaagtaagatccaaaatcttgttccatgtgacgtttgacatgccccactggaaagccgttctctgacatatcgctcgcgatcctagtcatatccgggtctcaacgtacgagcgatttgccgatgtgctctgtagggatcttgtcaccgccggaattggaggcttgcctagtggtaaaaaggtaaagaggttctctcctctctgctagcttttctctttggatcacgttcaaagattgacgttgcgtcttgcgatttcatacgtcctcttcctctctccgttctcgtgccgttgtagcatgcgctggccgatcaatcacctctcgtgtcgcgtcggctgggctttgcgtctctcccactggcatgtcttgtcattcgcatagcctttcaagcgcttggaatggcatcccgtcacaaagagttgacagtcagctcggccttcctgcacggaatctccacagccgaaggggacggatcgaccgaggagccgttctgggagtcggatgctgtgctatggctgggaatcggtttcgggatgttcatcttttggatctggtccgtctttcttcattttcgtgtctctgctatctcggatccgtctttcggtcggagtccggtctgatatgatcgtctttcttgtttttcttgtttcgattttcgtttcttctttctcgaaaaaaataaaaaatgcagtctggtcgtcctgaagatcattttaggaataaatcttttaaagtacgcttcaagaaggttcgtaggtatggaatctagacgagagcaggatgacgagttgaacaggttgggaaggtctcctttaggtgaaggtgctcaggaaaaggtgctctctttactttctttctttctctgttttggtttcatgatcctccttcggaattaataacaaaatactgacagacagtctctcccacctgaatttaaatacatgaatgaattttttctttaaaaaacaaacaaacaaacgacagagctacaacaaagaactttcaagtctgcttcgacaaaatagagacgacctaccgctcctcgccgacctaccccggaacgctacccctttcccttcctcctcttctttctccacgaccgaacgatcctttactccaggcgacgcggaatcaccagcaggtccaggtgcgagatcgacagcttcgggatcaacaccaggagcaggaagcagtacaggagggaagaaaaagggatatcagctcgaagaagtcactaggtacactatggtcaaacggatcttttaaaagaaacaacccttccaaagtgtcctctcttcaatcttcaccctttctttctctcttgcttcgcttcttctttccgcttgtacgcgtgatgcttgggcaatgcacaacttttttttcttagacggcaagaacagtggtccattcatcttttgaatatacacctgatgatttaaatgattattaaaaaggaaaaaattagaaaggaatagcagaaggaccatatttgagggcctagaaaaggatgacggagcccgatttagaaaagaatccagtggcggctacaataccgagtgaggaatagaacgaattaataggagcaaagaatctcgggcagaaatagggtatgatccgtgacaaggaaagagagattggatgtatgctaggagtgaaaggaaatgaaaagaaaaaaacaacaacaacaacaaaaaaacaaaccaagaatctttgtgtattgagagagtttggatagggggattatgcgatattggggacgttaaaggaaacgttgaaagaaaatagaaagataaagacgaaaaagggggtggaagtagggaaaaaaagaacgagagacaggagaggatgagaatcgtggatatatccccttccaaaacgactcgatagcccccatcaaattatcgcatatttccgtgtgagtgcgcactcgagtgaggattaggaggcaaagggatcaaaggcggtgggaatggactgggtcctccagatgagaatgactggtacgaaagtctgttaccctgcgcttggaccggttgttgattctgggcgtgatgaggcagatgacccggaggtacgtacggtgacagttgctgagcatggtgaggaggtgcggtagggaagggctgttgggcaggcagaggaagctgaagctgttgggatagacgttcagagtgtttgactttgattgcaaacaattcggcgatcctgtttggagacgagtcgaaagattcatcccaagttccagattaatctgcacattcgtatcgcaagagaatacgagaagaaaaagggacgcactgtgactcgagcaactttttctcctccctcattcttccaagatcagtcatcgatcttccgacctcctgagaaagcagcttcttgaactcttccagatgttgagtcacattaactgatgtcgcctgggacatcgcgtccacaaaccggattctctcgccttgaatttcccctttgagctctatttgttgaattgtgtttcatgttttcgttcgtgcaaagaacgcagtgaccgaaagaaaaagatgagtttcacagtgataacacatcagcatagtgataaagcacagaccttgacggatggcctgaagcatgttataattctcggcgcgctgccgctcaagcagttccatcacagactcgatagctacatcattttaaaacgagaaaagagtaagtctttagcccaatttgactaaatcgaagatctgttcgaaagcaacgaaggcaaaacaagaataatgaaagcgcaccaggtcgttctttctcgataccctgttgacgatgttccaacgacgccaacaaaccctcgatcctttgatggtcgatcccgcctccattcaaacctctggactgttgttcgaccaacaaggcgtgcatctctccgaccatgcctaacagaccgggagggtgaaaatcttgtccgatctgaggagacggtagaggtggtggagaaatgacgtccgatagatggtcgactttgtaggacactgcgtcgagggctttgtttccacttttgggttgtcggcagcgaacagaagagcggttagtggtttatgtgcaaacaaggcgacatacgttaaattggacaatatacatactttcggacaaactgctccatccaaccattgagttcattgagatctgaagaagatccccaacccagccaatattaaaacattagccgatagatacttcctcaaggagaatcatcttgacttacaccgagcgatatcacttgtctgttgggactgagcacctctttgcgcctgctgctctcttaggagatccagagcttccagtagctgacggaaagagaaaaaaataagtcgtcaaatggtgttcgatcaatggcgacgataaatctcgagtgtacggacctctggtggagggatgaaagaggaagtgcctggggccgctgatcgtgtggagatctctttgcgatctttcttttgggtgcaaaaatcgcgcaagcaggacgttaacatcaacgacttgctgaggaatgcagagaataccaaaactcacttccgagcccatgtctgatccagcgttctccggagactccatgtcagctagcgcttctagttgatcaccagccgcgctcgatggaggtctcacaggctttggcccatgaatatagatcccgttaggcgatgttgtccttatgagaggcggtccttgggatggaggcggagatggtgaggaggaggacgttgataatgagatatcaaccggtttcggattggtagcagaaggagcatacgaatttgctcccatcaagagttgttcgcacatgctaagaattgactcgagcttctttccgtgtgagtcattcagtgtcgatgtttcaagggcaggaggcgcagggacaggtggaagttgtcgggataaatcttctgcttgtttcaattcgaggcattccttgaggtcggttcctatcactgctagggtggtggtaagatgattcaactgcgaagattgaatttgggaggtttctcctgaggaagcaacctgctctaatagtttggagacgtccagttgaatggccgaaagcctctcatcgtgtttctccgccctacgagacgaatgttgttcgttgttctccaaaagttcgacaattctggccgagttgtagtcaggtgtttgaagggaaaacgaatcaggtcggacggccgaacgagctggaggaatctctaaagagtcacccaagtccattttgggcgatttcacatctaactgcttatctccgcggtcttcgaaagttgattttgttcgattcaggtttgatgaaatttcagcgtcagtagatccatcacggataagcgtttcgcttcgtaccccatcaggcgctgtgtaggatattgacaatgattgaggcgcaagctttcccccgttttgaacgcttggtagagcagggttgttggaaaatgaatttttgaagcggtctgaagcgactgttcctacaggtgatcctgatcttgcgctcttttctagattctcgagcgagccaatcaacgctctcacgcccccggatccttccttctgcctaaaactctcaagggccagagagggagggctcatcaaactgctccgattggaactcataacttcaaccaattcctctaccgcttccctcctcaatggtttgtcttccatcccgctaagctcaaacatattttccacgctccatcgaaggtcttcgatgctacctctcccaagtttcccatccccagacaattgaagtctgggtggtgcagaactgatgggtgactgagacggaagagaagagagcatatatggtaacgtcacggatccatctggagagtttgcatttgaacgataaattggcccttcctcgtgattggatattgaaatcgtggcagtatcatggatgctgataggaggggtcgttagaatagaactctgaggagaatcagctctgttgaggtcatctaacgccagaggttgagtagtggggggtgcgtgacagctgatacctgattgaggcgctggtgtagattgttcaccagtgaaaatcgcatccctgcagtttgttcaaatcccagatgatagggcagatgatcaagatgttatcagtttgagaaagatacagctgcttggaggaggatgtgcaatagaaactgaccagaacgagctaacccatcctaacctctctccaatcgttccaacagcgaccaccacgacacctgcgccgtgcttgagatcgatttctaggtagtgcgtatcctcttcatcctcatttcctgtcgggcagggccacttttctctggcctctcgctccggaacagtcctgaccgaggcatccttggagagcgcacaggaccaacttgtaaaatcgcctcggagagtagacgtcgacagctgaagcttgccaggataaagtgtacagttcgttcggacccagtggggtggagaagacgtttgagaaaagtaaaagagagaaccagatcgaagagacaaggattcgacggatgtgctgtttgcaaagtggacattagaaagattctaaaaaaattggcaacgcaaataccacatgaacaatcttactatcaatacctagaacaagacgaaaaatcgctaaagttcggagaagagcacttacatctagactgcctgccagagaaagcgaattttcactttgataactatgtctctgtccgaacgacacgtttaatcctttaccctctcccatcccactcatcgctgcaaatgcctcttcgagatcctcctcatccattgtattatcgcctctggtcgtaacggtatcattttgaccattgtcggaagcggcaggcaaattccaaagtgtctgccttcttaggtcttcctcaggcgcaatctcttggttggctcctactacctgaaccggagcagagatctctttccgaccccataggacctgcccattagcatcagcatcttgcatcatctctgcatcgatcgcactctcctttcgaccgccgaacttgccacaaagctttttaaacccatctcgaagtggggatcgacgttctttggttgaaggtgtggtagcgtccggccggccgggtgtgcgcggaggtcgaggggcagacactggttgatttggtgagatcggagggagaggcttatccagattgaagcgggaggcggacgtaggagtgtgcttggtaggtgagtgtggagactgtggctggtggccgtacgggtgagagggtttgcttcgagtgggcgtggaaggtgcaaaatcgaactttgtcgctgatgcaggcggtctggtctctgagcagggctggggaagcggtctgttggaggatgctttagttggggtcaaatcaagtcggtaaggggccggagaggtagagtaatctcggatgggagacgaaggaaaggattcagccggatgtctggccggtctgattggagatgtgcctattcgagtaggagtgtttgtcgagagagacatgttgttcatcggagggagatctcgatccatgttggaagcgttcccaattttgagaggagatgtctgttggttataatctactccagtcatcttctccttcccttttcccggagataaccaagtcggaccagcactagattcttccttgtgttcaaacatgttcgcccgttgacgcatgcttcctggtctaggactattcgttgcagactttgtggacgaactgaagattccttcctcgtcctcttccaacataggagagaacacccctgatttcttgacgtgactggccacgacgactttccttcgagttcccttgacgggcgaaattgtagaaggcgaggaaggagatgttatttggccgttggccgagttcgaggaggaaccgatggcaccgggagaatcaagaagagtaggaggaatcggacgagaagagttgagaggttgagataagattgatctgcctttaggccgtccaccaacaatcgacatgacgacagaacgtatcgatcggctgctggatgggtatagatggaatggtagggtaaggtaaaaacgatctataagaaagaggaagctaaggaggggaaatcaaagaagatgaatgttgactgggtatgattgagaggaatgaatttcacagaaggaagagccgagagttcgtcaatacaccaagcagcccatggatccacaaccgaagatcaacaaaccacaggcaagtctaaagatccctcaagtccatcctcggctgatcccgaaaccaaacaaagagacaatacaaatcctaccagagaaagtgggtgaacgaaaaataagaaacaagaaaggtagaaagttcagccaacataaaagctgtgctttaaatcgccgcagccacgtgctgcagatcagtcttagtgtgaaccatgttggacctttgcgatgacatacacagatatccataagtctacaacgaaagcaacgatacagtttcccttccttgatcagtctacaaacgtattggtctccttccatacggtctcgcgaatgagattcgcgaaccagccttcgcctcctcctccgctgcctgagacttgttcatctctgacgacgacaccccgctcgatctcgagttcactcatcatctccttgaccattcccactccaagatcttcggacagcgcgatctgaatcgtcgttagacttggtatatcttctgttccgttcaaaccttctgcttcttctatgctcatcgagcgagtggcggaaagcgcacgctcaatccgatgttgaaatgagcgggaagaataataaggagtgtgtaggatacacgtattcgttcctccttgagaaaatacctttaggtggatcgcaggttcagttaatgtaggcagataggctagggtctgtctaaacgtctttgggggtatcaatgctttttcgatcaagatcccccgggagaacaagggacatcagagttgtattcgtcttcgttctagatcgatatacatcaaggaacggataaaattaaagattaaggacgaaccaacacctctcgctcggttccatcccgcccatacctcatccaacctccagacctgatccctcttcttcctctctcctttctgcgtttgttggagatatccgccaagctctttggcaagctctttgagatatagcccctcctcctttgattgaagcatatcctttgtgatcgctggggcaggaagcgacatcgagagtgttgtttgaaggagcgtctcatcagatgaatcagaacctgaggatgaattgggaggtggtagtcgcgcagaaagagtttgcgctagttttaccttgtgtaacaaacaatgagtgatacatacaagacgcgaacaagacgcatgggttgttaaactcgttcatctatagaaaagaaattaaaaagaactaaccatatcgctagctttcttcatcagtgaatctaaatcttttaaactactctccaaagttttcgcacgttgggagtcctccatattcagagcatttaatattcggtctacccatcaaacatttatcaacatgggttcaagtcagaaacatctagattttgagtagagctgaactcatggttgctatgaggagaacgcaccgatcccagaagacgcattagaaagtgaggttgaaggcgaactgaacgcgggcgcgctggatgatgatgatgggcccgctctatgttctctcggctacaaaatatatgatgaatcagtctcttttcgcaaaacctcttctccagaaaagagtagaacagaacaaaccaaaccgccatcccatgctctaccctccaaccctctcttgagtgcagtataaaactccttgaccccacctcttcggaaactcagtctgatgataccttttcgcttgatcttttctccctctctgttgactgaagctatttcgttcgaagtttcggttgcaggtctagactcggataatcgagtggatgcaaagcctgatggttttcgtgaaggcaagggcgagtcgcacatctcgcacgtgaccagcgacgggtggttcaagaacgtacagacctcacagcttatcccagctacttccttctttttaggtggaacctcggagacgggagagtatgacgtcgaaagaggggccgaggagagtatagaagaagaaggaataatcggaggaggagggggcgttgaggaagcggatgatagggctgaagaagaatacgctcccttggaagcgtcttttgaaaccccacacatctggcatttcaacgttctggccgtcaaaccagaatcagaccttggattgttgaagccacataatggacagaaccactttccatccgtctctgtcacgtcaatcacagtatggagaacgcttcttgatggctgcggctgtttgatagatgaatcaaccacaggaggagcagatgttgaaggtatctttgtttcgttcacagtttcctctgacgcgagtgttagagagaccttaggagaagagctgagaaacccggcgtagaattctgtttgacgaactgaggataacaggatgtataaaccatgggggaaggactcgtcggcatgcctagatagatttgatgacgaattatgagtagaagaagatggagagaggatgattcgatgtgttgttacccaaccggtgacgacatctaacggaggaggaagcttggtattactgcatttcatccctcgtatactcaatcagcaatgaagagagtgattttcgcgaaagttcaatgatcgagacggatgagcctcactggttgtatattcctatataatcacagaactgagagatgagttcttcttcaggaaagagatgttcggtgaggttgaaagttgaattgacggatctgaaaggaagcttatagaaatggtccatccggcagcctgcttgatgtctgatgaatagagacgatctatgtgttgatcgaagtcggccaaaagagtcgagagcgatggagagtgttcccaaaaggaagagcggataacatgggtgactaacctcaattgcggctttaaagtagacacacccttcaaacaaccccacctgggttcacaacacacccacacacacatacatgtctggctcatcagacacgccgatacctaaacggccactctatgaggaatcatctcagttcaaacactggcggttctctcggtcaaagcttgatgaactgcgttcagcattgaacgagcgttcgattcagatcgttcgcgagaacctcgaggaggaagagaaagctcgtgcctctacttctaccgataccaacgaagttgacaacccaataaagcctgctgctctggccgtcgatactcagtatttgagcacagaggatgagtctctgctcgtgtctttctatatctcgtcaatcccgaagacatgcgcagggttcggtcttccggaagtcgtcgaggcaacggcgatctcctacctaaaacggttctatctgtggaacacatgtatggactatcatcctcgtaaagtcatgttggtcttgatttcttccgtcttgctgttcatgttttctcttgtgtcatgtatgaaaaatgaattgacatcaaacgtaattgtggaacggaactatcgttgaaaactcaggccagcgtgcctgtttcttgcgtgtaaaacagaaaactgcctgattcccatcgacccgttcatctctcggttctcaaaactcaaatcagaagaaattctcgagctagaatttgtcgtcgcacgaagtctcaagttcgagtttactacttggggcgctcacaagagtctcaaagggtttgctctcgatcttcaagtatgtttcgaaagagagctcttcaattctccgtgttgttagattgagaacacaaaagctgattcatctcgactcttcttccggttctactatgcacagacacttccaaacacaaccctttcgacaatcaataacgtcatccaatccgctcaacctctcattcaactttcccgtcagacagatctcgagctgacgtatgcaccctcgcagatcgctctcgctgcgcttcaccaaatagatccagttttgactgagcgatacctatccttcaaaagggagccaccttcgtccgtagaacctggggtcgaagcagatgggaaggggaagcagaagaaaccgttaccggttgggactgaagcccttcttcagatctttgaggagataaaagcagtgtttagtgagcaggcgaagaaagtgttgtcgatagagcggtcgaaggaaattgatagacgactaaggacgtgtgcaaacccggagctgataaaaggcacagcattgttcgtctcgtttcttctgatttctgtttcttcagtgatgtctctacctatcgattcttttgctgcatgggtcctgagagctcattttgggtcgcttgtatttcgtccgcaatgtctaaatctctcaaacaggtacgccaaacgtaaacaggaagaggaagcccaagaggctgagaagcgacaaaagaaagcggaacgggctcaagctagcaaagcatccgacgaagctatcttcggaggtgatcttaggacaatccctccggctgattctgctccttcagaatcagcatttctggatggtgagcacagaagtgggttgtcagaggtgggagaaccttcagcggtcgtagagggcgcaacgattgttccttttgatcatgttcaggaccatgttcagatacaggaaaccaatggggcatgaccgtgtttcgctcagaccaactctgtggatcctagaggggaataaccgtcccttgcaatatagagaggggaacgacgacatatgaaaaatgcaagcagtatgaatataatggaaataatttgtaaaaacaaaactgtaactaaacacggaacgtaaagatggcatgatcatgttaaccggatgatcacaaacatccagacccatgcgagacagactacaagacaggctccgagtacaagccaagtgtttgatcgccctttggttgaaacttggcccaatcgagtttgggatcctgtcaactttgaaaagttggctgtagacaagtatcaagtttaatcatgcacaatccgttcggcaagatgaggttagcaagaaccttatgagagagcaagaacgacaagccgatagattggacaaacactcaagcaaggccgcgccttgttccaacaatggtttctccgcctcaagtgatgtcgagaagtgcaccgcattcttccggagctgggccgccatctgttacatagacacgcccgtacatttcagtcagtcttcacgtatgaacgctctattcagatcaatagcaattgagacagacctgagcaagctgttcagttaattcgtcctggatcttgctgctactgccactgactgttccctgtccgacaacagcccttgctccaccgtctgtctctgcagcgtccttcttctctgacccataaccaagtcgatcccacgatcctcccaagagttcatctctcatattcttcacctcttggtctggatttagctcggttccagagggcaaacctgaactcgagtgtgaagggaagagatgcgattcttgctgttctttctcgataatctctggcgaagcaactggcggcgaggaaggcatgacagcattaggttgggacaacatcgatgttggattcgagagagagttcttcctagtcgcgttcgagagaagcgatgctgttctgaaagaggccgaagttgaagaggtcgaggccgaggaagcgcgagctgctgccgaggacgaagaggatggtggaggaggaagactgtatgtaggaatgggagatattggcggtgtggtctggtatgaaggcagaaatcagtcgaaggttttgtctccaacttcatgaagaggctcaagagaaacaacctaccgattgggcaaggatcagactcatagaaatcttattgagtttggtctcgaaggaatcatatattgagctattatcgtgaagaaagtatctcagtcagcagtatgaaagcaaagatcttcctcagttgagcgatgacaggttctacctatcagtcccatcgccttcggatcgaatgaccctgtcgagcaaatctcttgcatactttgcgtcctataaaccgagtgatgtgtacaattgagcgatcaaccaacggatccaaaagaacagttcatttcattggaaacaaacctcgttgagttttcgaatatcccagtaggacttcccttcgagtgacctactactggagaatgtctccagtcggttaagaagtctaaagagattgactctatcgtgggatgatgaggctgaggacattgacgatatcgtggctcacaggattgattgaagacacttcagaatgaatctaatgagatgtcgagagaagcaaagcagagttagggttagcgccaggtgtccatatggttacgcgactttcgaacgcgcattcgtctcaccgcgtaaccagtgagcattacctaacgtggtaagatccggttacattacgtcagtgcggagaattatttactacatgcacctcgcttacttgccgaatcgccgaggtcatcgatatagccgaacctatccgccgaccgagtcgttaaaccttgccgcatcgaccgttcatgcctcagaatcattctgaattggtgcaggtttatatcgtttcgtggatcgatcttcggtgtcagggatgtgacctgagggttacacctcagtaaccttcttttggttctgttgtttctcctgcctcggtattcctt

SEQ ID NO: 958 - DNA, 26547 bp, Xanthophyllomyces dendrorhous
cattgttgtatcaaccttattcatacgatttccctgccttgcgctctcgtcacagtcaccaagctagagagcctgaacttccttcttgccagccctattccctgcctggttacattcttataaccttcccgttaccctctgaacccggaccctgacattcggtctcgtccgcaccattttttctctctcatgctctctccaattatagctggcgaatggttagccgagcgagaaaaccgaacgaccgaataatcggatgaacgcttgaataaccgagtgggacgcaacaaatgagagttgagaaatgttagggagtgaccgacccttttaggacgagcaactgggtgttgagaaggacagtaagaagaacaggacggaacttgagaggaaaacattgtgactcctacttgtgctgatcgttcctgccaagtctggtttaggtttcttttgcttcaacataaggcaaggcgatacgttcctcttcttcctcttttcaacgatcaccgagtaatcctggggtttcgtgattctgtttcttcttataacctgatatcttcttaaatctatttccccttcttatcatcccttcatagccctctccttcacttcctctctctctctctacaagatccttttcaacatgggtctcaaagcttcttctgatacggcattatatgggtttgtatctgcgctttgtccacttcttaatctcccggacgttttccttgttgacacgctccgttcataattcgatccttagctacgttccaaccgaatgggtttgcatcgtctttgtcgtcgtcttttcgttgaccaccagtacgttacttttacgcttcttgatgcaatgctctaacgacattactgatataccagatatcgacgatcgatctagttgttcacctggctcaagctatgcgatatcgcctcacttggctcgcccttacaattgtgcctggagggttgctggagatccttggctggagcgggagactctggaacgccatcaaccctcgtccgttgtgagtgttcctagtgtattccttatctgccctatgtatcggcgtcttaacttccagcacttatccgatacatcttacagggacgggtacctgatgcagatctgttgtttgatcctcgcgcccggtaagtcgagcagcatgaaacctcagatgctgccgcaagcatcgctgacaaatctctttttttgctcactcttgcgcgacaaatcctagctttgatcatggcctcgaactatcttatccttggtctgatcatcaacaaacttggtatccagtactctaggatagctcccaaatgggtgagtctctcatcatgaatttctcaagtatatcctttgcgctatctgatcgacctgatatcgttccttcgacacattcagtataccgtcattttctgctccggagatataatctctttgatcgttcaggctatcgggggtgcctctgccgcgattgctgtacaggacacatctctcccgagaaaggatcccgaaaagggagccaagttcgtatctctgttccttactgctcatagatgttcaaggctaatccttgtaaccaaacctgtaatctcaaggatcatggtcggaggtatcatcttccagatgtttgtgatggttctcttcacagcactcggggctgaatgtaagagcttcagagctttttgatctcgtttcatcgtcacattcatctgaccaaatgatcccttgaatcagtcctcttccgctgggctacaaaccgtccattcgtccgaacgatctcttccgagggctcgtctgatcaggtcgacgaaagtccagggtctgccctcaagcaaagtcccgagaaaactgcctcatctgaagaggccgaagtagagcgctggcgacttctgttaatcggccttgccggaagcactcttctcatctttattagaagtatctacagaactatcgaggttggttccatagtgcctttttccccctttaggataaatttccatatcaacatcttcaaatgaaatcccgctaactgatgtttggtttgtcttgattttgaacacagttgcttgacggatgggtacgtttctattctggctactcgatcagattatgagctgagactaacatctaaaccttctgttgttgcgctctctagtctgggcctatcatcagtaaccagcagttgttcaattgtctagacggcatgatgattgctcttgctcttatccttgtcaacttcctccatccaggacttcttctgagaactaggacgaacgcagtttcgttgggtatgcgcaaaaagaaatcttctgtttaagatccaagacacatcgaacaggttttgatttgtttgtttctctttctctttgtctctcttgttcatttcacctaaatgtttttcgctgtgtcacttagttttcgatcttccctcttcccctaattgctcgctcttttgtatacctcctcttctatccgaagcacttatatactcaggacttactgtcgttatatctccctcccttgcatataaaaaaaaatcttatcagactgagactcaaagccatatctggttttcatatacaaacactcttattaacgatcagtacgcaactaacccactcagcgagttatcttcgttttgatcgtgatttagataatcacccgcgtctaaaagatgacgcgtccttgaacgcgtatcgtcagtcctttaattaagaccttcatccattgaacacccgactcaaccacttgtaatcgctcttcctcttcaaatcgagtttgtcgttgaaagaagatatcgcctgaacccttttgtcgaaaacctggttcgagagttctatccgtttgacaaacagtaccactgattttagatatattatggggttcgtcgtgtagaaggtttgaattataatcgtctgcttcaaggtaattaatgctttcttttaggtcggagaacggcgagaaaccaagtgcaagaactccaaacgagaacgaatcaaaagataggaaaaggttaacaaggaaccaactgattcataaactcgtacgctcagagtttccagtttcctccaaatcaacatctagccatcgtctcctcgatcgtgctaatgtttcgttttggagacgataaaacagatcacaacgaccgacctaccatcaaacccaataacgcatgcctcgagaccggttgatgttgtcgtatcttgctcaacaggtcatcaggtgtcttctcatggaggcggaaagaaaagagcagagctaggaaattatatgaaggcgagagagcagaagatcaagaatcaggttgctgggaaggtgtgtttcagttccaatcttccctcgagtaggatcaaagccaaagagttgaccccgttctcctttgtatgttaactaaaactcatacaattactggggtttgaattcgagatagaagaacgatctgtttcgaggtgtcatagcttggatagatggttatactggtccgacgatcacgaacttggaattgaaagaccttgtgcattctaacggagggcttgtcgcgtgagtgactcatttcttcacagaatcttcttgtttctctgattatgctggtactaatgccgtccatcgttctcaagcatgtacccaggaaaaaaagtaacacacatccttacagccgcttcactttccggctcgaagacccatgcgctgcttacaaagacggttggttggaagcctgtcgtggttgatccgatgtggatcgttgaatgtgttaattctggcaagagaatcggatctgaaaagtggaagatcggagggataggggtggtacgtgtcctttcttctctttttctcctactgttctctttcttcgttgctctgagtctcagtaacatgaatatcttttcctgcagaaccaaccgtcgataggtcaatttatcacacgtcccggttcaacttcttcatcaatatcgaaatctattcaacctcgtgcaaatttaactcggccttcatcacgtagtttgtctgtatcatgtgcatcaccctcgtcaatcatttccgaccattcttccacagtaccagtatggacacaaaaacgaacatcgacgtgtccctctgtctgcgctgatcttgtaaaaccagcagtagaagttatcgacttgtgcgatagtgataacaactaggagtctcgattattacgttggtatcgacttggccatagatcacgtcttctccttagtcgtatgcgcgctctggtgaccgagcggtagtcgataacgttcttctttcattacaaattgccagctctatatctcaaatcttgctgtatgattattgtatacgtacgttgattactgctcacagaattttaacttgaggaggtcgacaaagtatttgctctgaattgattctcccacccgtctgtgagaagtcatcaatgtcaacgttattgcgctgatagacagaatgataagatgctttgtttgctgtcacaaaaaagcaaccgacagcacacttcttcttccgtcccatactttgctcgacaaccataacaatgtcttcttcgaacaaatacccattctaccagagttctacacctctcccggcctcatcctcaagtccgtctttacatcaaacggccttgaatcctgaaacatacaatctagtcccttcctctccctatcggactttcaattcatctacacctctacgttcgtcttccccttccttcccaatatggccgagcgataaatgggtttgtggacataaggcatatgaaaacaagcttctcgaggtatatgcgaccttcgagattgatcccatatactccgttcacaggttgtgtgcaaaagagcatgcacagaacgtgcacctatcgatgggcgcacagcgtgtggacggcagaggtctgtcagagaacagcataaagaccaccggacgagatcctacggttgaagaagagagaaatgtagtgtatggtgagccacgtgttaccaggttgtcgttcacacccttgacatgataattgcgacaacaaaatcaatctcgtcctctgatcatctctctgtctttctgtctttctgtctttctgtctttctgtcattccattactcagagcgacagccatgcactcggacggacttgaaccatgtggcatccacaatgacttgcgcgttttctatcgatcgggcctcacgtatatatcctcttgttaagctctctgtgaaaaggtacaccgcgctcagacaaattcagattgaagagctaggaatattcattgaaggggagcagagtgatcagggagaagaagagatacctctaggatggattggagaagatataggagaaggaatcatcaatctcttacatacatatagtcttgcacatagatctgatcacgcgaaaatccactgattgttcgagacgctcgttaagcatttcaatgaacttgatgtatccgtcactttataattctcaactctgcacatctcaatagattgtagaagattaaaggctatatggacacgagatagataagaactcatcagataatcacggatacctacggaaaggaaaagaaaaggcgatagaagaaacgaaggacaattagataaaatatttccagaacgacaccgcatctcgtcgtttcaatctacatcactatcaggttgatagagaaggcgattcctaataaataaggaaatagtatagagagaactagcgcggctatggacgggatagtgaccggaggggctcactgagttcctccgggactagtaaaagataacccaaagctagaagtcggcttgaacggagggggcaatccagtcatctgaggagcaagcggagcaggcgagcccgagttgaatgagccttgctgcgaaagacctgggttggtggaggtgaagaacgagtctccgaatccagtgttgatcgagctgcccgttggctgaggggaactcataagcgaattagatcctaaaccagaactagaaccgaggaaggaaggcgagctattcgaggtggacccattggtgagcgagggaagggaagcaggcattgtggactgtctgaatgggttgggtgctcccgtcggctgagactgcagatatcccccggctactgagctagactgaccaggaatttctggcaaactagaaagcagactggctccgaaggacgaagaaggtttgaaaggctgcacggacgagccggcaaatccggtcgtttgagctcgaagaggttgttgctgaggccggtgaggaatagaagatgtcatagaggaggccgacgcccccgtcggggctggttggttgatggcgaacgaggaagccaacgacgacatgtcgtttgagacggacgatgattgctgttgctgctgtccctgtccaccgaacggctgctgctgttgagtagcagattgccaacttccagaggccaggtcattcaagctcgggccctttgatccgcttgcttcggccggtttggagttattaaacgcaaccgatggtgcaccaaacgggtttttactatgtccgttcccggtaggctgggataaaagtggtgctgatgccggtcgggcgaacggattgctgcctgtctgttgaggctgaagcggcttagcctggttcgattgaaggaaagactggccatgaggctgctggattgcgccggttggctgcgactggaggaaagaaaacggattagactgttgcggctgttgttgcggagatggctgagacagaaagtcgaacggtgaagtaggttgttgctgctgttgttgttgttgttgttgctgctgctgcatctgaggttgtcccacaaatccattgttagtaggcatgggtgccagaggaggagcctgtccgaaagaaggaaatccagtagcctgaggcgcgagcatgctctgtcggaaagggttgaagcccgtctgctgaggttgaaggaatccctgttgctgctgctgctgctgctgctgttgaggttgaaattggccaaatcctccaccgccaaaagcagcgaatccagtttgttgagcctgaaggggcatgagcccaccttgcggagggaacccggttgcttgagggaacagaggctgttgctgctggatgattgcggagaatggattgaatccattttgaatagcaaagctttgctgaggattaaactggttgaaactgagcaaatatgatgaaataaattatcaggtccctttgcatatcttaggtgaagacgttcagctttttacggggaaagacctactcatttccttgggcgaactgtgcaggtggttgaggttgagtttcttctatactggagaagaaatcaacaagcgcctggtcttttgatgaggaaggcactgcagttgatgaggccggggcagccgtggtagatccggatgaagcagtgttatcagcagccgaggtagtagccgctgctttgttttcatgataaaaaaaatgacatcaagacccggaccagcttggaagagaagaattaaattggcgtactctttttcgtgaccacctttccatcggctacgtctttattctccttgtattccattcggttttgctcgaaatttggatcatctatgtactcctgtagagctttgactaacgaaaccggagcctgaatcattttaggcaggtcatttatcagtcttcacgcagttttggccaatgtaggattgaaaccataactcacatgcttcaaatttggtattggaacgtcgatcaggctatttaagtctcttgcatgttttaggaactccatgacttgtttggtctgcgagcagaactgtttgtatagctcaagggcctccttcgcgtccttgaggttcatctcgaagtagtgctctatttgaagaaactctgtcagttaacgaacgccatatcaggggaaaggttcaactcaagcgtaccgagaaggttaataattccctcatttccagcttggaacaagacgagaagatccttgaccaccattcggaacgcaagaataacacactcgtcctgtttgtcttggtgatagaactgaagcaaagctgaaggttaaatcttgtttccacagaaccaaacaacgatatggagagacaaagcttacttcacatcgaacaagcgcgtcaatgattttctgaacctgtttcgtttcctttagcagccctctctcgacagtcaaagacttcaatttccgagcccggtctgtacgataaaaaacttgattagcaaaattcgttcaaaggcgaaacatgcacataactagttgagtgcgcgaggaaacaagactgaccgctgattccttcggtttgactccggtagatactcgctcggttgctctcggcttgaacccgaaccatatcgtgtctaatctccctgtacgcggtgattcgtacgtgcaaatagtgggcgtagaacgtcaagataggaccttgagtatatcctgtgagttcaaagagagggagagtcatgggaaagacgcaatcatcgcgtgagttcgaatgaatgtgatcacaagaataccagacgatcaacaaatgtctctccgatgaagggacaggaccatttgagtcaaacgtaccatcccaaaacgttccctgaccaacgtttttcaaccgaagtgtgtccgatctgctgaggtagcctagaacgttgtcggttcctccagaccggatcatagaatggatcacaaggagagacttaaagacgacgttcacgttgggctcccgtaggtgccgcgccagagcggagcacacgtccccgataggaccttccggattttgtgtgatcaagaggatcggactgtaaaaccagggatcgaacgagagggtctttctgtcagaaagataaacttcttgaaagagtcacgcgtctatgcacatagagaaagggtaaggctgactcgagatactatgacgatggcaaggaaagaaaaagaggagagatggataagctccaactcgacttgatgacgcactcggatgaaaatcgagggataccactcacttttggtttaggaacccccttcttagctgagcatgctttctgtcaagacggatggatgtagacgagggagatgaatgatcacgtcgagtccaaaaagaacgaaacaaagaatgttagagacgaaaagagatgggatgacgcgcgaggggctaggaatgaagaccgagagagaaacatgacctaccttgataagcttttcagacgacgtgtcaggcatattcagctacttcgaaggtggatgcaagactttatacagagccagatagacaaggatgaatcaggcttcgatgagcggattgagaactcgagggaaccgacggggccggtcaaacggtacaggatgggatggaagtcgacagtcagaaaagtgaccgatttcttttcggtcgctttctccgctaaacccatcatcatccagccccagaccggccaacgctcatcatccgggccagctctcgtccttatacttgttgtattcgtctgtgtactcacttgggatacgcacataaatctcacatatgccctcttctcccggctcaccctcgtcgtcttcgcctcagagaccattcacattcagtccctcgcctgatccggatatccccgactctgatcttccagcatatagtccagctgctacccagttggatcctaaggattggaaggtaggatgactccgtcaaaatatagtcttgatctcttcttcttcttcgtcttgtcattgagaccccttcttctggatatacagatctatggagcatcgccgttgaacaggccggtccccgtagttagctgtcaggactgtcttaaaccgattcttcggtcggctattgcagaccatcatggtacgccagtctttctatcggcctgccgacctattcggctcatgtcgctaacacgtcgctctctgggtgttcttactgggctcgggaaacctagttatttgtcaaaagatcctgaaaggcctccatcataccataccgaaagtagaaagagtcgaggtcgaactcccatcatcggatgcccggaagcgacgcatatctgaacgtcagtactcttgcattctatgctattctgttctccttgttcatgtgcttatttcttgcgagctctccctactcgccaatatgaggaatgaacagtctcccaatcccctgcatcgtcttcctataagaaaagtagagtagaagcttcttcaccggctccgtcggaagctccttcttcgacaacaacagccacgacgaccaagtcatccgcattggacgccaacggtgctcctaaaaaggaaaagaccaagaaacagcaggagaaagaacgcaaggaggaaaagaaaggtgaacccatgattccctccggaacttctgttgattatagattgtatcgaacctaagtcttattcactcttcttgcttgaccttacgtttgggactatccagctatggcaattgatctgagtcgtcattgcggtgtcatcaacgccaagaatcttccttgcgttcgttcgttgacatgtaagtctcactcgatgggcgccaagcgagacgttccgggccggccgaagaaatacgacgtccttctcctcgagtggaacagagcgcacaacccaaaattcgtggagccaaagagtaagctgaagaaagcgttggctggaataggtgaatccggtcctaccggtgggtctggttcagcatcgggctcaggtggaggtaacggcctctccgcagacggctcgtcagctggtttagatggttcaggtagtggaaacactaatggaaaaggaggaatcgatggacaggacggttccaagggatcggcagggacatcatccggactaaagaagaagaaaaaggcgaaatcgtcctctggtcctgccggctcggccaacgctggtctcggcggttcttctagcaagacaagcaagaaggacggagggcaagatgacgaagagggggaaataggctggagtacagagttggagctgctcatccgttcagccaagacggccagagccaacctatccgctccctatcgattcacgtcccttggaatatctaatccatcatcagtccaatcaacgatcgcaccatccggtcaccctcagtcagatctcgtactccctatgacaggcgtacatgatccctcagctgatccgctgttgattcaaccatcaaaacctataccgctcgccgtgccgatgtcaatatcttcgtcatcgtttggtggtcgatctccattcatcggtcttcctcgggaaggaatgaaaaccggattgtactcgaggaggagagaagaggtcaaacgtctcagcgggctgttgagcttgattgggtaaggacttcgccggggagcgattctatgtatgtttatctggctggtccatctatcacttttggttcagacttcggatcttcgatgaattaaaaaaaaaacaaagtgaataaagtctaagatgatttgtcattgatacagaaagcatgaacggagagtgaaagacagagagaaaggaagaagaatgtgatacgggaagaaagcctggtagaacagtgtgaagtgattgcacactgaatatcagagacgtgggatgggatcagtgtgaaaagagaacaagacagcattcgaatgtcgctatcggcaacgttacagggagacggtaacagcgattctgaaaggaaaatgggaagcgggatagcagaagatgaggtgaaaagattatactgaagaatggtattattgaactatgagaatgagatgggaaatccgaacaacaaaaagcaagacagctttgccgtctaagaaatttccagatggagagaaagagaatagagaagaacggagaaagaagaaatgtgagaatatgaagggaaactgtttttgttgaattatatggaacaccgagatccgtacaaggtcaagagactggcgtgaacagagagagacagtcgaaaaagaaaatcgagtgcacaaggcataaccagcggacaagtgacttgtctaaaacatatcaacgtcctcccccggcttgcgtcgaacaccacgaaccataggctcgtcatcgtcgtcatcatcgtcgtcggcctcatcatgatcgtactcatcgtcatcgacggcgtcctcatcgtcttcgaatgcctctccctcctggtcgtctttgattaggactccctcggaacccacctacagaaggacaaggaggatatatttgaatcagctttgccttcaagcgagcaagaaagaggttggaacaacccagacaaaatctaacgaaccatcattgactctccagaatacgtaaatcctctaaagttttcttgcacactgctcgtcaaaagacttcctccggccaacggattcgctcctggcctcgacagccccttgatggccatcggtgcacccgccttatcaaagccaacaaagtctcccccagtttcctcgtcctcgaatgggtttgctttcgacatgagagtgttggtgaactcaggatcaaagttggcaaccgattcatccgaatcaacgaccggcttgaagggaggtgtcacttgtttgtgcgcgagcgcgtgccagtcaatctgcttgaagaacgcgtgctccttaagctcggcagcatcccgagtggcacccagtcggtgcttagggtttcggttgagaagctgagaatgtggatacaagtagaatcaaatggatgatattagctgagttataccgtctatgtcagaacattttgatagagagaacacgcacccctttgacgaactgctttccgtcgtcatcaatcactcctcgagggaacctgatctttccaaagcagatatttttgtacatttgctgagtatcttctgcaaagaatggactccatccacaacacatctcaaagaggagaactcctagcgaccagaagtcgacgagcttcgagtaaccattgtcgtctagtagaacctccggggcaagatatctgaaagaagttagggaagtaagattgtgtcattagaacgggtagtatctggttcaaccatcatggcaaatatgcgcaaaactcactccgtggtaccgcagaaggtgttggtcaactgatccgaagctagatccggcttggaaagtccaaagtcacagagcgcaatatgaccggtggcgtccaagaggatgttctcgggcttaagatcactgtagaccaccaaacgccaggaacacgcaagaagactgttcagttggacgttcaaatttctacgttgacgggggaagcagaagaataattaccgataaacgatatcatatcgatgcaggtgctcgagcgccaagaccaactcggcgatgtagaacctagctcgctcttctgtaaacctcccctccttctgcagatgccagaagagctctccacccgatttgtagtcggtcacaaagtacaattgggtggccgtctggaaagagaatttgaggccgacgaggaaaggacattcgagcgaggtctgaagaatcttacgctcgccgatagtgtgagcgacctcctttttagcaacaatctccttcttagaaagaactttcatggcgtaaattcgtttggtgtccacttttcgaacttgataaacttttccgaatgttcctcgcccaatcaatgaaagcggctcaaagttggttggcttgagatgaagcttggtctgtgtatagacaattttcaatgttagatctatcatcaccgcgtttttcttctctaatcacgtcatgacaccgtgtggaagaattaccttttcggcagcgtcatatcgaatgatcagccggacctctcccttgccgacttgctcatccgaccgaccttccaatctatgttcacagagacccaagtgaacacatcgttagaaacatgtgtgcgtcatgctcaatataggacgtttactgacttgaaccattggtcgaccacgaagcccggtcggcaaaccgtgctgattgctctgatgccaaggaatccctcgccttgttgacctcggtcatagaccgtcatatacaacaaggactggtcggaaacgagatcgctacagagaaggatatgaggccaactcagtttgatggccgacaccaaagaaaaatgacacaaagtaaaacgttgatgcttacaaggtgacctcatgcttccataccgggtcctttgccgatgacctgggtgtggacgtcagccactcagtcttgccagcggtgccagccttgggtgtggttgccccattctctctacctcctggcagggtcaatttaaccttactagagtttctacttctcgctgcgagatcaaacgcccgggagatgcttcccattcccaaaagcccaccgcctgccgagggaggtccggctcctggtgtagaaaccgggtgacctttcaccgcaggctcgtcgtgagactcgataggatctctagacacgaaatcgtttccctcgaaagagagtacaacgtaagggtttgcagttgcctcgccctctggaggaatgttaaggcgacgaccttccatcaattttatcgttaaccgacctcttgggtgcgagcctggagaaggaggtcgagagacaggcgtattggcaccaaaggaaacagccgtcggagtcgccgagggcgacgggttaagggagaggccctggaaaaattgggcggtatgaaatggaggagccagatttgattttggggatgccggttgtggagtcgttggcattcggcggagcgggggagtagccgttcggaaatcaggagggtgaatagagagagaggttgtgggaggagcagtagtggttccactagattttccgtcacaagagatacggtcatgtggacgaaccggatatgagaaagcaagtagactcaatcagttctgatatcagaaaaacgatgtgattgtgtggtgtatggtcggtgtgaaaagatatcaagggtgaatgcaagatgctgagagctgtccagcaatctcaacgatgtattgagccaagtatcctgcaagaagcaatcaagactgaattgatagcagctttctgacacgccaactcaacaagccagtctaatgatccgtgctgcatatctcgatatgtagaatttgaagagattaaaaaggaaatttgaatagaacacgcaccttttggcagggttgcccctgggaacggcgaattcagtcgctgttggagttcgcagcaggctcggcgggtgggagtgttggagttgcacttggtgttgttggccttgcgatggtactgccgttgccggagaagggaccatctgttcgaatggattgacttgtggttgagcggatgccttgggggtaacctaaaaggagagacacggggtgacgagaatgaggtcgtcaacgggtgatcggaaagaagacacagaagagagcgaaagatggatggttgtgatggatgtgacgtatgtgcaagggatgtggaggacagaaagataaagtaaaccgaaagggggaaacgggtagaggatatgaggtgtggagttacacaggagatgatccacgtacctggtccgacgggccagacggccagaactaggatagcaaagatggaaacgaacgagaccgaaagatacgtcgtcagcatcgacgtcgaaggaacagaaggaaacaacaccaagaaccaatgcccatgggtacaaaggaaggtacaagatgaaagattgaacgtcttggatggccgacggagatttcttttccttcctacttgcttgttcagcgtgagaacgatgtgtacaatctcttttctggatctcttctcttctcttctcttcttttctctctaaccttctctctgtccttctcctttctattgaagagtggcgagatggtgtttgatgtaaagagctatactacggcatagccatacacgccgtctagtgatcatccggagggcccccaaaccaaagggcaggaacgggcaagggtggacgagggatagcacggtaagaaaaaaaaggggagagcagactcaccttcagcatggacggcactttgaaagacttgacccagttagggaaggatgaatggcaagatcaagagacaggatactgtagatggactcggatagaaggtgttcgctccttcggtagagatgaacacggacgatgtatgatcgctggggaaggcttggtctgcaaggcgggtgaggtcgtctcaatcacctgggcgtcggacgagaggagatgagggttgtgatctaggaacagatttcaatttgtaaccacacacggtcttacgtaatgagtctggttattgaccttgtaaccacattgacgctcacatcctgttccttgctcgtttcttcaacagtcaccgcacgatcttcatcatacttgactcaaccaccacagaatctccatcgggatggaagaaggttggtcgaaagttctttgatagtctcgctgttggctcgttgtttatttgttcagtcttcaatttgatcgtctcataacttttttatttttgtttttttaaataaaaaaacatctttggtcccctcgactttatagaagaagaagtctgtcgagtttgccgctcgggtgaggaaccaggcaatgctctgtatcatccctgcaaatgcagcggaagtatcagatacgtccatcaagattggtgagtccggttcaataaaaacattcgtccatggttaagtgtcatctttattttcgatgaaatcttgttcatccgtctttccttttccgttgctggatagtttgatgacctggcttcaatcgagtaagcgcaaatattgcgaactatgtggtcatccttttcaattcaccaaggtgtacgacccacatatgccatcaagtctgccaccacacgttctgttcgtccgggtcctcaaggaacttttctcggcctcgctcatcgttctgcgaacgatagctgtcagtgtcacctggctcggactcgtgccctggtgcacgatctgggtcgtccggcttcatttcttcgtcggccatggcttggccagatctcttgccggagagtcattctctctcaacgccacggtcgctaactctgaatccacttctcctgaagccaatctaccttctcttcatcctctgaacgccattcttctcctccatcccaccaccgcagctctgctcgctaagccaacttggttcgaccttctatcggacatattcgaagggcagatcatcaccgcttcaatcgtcgtcctcttccttgtcgccttcctgatgaaagagtgggtcgtacagatcgccgaacagccttttgatgaggccgctcaacaaaacccaccgggagcactcagagaccaggaggtcatgcgagagatcgccagagcagctgctcagagagaaatacagcagagacttagagaccatcaacagcagccagctcgtgccaatatcatggctgacaatcccgctgctgaagttcttgctgaggcagatgctgccgatcctactggcactcaacacgaggagcttcaagaaagaccagatggacaatcgatggaggaggaggatgaccaaaagtcacaggacagcgaggaaagcgaatgggattgggaaggcagacctactccggagcagcttcgagcactccgaatgcgctacctcgatcccatcaaacttgcagcagctgctgctgctgatgctcaagaggttccagtgcgggccgagccttctaccagtataaattcagacgctatgttggatctgggtttctcccaagacgggacttcagaaccatcccagagctcttctgttttacaacacccctcaccgcctacagctgctccttcctccttttcccatcacccatccgctgcagagcttccactacctccatccgtcccttctactccaccacacatgcctactgaacatcccgaagaacctgaaggagatagcccgatattctcactctcatctatccatactttttccaacccaaaccatgctccctcttctccgcctctggatgtcgaagaaagctcgttcgcgaacccgacggcgcttgttgaaccttctacgcagaacagccatgccagcgaaattgatgagggaaagaagcggagtcaggatagtttcatttgggacggtgcaaagtggccatccgagcctcaagatggggaagaacagcacggagagtcgagcgcacatatcccaagccatcaagacgagggtcacaacgaaaactcaagcgaggataacaacaagattcaggatcctgtagagaaggagcacacggaagaagaatgggttgacgagactgatgaagaacaagaagcagtcggggcaagagaagagcaggaagaagaggttgaaatccgactggatgttcatagggtggccgatttgattagacaacaacgtcaagcggggaatgacgatatggaggatattgctcagagggtggggctgagaatgcaaggccagccaggtttggttcgcagagtaagagctaacgatttgagagaaggcgacgaggaagaagaggaagaggaggaggaggaagttaacgacaggctgttggatgaagatctagagggacttatggaaggtatgtgatcttttgttaatctttcctcgacatttggttatcttcgctctggatagcaagaagaaagagaattttttgacgattatgctgaatggtttctttcatggcttcagcggtgggactcagaggaccctttatgactttgatccagaacgtacgttcatatcaactcaaaacccctcgccatcgaacgatgaactgaataaccaacattctccttatgaaataaataaataaaataaaacaaaatgaaccagtctgctctcatcataatccttctgtctttctttattcacgtggctatcttcatacctttcacgaccggaaggacattcctccttgtaagttgaactctgcctcagttatcatgagatacgcgtcgatatcctgacctctcaataatgttattttaactttcttgtcctatagctcgacttcttatccgtcttccgatctcttctgtatcctatccgtctagtccgaatcattaccgatcccgctgtgaagcctatcattgcggttgggtctaagcacgtctcgccaattttctctcgagtattctctcccatcatccgaacattctctgcgtcaagatcaacccgacagtcatcgaccttggtattacagtcctcatcattgagcgcaaaactctcatccctgtctctcctaaaatctctagactctgctctggaaagctttttggcatccccgtccagctctgaagaagttctcccgatgtcccgacgaaagatcgtggagcttagtcgaccttacatcaaaagttgtcttctcttcttcaggcaattaggatccagtacaagagctatctatatcacatccaggacgttcatctctacgttaccccagcgaaaatctcttggatttgctgccttagctggcgaagacaaagtgggagatcgggtgcttgctacggctgtaggttacggttgtatcattctggggttgattttctttttaaaatctcagagcactcgtacaggctggagaaaatggttcaaggacggtttgctccagaatatcgtggttatcaagctcgcattctttatggtatgtcctcataaaccattcaacaattacagcactccttcattcagaaaagagagatcagtctgatgaactgttgacgagaatttgtcgtttcaggctatcgagttggtcatcttccctctaggctgcggcatcctgcttgatttgtgcctcctccccttgttttctagcgatgctttctctttgagactggacttcatgatcagcgctccattcattggtaccttccttcactgggttgggggcacgctctttatgttcgggtttgccagcatgctctcgtactgtcgacagaaggtccgaaagggagtcttttatttcattcgagacccgtctgatcctgcgttccaacctgtgagagagatcatttctagatcaacatctagtcagttagtcaagctgggaatctcggcgatgatgtatgggttcatcatcacctcttgtaagtgaattgtcttcgctcagattcgatcgtcacacacatctctttaatgaacggttcaattgattcgtctgatattcgaattttgatcataaagctgtcggagtagtattgggtgtcatccggttgatcgcaagaggtgttctacctttgatatggataccaacgtacgtatttcatactttgcttcgattcccaactaggcctctctccaggactgattcttcttgttaccggccgcagccaaccactctcacaaattccggtagatcttctcttcatgttaatctgccttccgacgtggactcgaaagattgcgcctcagcgacgaatcaccgcttccctctttgcctggtggacattcagcatcaaagctctccggctgcaatcttacttctttggtccaccattaacaaccattggggctgatgtcgatgatcaaatcgacactagagaacgccggtggcttgattccatcgcgcttcggatgggtggggaggatttccagaaaggggccggaggactggctagggtgccgcattcggatcaactttcgatcattccgaggatgcgtatgttggttcttttgaatgagttccatgcacctatcgaccgtaagtctcaaatctctttcgaacatcaaacacggggtctgggttgacaaggataccatcttttatcgttgcggtgatcgacagaaaccgagatggagttattgattgctcagaacaagaaagcagtttctgtgggtcgacgacctgatcaagtcagtattcagtttcaaacatatacgatttccagagtccgttgaattgaattggattgaattcaattacttccgtccgtttattacgttctacaggatttctgcgtgtgctacctccctcctcgactgcgaaaccgaatcatcctcctcacgttctcgttttggctgtcgctagtggctctcgctgcattcgggctcgctcttcctatcttcatcggtcgattcatctttagcttgttcggattccctctcgttcacgatggttactcgctcatactcggtgctcttcctagctattccatattcttgaccctagattggtccgttcgattggtacttgccaaacagagtccgatgagaacgttggctagaggtttaaccgacgtgaagacgaccctacagcgaaaggtttattggattgcactactcagctatatatatgttatcggagccgtcggatcgattgttccgttggcggtgggccttgtgatcgagttgtattgcatcatgcctctcaaggtttcgtctgctgagccgccgatcatccgtataccggaagtgtgggctatgggagtccgtaagtatattattctaacctctttatctctatctctatctctatctctatctcttcactgtgctttgtcttcgttcgttggcctgatgagcgctcctgcaccttgcacttgaacccgatccacagtctggatttacctcgcataccggcttcagaactacatccctgcacgctatcgggagcgcacaataaggcctctcgagacggtgcgtctattttggctctgcttttttcctggaacgtccactgaaacagctgttttgctatccttcaaactctttcaacatcattagttcctttcaatgagcgcgaaagaagcgacgatcaagctgattcttcccacgcttatcggcttgttcgtccttacagttgtaccgtttgtactagctctatgcctcgctccattcttacaaaatccgactgtgttgtgtgagtgttttcaattctcgcccctcttcctttttcccccgatctctgactcaatatcttcatgtgattctttctcgggctccgctcgacctttcgtatcatgaagtccgagggatttacctggaagttcttgcagtggtcaccttgtttgcaaccatgggtgatgtccgacagttgatcaatagatgggttaatatggtatgtatttgcgctgccctttgcctgcattgccgtcgatgttgtctttctgtctgaccgcgtcatgccgacgaccggaactatcactttgaaaagcttcgagaacaggagtatttggtcggagttcggttaagcaacgtggacgataaaccggacaaaaaggtcgttgccaagaagcccgcgaccggagctgtcgacggaaacgtggtggcggaagggacgggggctgagtaaagggtcacaccggagacacatctatgattgtggttcattcgacatcttgtttcgtcattcatttaacagcatcatcatcatcatcattcaatttccctttccttcactttcttgcgtgtatatacaatgaaataaatctccaaaaaacgaaaagaaaagagaaaaaaaagagcaaagaaagaaagaatctaaagtcgacgtaatgtacagtgttggcagggagtcggattagagtagatcaaaattggtctatgcctgacatgattcatttctcgctcttcagtttcccatgtctgtctgaagagctaagtttgggtttctttcgggaagcgaaggaagaggtgatggcgttggaaagagcattctatcaacaggacattaattagataggttgaacatgaacgaaaagaatagagaaagaaccgttctatcagatttacttcttatatcactcgaccaatcaaccattcctcgacccagttccggcccccatttttctttctttttcttttgaaagtttttttttctcctcctttcccccccttataaactaaaaatcagacactctacaaactcatgcccttcaacgctcttccgagcgcctccaaatctgccttgagtttcttcaactctccgacctcactggccaattctgcttctcctccttccttcttttctttcttcaatccggttactttgtctccctgggttttgatctgggcctcgagagcgagcacctcaggtgttcggggaagggatgctagagcggcagcagcctcggccttcgctttcttcgccgcctggttctttgacaagaccggtgtcgcagcatcgggcgtggaggattcaccaccgtatcgtttccgccactcatcaatcttttcctccttgatctccttgaacaggtgctctgcttggttgagcttatgtccaggtaagatgtcgatggagaaagcctcgggcaaggccctcagaggtgcgttcaattgcttgcagatcgagtcagcggtgacgggcatgaaaggatgaaccaatgggccaagggcgtagatcaagttgatagtcatgaggatgacttgggcggctcgttcaggatcggaagcgaggagcgcgttgtccagcttgttgtcttgaatatactggtttccacgagcagagatcgccatgagctcgaatagacctgatcggaattgagtgtgatccatagatttaatataggtgttaagacgggcgttgatgtccgagatgaatacctcgtcaaccgcgttgggggcgtcggtgggagctagtggtccaccagcgagggaagaaggaccggggacgacagagtcgaatttggcggcgacaaatttgatgatctgtcatattgtgcatcccacaaacatcagtcaggggcactgatttgaacaaaccgttcaaaagtacggaggaagaaaatcgcatgcttactcggttgacaaagttacccaagttgttcttcaactctgtgttattttttgacacaaactctttccaagcaaacacggaatcaccggtttccggtctgttcgagatcaagtagtacctccacacatcaggtggcacgttcgtatctctcgcgttgtttccgaacacaccgacgtttcgagatttcgagaatttaccagactcgtagttgagatactcggtactcgaaattcggtgaagcatggtccaatctcgtccgtccgcaagtaaggtagccgggaaggcgacggtgtggaagtaaacattatctttacccatgaactggtagagattaacgtccttcgggttcttccaccattgctcccagtcgtcggtgtactgagcggtcaaagacaaatatcctataggggcatcgaactggtcgtacaaagagagagaaagagagagatgagttcaagatcaggtcttgagaatgaatttttcatatatcgttttcttcgggttgtgacgacttacccaaacatctagaaccgcgcgattcaagcaacatattctcatcagctttgagcgataaacatgcaagggaatatgatcagtttagacaattcagactcacacataaccttgccgttcatagccgcgtcctcctcagcatcgcctgtctctgggacggcaactccccaagtaagatcccgagtgatcggactcggcctgagaccacccttcattctggcctcgataatttcacccttcgcgttgacgacgacgtttccgtcccattcacccttttctcgggcagacttgatccaggcttctaatcggggctggagctcatcgagtcgcatgtacatgtgggaggatggtcgaacgaccaaagtatgcttggaatctcgcttgcaccggggcttgagcaactcgataggagaggcaaacgttcgggtacagctgtcgcattgatctcctcgagcgtcctgaatgcaacaaggagaaaagttgagtactcgtgtgcctaaggattagataacgaacaagagaacgtagagtgcactgacatcataaccacaatccgggcaagtcccctcaacatatcggtcggcgagaaatctgccaaggagtcgaacgaattagtcagacgaccttgcttggaacagctcactaaaagtccacatactcacctcgagcagccttcacagtaggtcatgtcggcactcttctgaaggagaagaccgttctttcggacgttgaggtagatgtcttggacgattctaaacagcaggtatcagcagataatggttagcgcgcatagttctgacaagttctacagctgaaaggaaatggagtcttactcggtttgcttctcggtcgaggttcttccaaagtagtcgaaagagatgttgaaccatctagagagagaatcaagcaggcgggtaggtaagatactttagaatttgaccaatgtacgaattcactccgaggactgacttgtagatctcggcatgaagagcagagaacttgtcacagagctcccggggagtgattccttcgtcgagcgcctagaaaaagaagagagcaagcaagaagcatgtcagtcggcctggtcaagccttgagctcatggtccatttggactcactttggtttcagtcgcagttccatactcgtccgttccacagatgtagattgtcggcttattctgagttcgggagtaccgggcaaagacgtctggagtagtaaatatcaaagatatcgatgagccgtgctatctggtgagcgaatcgatgacatgctacgaaccggcagacaaggtggacccgatgatgtttcccaaatgaggaacgttgttgacatctaataggaaaggtacatgaagcgttcaagtcagggagaaggtgcgtgagcaagtgggtcagttggtgaacgaacggattaagctgagcgagccgaggttgctcttcagaattgaaggacaggagactgcgactcacaaggaagagcactagtgataagcgtgttcttctctcccttcttgggaaggctatgatgagattgatagagaacaagagaaggttggtttgttagacgaaacgtgtgcgaaggaccgaaagaaggcaagaaagaagagagaagaagaaaaaagacgaggaaagagcgagaagcaagcatcaaaacgtacaccggaggacttcctggctgggcgatattcataaagagcccatcggctttcctgatattggaagaaggaccagtggacatgatggaggatgccaaagatgatggatgtatgcggtaggtgttgctgtccggattgaacgaggatggattcgagggatcctgcccgaaaagagaaaagatgactcggaggaaaacgaaaaacgattagaaaaacgtgtagtctgcctattagagagctttgtagtgtccaaccaagggtcgccttcaccttcgacccagtgtgtgtgtgtgtgtgtgtgcgcgcgctcttgggagctttgtcgtgttcataatgaatgtgtgtctgtcgaacaacggtcgagtagatgtctgtctgtcgctacaggtcatggctttctggtctacgcaatctttcttgtgtgtttgactcccatcgatcgagaggatctgtgccacggaatatctcacggagagaaattctttcggccgatacagggggatgcgcatacacatatgacaatatgataactttggaaaaagaccagacggtgtagaactgggtagcgagagggctctgagcacgacatacatacagtcttgttgattgattatgaaccagacagatgggtatgctgccggttggtttcaatatccgatatgatcgagtcagttcttaaagtggaggaaaagaaaaaaaaaaaaaa

SEQ ID NO: 959 - DNA, 1155 bp, Xanthophyllomyces dendrorhous
aaaaaaaaaaaaaaaaaccccggggggctacttaaacagtcaacttcttcagatcaagcatctcttccaccatcaacaacccatctaccaatcgttctgccttcctgttgtcatcatgagcctctctatgctgcccttccgttcagtgatcgctcgtggtctgcccacgatcggcaaaccagcggttcactctcgttgttcgacctctgtctccgcaggtaagcctactttccatctactttacgaccggatggggaagtgatggactcataccggccaactatgctcgccttctctccagttctccctcggcgatatcactcccagacctcctctctatgtcttggaagaaatcccgagaacggttcacctctacaaatgacgatcgatgcacttcgtcgggccggttggtccctggccgatatacccgcaagagaacatcgcatgtccgctagcaagcagttcaatgtcccaaacgactttagataccaagaccacgctcggagaagaaagctgctcgacgtgtttgtagacaagtcggaagaggtggtgagtttctgatcttgttctctcaactttgttaatcgccacccaggcgtactgatcagctatctcctccatccgaaccaggttgtcgagtccattcgaacaaaccaacatgccgtccgtgtgcatctatcggtcagcttcgctgcagtacaaaagcttgtcagcatggacaagatgtccagcatcatcgagaccagtttcttcaaggatgtctttgaggctgaatcggacgaatcgtctctggagagaatcccggcctgaacactcccttctctgtatgcccatccggtttgccttccattttctaccgtctggccgagcacgtccggccgaggattggaccggcctgtctgatcccgagaacacctcgttctccgagatccgtggatcttgttccagccgggaccaacccacacaggatgtcgaaggccgagtcaggggacggtgttttcggcgtaggaaaataacgtgaagggcagcccggccgagggtcagcgtcggactaggttgtactgggctcatcagccatgactgcacaactgtcacctggacaagtgtctgtatgaatgaatatatatgtatatctgttgacatctgtacgagagc

SEQ ID NO: 960 - DNA, 7379 bp, Xanthophyllomyces dendrorhous
tcttcttcttcttcttcttcttcttcttcttcttgcacagagcctgcggttgcatataccctccactctcgccctcgaggacatcgcttagttcgatcctggtcgattctgcatcttcccatcctgccgataccatccgcatccgtctatattgaactcaacaacagatacacgtacatacaccgcgtacatatatccatccccaccttttctgttcattcttgaagagcttttcttatggaacccccatccttccaccaaggaagtgccgctcactcgggctatggaggagagagtagcgagggcgaaggctccgcccgtgggctcaaagaatggtgggggaggttcaaagtggggaaccatacaggaaaggaacctctgggggccagcaaggagggaccatcaaacaaagactctggttcgtcctctcaggtttcgtcttctttgctcgttgcgtctggtcctcaggatgtccagctacatccatagggagactcgtatgcttatctgccctgaaatctgcactttccgtcggcttttgatcccggtctcaattcctacctcaaacacgaccctcctcttctcaatcttctgcttgcatgtcgtctcttgtattcccatctctgatgcattcagaatcacaactaaagaacaaaccggtgttcgctatgcctttaagtgaggctatcacttacgcgtccatcacaatatcgaccccagcacccgatggagagtattacgtgtggggagtcgtaccaaccgttgtggctagatggttggtccccctttattacagaccaaggcttggtctccccatagtctgcaggatcatcaactgatctggctcgcttgtcttgtcctaccttcttcgatcttggaaaactcaatcgaacgctgggcggatctggttttatctatcttgaacgaggtgaacgattagtgggaggtatctgaaagagactgcgacagaggttgagggtacattcagagtatctgggagctcgaaacgaatggccgagatacaagcgatattcgactcgccgccaaaggtatgtcgcgttaatcggttctgttcagaatcgacgtctgttcataaatctacgagtttggatgtatcttgatctgatgagcgcgctctctttaacggtctactgacaaaaagtacgggaagaacattgattgggagcagtgagttctcttatcccttcatctcaagatttgccaagcccgctgtctctacgattttactaaggaggagggggggggggctttcatccactaacatctctcgcgctattcttgtctggatctcgtgtgtccgttgtaatcacagagttcaccatacaacgcatgacgttgctaccatctttaggcggttcttaactcagatgcctgtgagtaataatcttatgctatcaaatcggtcttccgggtcgtatcattctggagatctcggacactgatgaagtcattctgcctgaaacttgaccggacaatcgttaggaacccgttattccagattcagttcgtctttgtcttcatcttctcttgttttgtaccatgtcaaatatgctctaatcactcaccaaatgaatttgtcggtcttaccccagttctatcaagatgtacgtaccttacttcactcttattttatccattcaatcagcaaatgcaggcctaaccagatgctattgcttgatctgctcagtttcgaaacacatactgttagtctgtcttcttaagtcccgggagtctgaattcatacgttacgactgacgttccgctgttcttcgcgtcgactccatgatagcttcgcaaagtcatacgccggacgtggcattgaagacgtacctcgaactcgtagaacgactacctataccaaacaagtatttgctgctctacgtgcttgacttgctgagcgtgtttgaaaagatatctgagaagaacctcatgaatgctgctagtcagtagtcgttctatctgttggttttaacgaggaagaagaacgctgtcgctcataatgatgttttctcgtttttgttttgttggctgtcacagacctagccgtaatcttccaaccaggaatcctatctcatccggatcatcatctaatcccggcagagcacgctttgaatcagaaagtagttgaatttttgatccttcaccagggggaagggttcgcctcattgttggtcccgagattagtcaagaacccgtatcgaacagaagtatgcacaaactacctaatttctcttcgcgacgcgttgtatttcgactgatcttcttgtaatctcatcaccgtctaaccacagtcgaacatggcaacatcgtccactaaatccgtacccctgcgccctgtttcccctccaaaaccaaaacaggtggtcactcgaccacctatcccactcgccactcgactgtccgacatctttaccgcctctgattcagacgaagatttcgaaggaggcgtcgtcgtcaagacgaacgtacccttctacaacactcacacacttctcaccagatcgaaaacgacggcaggagcaggaggtaccaaacgggtacctagcggaagtcatcgatccaagcaacaaggaggaacgacgtcgaccgaaggcggggccggggggtcgaaatcgaggataaagatggcgacgaaggatgatctggcaacgacgaccaaggcgttatcaggagggatgatgaaagacaatagcatcaacccgtctggtccgtcatactcaaccccatctggacccctaggttcgcagacaccctcggcatcgggagcaacagtcagaaggagaagcaccgcaccatcgagaagagtcgtttccggccaaagtactactggtacaactgaagggttgggaaggagaaaggtctcggggaaaactgcacagccaacattggcatcgacatcgccagtactttaaccccaagagccgcagcagcagcaacaaccaccatcggagaaacaacaagattccacaaaactcaaagaaccaacaaagaaagtcattctcatctaatctttcactcagtgacatgttcttcccttatattaccaccttcttccgtcgtccagttagtatgacaccttcctgttcgtggttgaatatatacctagcctgaagatttcatcctgtttacacgatgtgaatcctctgccaaaggactatcattctagctcagctcgcttatgaaaagaacaccgatttcctagtcttggactttacttttcatttaagtctctatctaccaagtctcacttaatcttttggtcatccgtactctatctatttccccttttttctcatatcgagttaaatccgtttctctctttcgacttctttccatagatgtgttgttcttctcactcattggtcgtgtcttaggcttttcgttctatttctttttccctctatccagatcgcttgttccagtcggttcatatatatgctcatcgacgtttgatcctcaatgggaaggagaatcccaacaaacaagaaaatcccttacgaaagaccgactctcatgcctcgtctgatccttgttctcaccatcaagttgaagactctaggctttgacgactttggtccattttctgggaacgcccaactcgatcaacaaatcaacgatgagtttgtcatgcgttccctgaaccataacttctgaaagggtggctttgggtgatgccgattgcagaggtgagactgttccgtcaagtgacatcagcgatcttgtgtgccggaaggaagagtgagcgggaagattcgtttttttacgtacctgacgttgagccggcacataacttcttgagactttccgagaacgctattcaccaaaagccaaagcgaacaacaaacgtgtttctaccaagtcagcgtgtcttctctgagctgcagcaaaaaagaagaagaaaaagggtataggattcttccttactcttgggttcgatagagaaagtctcgagaccggaaatcaaggtgatatgcttgttggctcttttctttttggtaatcaataccggacggagtgaccctgccctgtgatgatggttgaatcatagttggttgtttgagtcgtgtattcagcgagatagttgaggtagagacgaagaaattaaaacgaacttgagagccccatcctctcctagagaactcagagcggtcattccatctctgatccggtcgaccacatcaaccttcttcatgaaatcgactttctctcccttcttgagacatgcttgagcaagcgtttcgtctagattcacaaacgcctgttgaacgggatgcgtcaagttggcgatagtgatatagtcgaggacgtgagtttttatctctgggtaggtgagcgtctgactggatctgtatgaagggagatcaaaggaagcacaagaatatcagatcagattgcctcggacaaagatcgagaaaagagagaaaaataagaggcctgacgagatctctcgtttcgtccaaaacgcgacgttcttccctgcaggcctgaaaagctctttcacagtcatcgttccggcctgcgtcgtgcctgaggatccccctggtccagggatggcggcagtagcggcttttttcttttctctagcttctagttccccggtggtccggtggggagcgaacgtggagacggccgcgtggttgacgtcgacggacaaaataagatcttgatccttctgagactttgtctttaataaagactccttctccatctgaaaatttgatgcgacgagacgatagcgtaagtaactcaacgatgtgaacggtcgttcagggactgaagattagatacgaaccgccttgacccactttgagactttcttgaaagtcgacttctgaacgatggcttggctcgaaggtgcccataccggtctattaggcagtaggtgtttttcgtaaaatgtcgaactcgcgataggaaacgtcccagggggaggaggattttctttcaaaaccgtgatcaattgaagcagcgccaaccggagaattgtgtcgacctctactccgttgtgagtgtatagtacggaccgaaactaatggttagcttatgagattcgcgcaatatttcatttaaccctagaaagaaagactggatggacctgtggctgttagagtcggttcagaaggcgctggttcgtctgttttcgacgggctaggttccaagctgacattctgtatctgagagacaatctgatcagttccactcgagggaacatcttcttcttcagattcgaactcgtcatcggatcctggaagttgaaacggaacatctgccggtgctttgcataagttccaaagactattgatttagaagataaatcagaatgataggtgagacagctggaagtgtatggagacgacctggtgtaaacgaagagaaaatccactgacgggtctttccaacagtgaaccatctctactgccttccccttcgttcccctcttgattaactttccatcgagcgccaggtaaccgattcccagcggaactttgcaccctgtcgcccagaccgctatgagatcaccttctttcaagtcttcctccttcaatgagtcggccaatccaggcatcatcagatcagctccattgataagtcgtgtgatgacatggggatgcgtatagatagcagggagaagagaagggtgttgaatcaaggtgtgtaacgatgggattagcttgtcgaatgacggggtctttccaaagacaaaccacaggggagtggaaggggtcgatgaaggggagaagtaaagggtctttgaatcgatgaaacgaagaacattgatcggataccacataaggttataccccgagtcagccaaaccctcttttaaatatcataaatctgatcggaggtgaagaagaaagtacttacccctggagcatctagatgggtcagaaacttggccgcctggattccttccggaacgagactctttgcttcgtccggactgatgtcaaattgactagctacagcggacacaatgttccttcttaagctggatttgataggcgcatgagtggagatacttgatggtggcttcttgaacgacatgctgtgaccgttttgaggcagtaagatggtcaagggaaacattcagaactgtaaatgaatgttcagagagcgttgccatggaaacaattactagtggcgactgctttcttgattcccaacgagactcagtcgcttgacttctccatcgtttgactagtacagacaagtatagacatctacatcaactcaatgggcacattgcagggaaaaaatgcacattgtccgaaatatctttcccccgctcaggccagttttctccgtcgagcaacatacggaagccctatacggttgaatcgaatgctaaacacagactggccaacttccttcagtgtaagtatgatcactgaagcaccagttatacacagatacgctgaaagggcctagatgaacagtatggttgggcaagtggggacaggacatatcggtgaggtcaacttgaagtgatcgtggagaaaaagagaggaacttacggtcaggatgtgccctagaaaatcaggcaaagttcggttagacccaaaaaaatcgcgctcggtacatgagtagaattatgtacatacaatatccatgccctagttgattcgatacattgggaaaattgaagacgagatatgactgatcagatgaacagatacaacagcctaaccgttgccctgatggagggatcccaagcgcaccttctagtatgaatgccgaaggtagaccgagccgagctttccaaggcttcagcagggtctcacatgccaagcttgtatccaacaagttatcaatcgtagactagtcatttagagatgaaactagtgttacaacatgacaaacattaaacacgtacttgtcaaagttccagattataaaaccaatgactcccgaaatgactccaacagcatacagcccttgagcttgacctctgatcgtgtcgttcttcggaagtcgctcatcgctaagcaagatatagatgattcgtccagctgagccaaaggcaagaattccgaacgcgatttcatgaattgtcggcgaaagttgatagacacttcgaaagaggtacagtttaacgtagataaagcatgaatttatatatgtgagcttgaacataaggacaaagataggcaaagatagagagaaagaaacgaaccaagtgatggtgataacgatgttaaaaagagctagaaggatagtgaaggagttgacgattgaacggccgtaccctggcgctgtctagtagacagcggaagtcctctcagcacatcagttcgagctgtatcgtatcacgcacaaatcaatacggtgaagacaagatatgcaagcctacctcg

SEQ ID NO: 961 - DNA, 3438 bp, Xanthophyllomyces dendrorhous
atatgcaagcctacctcgaatgagcaccagaaaagaatggaggtcgcccacatcataggaacctcgtctaaaatctggaagcgatgctggagagtagctattcctcatcaagcaaccttcctgagctatgttttgaaaatatggagccagagagtagcgaactaaccatgaaatagtgcgctaccaaccccgatgatggcaattccaatatgacagatgtacgttcgcttaggcattcgttctttgtaagcatggtaaattccgaccaagggaagtagaacggtcggagcattggatatggtatttatgaacctttcggtgaagcatcagggtcaatggacaaacccaatgagataggcggtcaaccaacatggttctaagtacctccaggatcgcagggggaggaaggatttactctgctatatacctagaaacctgataattctcttcgcaaaagtcaatggtcccgtcatgattcccccagtctatgtgatggttgaaaagacagaggagaaacaagagcacaataagctaaggtgaagctatatgacatactcggtgctcatgtgtctgagttgatttgaagagaagaaaaaagctttgtccagatgtgaaaggctagcgaaacttacatccggtctgattgagcatcatgaaattcaagacaaatcgatgaacatcatgtttgtatggtcagaaggtcagcgccaagaccagtcgcccgcgtcgtcagtatagagttcggcgagggagatagtaaaatcataacgtgagcgtttctgaccaggatggagacatacttgtagttgacccggccgggccgaagggagagaatgcatgacttgaggtcaatcaaattgtttctatatctaagagaggtatggtgcgttgtctgtagtgctcctgagtcttcaagaaggggaatggataggaaggagtcgagggagaacacagaaaggtgagaagcttgactgtttcctaacgatagtcggcatgtccattttcttaccgtgcattgagcggtgagggtcaaagtaactaaccatgcgatgtattctaaaatatatgacgtacgtcattacacaataagatggcagcagccgtttccggctcaaagtacatgtccactcacacactcatacactcgtatatatcccttctcttctttagttgatatgacatcaaagctagcagctatctatcggctggccaaagcatactctccagatgctacaaaacagcctaatgcccagtgagctttctatcagatcctgagtagcatcgtcgaattggctatattgaaagaaactcgtctgggatatgtagatcccgggtcgaccagcagtttggaccttttaagccaacatacatttccagtctagcctggagacgtccacggaacgatgaagaggcccaaaggtcagtttcttcgcggatggtatgcaaacgactaccaaactaatcaggatctctactatctgaagcttgtataaccacttcaggacaatggcgttcttcatggatgcttcgcctcttctctcagatcttggtctgcctttcacagcaggattcgatgatatcatctctcttgttcctctgttagtgttttacaaccttttttttttttttttgatccgttaaagctgaccatttatccactcgaaccgtagatatggagatgctttggctgccatcctaggtctctacggaatttatctcgctttcctgatggggtgtggaacaaataccatggcccttatgcttgttaatgttttcatgtaagcttcacaacacaccttacagtccgttcgagatatcggcattgtcgaatcagtctgatccgttgtcttcaatagtgattttgtcgttggagtgatcccaatcattggagacattctggataatttattcaaatcgaacttgtgcgtgtatcttgggctcatttgacctcagacgtccttcaactgacaggcttgatgacttcacacttcttcatgaatcaaggaaaaatctaaaaattctcgaagaccaccttctcaataacacaaggtacaacatattgctgatgcctgaaggtagagatttcatacccaagcagcccaaaggcggttggtttaactcaaagaagaccaatggctctgggaagaagcctggtatcaaagggagcagaactagaagattggaagtgtgggaaggggtggatgtcaagcggacggaaactggtggggatggactggatttagactaatcccatacagcactgctccaggtcgagatcttatagcgtttctttgatacaaatgcttgtctcttgttgttctccgttgcgttctgtagaatggccgaacatgtgagctgcagacaattgaggatgaacttaagtaccaccaagtggtgaagtggccggatgatggttatgcgtaacttatgattcacacgtgaccttatagctgtgcatactttctcggccgcgaaccatgccttgccccaaatttcgattgaactcagaaacaccaacctcccttcacttcaaccgcctcagcctctcgagattcatctagttttatatatctggatcccaggcctgaagacagatgagtagtgagtaatgatcccgttcttaactttcagttgaaatggtcgaccgagaagaagacagcttatcttaacatcaagctcgcaagacgcatttgttaatcaaatcttgaatgtactctaacctattgcttatacttgcctgcttctgcacaaacccacattatcattgaatctctacagaactcaccctcttagaacagctatctcaattagagaacccaacgcctgtggatgtcgaccctgaagaggcttactcgtcgctctctgcaaagcagaagggtaaaggtcaagctatcgatggggcagaggaggaggatgggtcggataacgaccaggatggggagggcagagatcattacctttctgttgggtgggtctatacacaagttactctttatgcgtggttggttctaatcggcttgttcttttttgttcaaacttcgttctctctttggttgtgtggtgacggcgttttgagtgtgtttaggatgagtgatatgcgaaagaacgcggatgcccgaagacgggaagctgaagatatggaaaagtacgggggtgttcgaagaagtagagcagagatttttggagatagtaacagcggaagttcagaagaggacgaggacgaggacgaggacgaggatgaagctcacgagggcgtagaagacgaggaggttcagccgttcggccaggtcgcaaattcttctgatgaggaggacgaagatgatgaggatgagccctcaacattcccagaacgtacacctgcctctcctccagccgagtcgactccgaaccttgaaacgtctcagattctttcttctcttcgaaactctcgatcagaag

SEQ ID NO: 962 - DNA, 11838 bp, Xanthophyllomyces dendrorhous
gagcagaacaagggactttccgtcaaacggcagctcgacctattcgagaacttcttgccgcttaggatcaagatgcaaaaggcaatttctggactgaccgggcttaaagttcgtccattttcctcaatcatgataggaagagttgtttgtgacctgtcgagtgcctttctatatcctaactatccttgtacgcgtttaggatcagagcgcgcaggttgagctcgctaacccttcaccggaacttcaagaatccgttaatggctgtattgatcaaattctcacgctgtcagaaggacttttcgagctacaggaggtaagccccctcccagtttgctttcagtttaattttttatgtcagagtctcagctgatagtttttgtttctattatttagggtctcatgaaactcaatgaaccatcgatcgagctccctccttcgaagcgtagaaagaccgaagcctccgacgttgtgtcgtctgattacatcttaccagcaaccgaagacgcgcttgctctatccgacctgtgagtctcttcatcagtttggcctatccctcatcttcctaagaggtttctgcactattttgttcgaaactcattttctttcccttcctctccctgtatccgtgccaacagaactcatccctctctcctccagacgttggcaaaatggtcttccaagattatgaccgctcaaggccttcagaatcttcgaggtgaaaagtttaaatccgtcaagatcggagtcgtcgagcaaattggagcttcccttgagggtctagagggtaggaaaaaagtagatcggttcatgggactcgtctctcaggatgaggctgaatgtgaggccgccgtttggggtgatgacaaagagttttaccagagcttggtcagagacgtcatcgagcgaagaggtggaggtgctggagtcggcgctatgagtggtaagtagtctcttcctaactcccttgtctgctcaaacatcgatcggtatatcatcgtccaacacaaaatcctgaccagaaacggtctacggcggtgtataatcatcaatttcgtttattttgaaataggccaagcaaccttttccaattacggacccaaaaagcacaagcccaccctcgatacacgagcttctaaaggtcgcaagcttcgatataccccccaagaaaagatcatgaacttcatggttcctgagcgaacggaagacttgtggcaggaggagcaggtcgacgagttattcggcagtctgctgggcaggacgatccgggaggagattgaggttgatgagaatggagaagagatcgaaactggcgatgcggctgatcatggactgggtggtcttagagtgttctgatcattatcaatatatgttgtgcaacttgtttcgggctctcacgacatatcctagtgaactctgagtcagacattaacatgagcatatgtaaatgcgaaggagaatatagaatcccaagaggcgaaagaacagaagaaaacagaacagaaagaacaaaagagaggcaggtgaacagtcgacgtgtagtcgaaatataaaagcagaaaaaaatggaaactcgtatggaagtacataaaaacgggtgaggaaataatatcaatgtatgcaaggaaagatctatgaaggatattcaaaagttaatcaaagactaaagataggaagaatagcatcgacaaaaaaaattaaaatttagagaccaaggctagaaacaagggccttcttgtcttccgcattcaaagtgctcaagacagcgaccaagccctgcaacgctccagctcgctccgtctcggcgaagctgataatcttattcgacacgtaggtggatcggacttcggcaacggcagcagcaatctcttctgcagactgctcaatccattcagcggtggctcggtcatcagtgaggtcagtctggacgacagagtcgagaatgttttgtcgctcctcgagagtaagatccgggttggcagcagcgaacttagacaggatgtgctgatagataaagaaagaagcggttagtactactgaaccttgcaacgaaagagtgaatgggacggctcacctcatcgttgagacgtcgtcgaagtcgccagtagaagaatcgtcgagcctcagcccagacagctcgcttcgcgcaacccttggcctccattcgtccgacacgatcatggagatcagcgtaaaggtgtgcaatctgcaagtacgtcggttgaagtagagtctctcttgccttgagtagctcagcactcttagctcgctcctccgcagacttggttgagtcgttcgaggcagctttgagagaggcataggtctcgtccaatcgctccatggtagcgatgaccttgtctcgtcggaacttgatctcaacgataccttccggctcgagaattcctcctcgagcggtttcatcagcgtacatctccatcttggcaaggttgatagtaggatccaacacgacccaagctcctccacgaagctctccgttggggacaacatagacgaacactggctgcttgaagttcgagagaccgtcaacgatcttagaaccctgcttgaggatagcgtcaaacatatcaccctgtcctccagagaaacctcggatgttggcaaggatcatcaaaggaagaccctccttgttgatatcaaagatggattgagcggtcttgtaagcagcgttggggttccaaacctgaccagcctccataatcttttgctcgaaagctgcagggttggcaggatcggcagcgatgatcttctcggtcgtcctggtttcgacagcaataacacccataggaatgcctcccagtcgggctcgaccggtgacgatagtcttggcccaatctccaagggtctccatgaaagatcccttgtcgaaaagaccagtcaagccttcatccggctttccttcaagcaaccatcgaggatcgtaaggacctcggggaggctcgtaggtcacagttcggtcccaagggtcctcggaaggccagataggaatggccttgccctttcgctcgggcacatacgagagccactggatgaccttgagagcaccatcgagatcagattcagcgacgagatgcgtggtaccgtttcgggccataatctgggttcctccaagctgaaggttggaagtgtaaacctctcgtccaagcaccttgttgagagactgagctccagtaaggatcatagggttgccttcaacctgaatagctcgctgacccaatcgaaccaagtaagctccgataccgaccgatcgggcagtaacgagagagatggtgaagattccctcctcgtaagctcgagtggtggctccagcaataagaccggatcctcgaagagactcaactcccaaaccctctgcaagaccgatgatggcggtgatcttgtgtcgtcgctcgccgtcatcctcgatctcctcagtggtgacgctggatcccttcttggcaagagtggataaagtttcaggggtcaagtatagatacttaatacccatggaaggctttgcggggtcaacgaaggccgccttgaagatgtgcaagagctcctccgcgataccgagtctagctccactgttggcagagaggtaaattcgaggaaggcccagcttcttggcaatttcagtagccttgaagaagtaatcgtcttccttaggaccaaaggatccaatcttgaaggtgatatcgttggcaatggcaactactcgtcgacccttgggatactcgggagtgagcatagtgaagatccaggcgaccataccacacgagttggaacccggaggtcgctcgacctcctgaagctcgttgttctcatcgagaaccaactcggtagcggtaagaggctcgctaggcacccggaggtgaggaatcttagcagcagcctcagcccaaaccttgcgcaaactctgaacgaagagatcggggtagtcgtctgtgacgccaaacagaacgtcaataaccagtgacggtcagaaaaccagagcatgaaatgtgactaacagacgtaagtcgttccaaccaagtgagcctggtatcgtcggggctgaagactgttcttggtctggtaagcatggttgacaggctgaaggtgaagaggtccaaggtctccgattgacttcaagatggtagtacccttctcggtctcaacctcctggtaggcgtggtacttcacgacgaaacctaagaacgagaaatgcatcagttacaatgtctagactgaataggattatcagttattttggactgcttaccagaaacgttctcaatgcagcatcggatgggggtgacgttaccctcgtcgtcctcaagaaccattcggatttcagaagctaatataccgaagaaacccgttagtcacagctcattgctgaattcaatgccgagagaacacttaccggtcactcgaagtcgccaaagcctctttccgtgcctctcaatgaacccggcaagggcctcctggacgtcgtcgaagtcgacaagaacgttatagatgaagttaattccaacatggttgcaatcggcgtttcgagtctcggctccaacaacctccaaggcgtccaggatatcagtgagcagtcgatcgcactcggagatgagatactcggcagccttcatcgatccctggacccgtccaggtcgaaccaaagcccggataaagaatcgaacatcggaagagttctccttacccactcccttgtagatgtggatctgtctgttgtctacgaagataggggtgaccttgaaattcgagagtcggttgagctcaagctgactggctagagcaggctcgatgtttcgaatcttctcctcctctctccaggggccctgggcaccctcttgtctgaaggtgaagtaggaggggtaaacgccctttcggcaaaccaagaaggtaactcgtcgaattcccttcttctggatctcggcagacatctgcattaccagcgactcaacactcttggcccaatcaagatcagacatgtcgtccttctcctcgaaagcccggatagcaatgttgagaacgttgggcatggcactgtcctgaccatgtcgttgagtgaaatcttgatgatggtaagcagggaagaaagacagaacattcaagagtccgtcctgaacctccttcaagttgttgaagctcgtcatgacaccagctcggaggggctcggtctgactctgcttgatcttgtaggtcaaatcagaaagcgaaccgactcggtaaacgtctcgattcgagtcaactcggggagtagaagactcagcgatgggctggttgagcttgaatcgccaagtgatgactccagcagcgccatcctgaccttgctcatgttgcatatcaagaatactgtactctcggtaactgcagatggaatagatagaactgtcagtcattgtttgggcaagaggagaagaacgatcacttacgctcgaagaacgtagacggtcaaactagcaagaacaatccaaggatcatcgtgcttgaagaaggaggacaggacatcgtagacggtgaatcgagagtttgagatctcagtcagaacatcaaccgaagggtttctgttgaaaatcggatcagagtcagcagagagctatgaactagaaacacatgggagaggacaaacctgtgtccacctccagtctctccgtagtaagaagtggtgacagaagagttaaggatcttttccatctggaacaacctctcctcgtaagagggaagagagcaagagataagaatttcccgagccttcaaagacaccttgctggccaaaggagccctatagatcggaaacagagtctttgtcaacacatcgcaacaatagtttgtaaactacaagaggaaacctacttggtgggcatgtcggcaagcgctttcatagtcttatgaaggaaagaaccctcagtgttgttgaggagctgcatagacttgatcagatcaaagacggagagaacaagcttggatcgagcgctgagacgcgagtgagccaggacgagaccaaggacgtcgttcaaagattctcggttttcatctcgaagttggagaacaatggcctcttcactaccagtagcaaaaacggcctcaacggccaagaacttttgaaggatggtagctaagacgtaagaggcgtaacccttaggaccgccaacgttcttctcagcaataccaacgatgggttcgatctgagttcggaccatagccctctcctgaggtcgcaaattatcgatgtaccgctcgacgactttgaggatctgtgcacacgaaagagatgggtaagcttctggtcgatgtatacagtcataactctgcgatcaactacacacctttgatccagggaactcggcgtgaggcttcgactgagcttcgctgatgacctctcgaatgctctcctcaagatcggcaggcattctcccagaaaggacggaaatgatggataaagcctctccgaaagcaagatcaggatcataaaggttttcagagaatgatcggaggattgttgcagtggagtcactctcgtatccatccaagaccgagtatatcgactcaagctggaactgtagccgctggtgaggtctgttaccgggcaggttagggagaccagtcacaggcaggagaccctcgaagggcttcgccttcttcactcgcgtagggtcatcaagactcaagatcccaataatcgctccaggatcgacggtcacaccggcttgcttgacaaactgaacgtgaccggactcctgggcaatcaagggcaagatcatcttcatgacctcaacctcagcatagatatctccggaggagatgtgatctccgctttcgaccaaaaaccggatgatctttccaggcgagggtgatcggagctgagtggggtcgttctcctgctcaatcaggcaagtctttgcgtctacctgaattcggagggtaccgacttcctccctccagtagagagtgtgggatcggccatcgagaagaacgagcattccaccatcggccaaaggtcggatggacaccacggtctttcctccgtttagatacaatcggtaagtgttgagggaggctcgagcagcggtgaaattgtaccgaacaccctcatagatgaaatcaagagtgaacactgtcttgagagtgtccttggagggaacctaaaaacaggaaacatgtacggagtggtgagtgcctcagtcaaaaacttcatgagaaacagagcttacctgtcccttgtccaatactcgtcggtattcggcccaacagttctcagaagccacgtgagctttcacaattgcaccacaaataacggccagtgatggatcaggcctctcagatgtaagcttgttagtgatcaacccatccaaccaagcggtggtaatggcgttctgctcgaaatcgctcgtctcaagaagagtgataagactagattaaacgtgatcgagacagatcggtcagttcatcgtaagtgattgaaaggagatgtaccaggctatacgcactactcgacagtggttcggaagtctcctcgaatggaaagctctttcaaggcgataaccatattctttctggcagtcgttcggtcggagccataagcaaacacgtgaccgaattgagaatcggcgaactataacaagagataagccagttcagattagatagggatctagtgtgattatattgttggcgaagaaacttacactatgaattcctccagtagctccaacagagaagtcttgaaagtcaaacacaatttaagagtcagagatttgttccacataagaatctttgagaagcctctgtactcacatccccagacgttagtattacttctgaagttcaactcttggatatctccggcagacggcttgaacccctcatcggggttttcactcgtgattcgacaggcaatgacgtgacccttgggcctaggcttcctctgagtctggacagactccgctctgctgctgtcgaagtcgatctcggaaacagtgtggggatcgagaccgtagaggactcgaatatcccgaattcgagaaagagggatacccatagcaatctgaagctgagcagcgggaaggttgacacccgagaccatctcggtagtagggtgctcgacttgaagtcgagggttgagttcgaggaagaagaatgagtcgtcggcgtgagagtagaggtctaaagaaaatccggcaaaagaaaagtgatgtaagttgactatctcgaaaaaacagaatgagaggtagctgtttgttccttacattcgacggtaccggcactaacatatcctactaacttggccaacctgacagcagccttctccatctcttcgaatctctctggacgagcgatcgtgacgggagcctcctcaatgatcttctgatgtcgtcgctgaacagagcaatctcgaccgaacaaagagatagcgtttccgtactgatcagcaaggagctggacctccaaatgtcgagcagatccagccaaggccatgatgaaaatcggagatcctagaggtcaagaacgcagtcgtcaattcatgagtgggtattccttcttgaactcccatggtagagattgtgctcaaatctccagtcaaacagagtgaacttacctggcacctcggaagcgacggagttgtaggagttcttgaatgtgtccatgctgtgaaccattcggataccctttcctcctcctccctcagaggccttgatcataactggcaaaccgatcttctcggctcgcaccaaaccatcctccaccgtctttacacaagcagcctgatatggcccatcgggcacagtcacgaagccctgagggctgagctctgtatcagtgatgcctgatccagaccaggccatacacggcacctgggcagactgggcaacgatggtcgaagaaatcttgtctccaagggatcgcatagcggatccgggaggaccaatgaagacgatcttgttctttgaggcggcgagagactcgggaagtctggggttttccgaagcgtgacccctgtcggatggaaagaaagcgcgtttaagtggacactcttcttccaacatgttaaggtcctattttacttaccatccagcccaaacagcatgtatattgaatcgctcggcaatgtcaacgatgaggtcgacgttagagtgattgttgttgttagttcctccaggaacttcgacgactcgatcagccattcgaatatagtcgcagttcaccttcctgtatggcgctcaagttgaattaattagaggatgtccctgactcaaggaaagcttatgtgattggtacgaacaaatcttctggagtggccattaccgtaaattcgatggctcgctcatctccaaacgtctcgtaagcccatttacgaactgatcggatctcttttacagcagcgattccgttgttggcaatgaggacctgagaaatgatacagaagcaatttagctccttggccctgaggctacgtgaaggaaaaaatgaaaattactgactttggtgatgaccgtgtgaccatcttgacttctaacgaaatcggtgacgcttgacggaggggcgttctcaagtgcgtttccacctggtaaaggggagggaaagagcaaaaagaacaagacaaaagagatcagcaaccgatctccgatcacagaaaggcattcttttgtccccaaggaaaagagcgcggaaaattgaccagatgtaatttccctctcttcctagatcgtttaagaaaatgcagggagccagacaaggaaaagaacaagaacgcttaccgatgaaatgccttacgctctcgtgatcgacaaccatcttgtgagctttgttggttgagtacagatgtgtgtgaatggaggaagatggatatagggttatgtgtgagggcccttggatgcaaagttacccacagatacgaaaagagatggaaagatggaggaggaacgagaaaagtaaaaacccaaaagaaaaccgaagaagagtagatggacagggaggcgagttcgttcagagaataggagggagtgggggaaggaggtcaagaagaaaagaagtaacaagtagagatgaagggtttaagaccaacttgacgggatggggattcaaagccttgagaatctcaaccccctggggaatttcggatgaggttggttgggggagcaaccgctgcttacctaagctatatctttattaatgaactgcgtattcttcggaatttcacggtcttactaggattttgccaatcattcaggcttagggttagatgcgtctttgtactttaagatatatgaacaatagtctatgaacactttatgtttccccaaccccatatataaaaggcgatcgatgtgcgcactctcaagatttaagcgttatcggttatcatgaagcatggatgtttcgaacagactttcgtaatctcatttatcactccaaacgaggttcacttcccaaattcctcgaagtgcgttgcagcacgccactcgacctccggagttcagccacagacggacatcatccaaggtgatggtctgctcagctatttctcctttatccaagagctcctgacgcattagtccaggcaagaacggggtagatgattctattgatggtgtaatccacttctcagctaacggtggaaggaataagatgttcgagatcgcggtctcagtcactttatgtgaggtcgacgagctgactgggctgtatagaagaacggtcatcgtagtcggaagtagttgatctatgaaagcgcatcatgttgaatgtcagttgccgttacattttaggaagtgatcaaagaaaacatacgagctatcgatgtatgagtgtcatatattccccgctgagaggtcttatggagcaaaaagtcacgatcgctgctttgtgcgcatactggctgaggagaaatcagaacctgagataaggcacacgttccagagggagttgagtcaagccgactgagtgatccgttgaacagcgctagatggaacgaaaggcaaagagacaaagacagggtgaaccaatgtatatcagagttgaaatctggtggccataagaaaatcggaacagtacatacgagcagagtcgaatgcgaatacctggatgtcaatgattggaagatcttgatcaatttgaacagacgccttcaactagggcagaataagagattcgattgtcaagtattgttctagttaatctcgacgccgcgacattggaaagaccagtatgtacacgtaagttcctttgtctgtctgttggaggtatggatgcttctagcgcggcacaaagagaatcattccaattgaattggccaagtttcgtgtctttcgaaaagtgggaccaggaagtagctaggcgttgaacatgccgcgtaaacaggggaatttgagcagaaatgtgatcaccaggcaaggtgccatcgtaacggagggtggtaaagacttcaaacgattcgtccggcggttggagaggacttgatatgttattaatacactcgatagaggttctatgttgcacaagaaagggagattagtaataaggctatgggtggagtgatctcgagatcagctatcaagctatcttgttgctcacgacatagaatgagatggaatagatcggatcgaagctgacactaagagaaatagagggaagaaaggaaaaagcaatagagaaggaaaaataaaaaattgtgtccctgcgtgattgactttgtgggaaagcgcgctttgatcttttcctttgccccttcctctcttgaccttgtcatctttgatcccctttccttcactctgttcctcttttctcttggtcaccttacgacaccttaataccccaaactacatacatactgcccattgtatagat

SEQ ID NO: 963 - DNA, 21001 bp, Xanthophyllomyces dendrorhous
  misc_feature (10761)..(10770): n is a, c, g, or t
ttgtatagataatgcgtgaaatcagtacgttttctttctattcttcttatatataaatcatcgacaaagaactataaaccttcgagatgtccatcttttattcctctgtctgattccaattcttttctgctcatccccatcgcccaatagtcaacgttcagtgtggtcaggccggtaaccagcttggaacggctttctgggaccacatcctcgtggagcacggacttgatcaatcataagtcccctgcttgtaaactgccatcgccttttaattgcaaagcttaccttgtctttgttgtgtgttttggtgtatgttccttcttcgttgttattctccgatctagcactggtcagtacattggaaacgacccgtaagtctatgctgtcaagattcaatggcttgtaatggacgtccgcctaatgcctggatgttattctttcttcctctgtcttgcagccagcagctcgttagatcttcggtctacttcactgagggttagtttatctctgctcattttatacttcgattagatctaacagtacctttacaatatattcttttgttgtacggtgcatgttagccgctgccaacaagtatgttcctcgaagtatccaggtcgatctagagcctggaactatggacaacatccgaggtggacctcttggaaaggtatattttgatctacacctcgatgttttcccaaataacatatggggctgattctgagcaaccgcatattgtagcttttccgaccagacacttttgtctccggacaaagtggagccggaaacaactgggcgaagggatattgtaagtgcaacatgcaccagtttattaccaccatcaagggctgataccgaggttatctatcttacgtagacaccgaaggagctgagttggtggacaacgttttggaggttctccgacttcaggctgagcggtgtgagcttctccagggtttccagcttctccactctctcggaggaggtaccggatctggattgggatctctcttgttgaccaaaatcaaggaagagtaccctgacagaatgttggcctcctactcgattcttcccagtcctagggtatgtctgattggtaaaacccatcatcggttttgattatatgctaagatgactccatttttatctcgcaggtctccgataccgtcgttgagccttacaacgcgttgttgtctactcatcaattggtcgagaattctgatcttgcttgtgagttgaaatactttgtgcatatagtcgggtttgttgctgatgtatacgcgatatgacacgtatagtctgcatcgataacgaggctctgtaagttcacttcttacttctgatctgcgtaagaccgtaacctgatccgtcatcatcctgactatgtcgcgctttgattctgatgatagctacgatatctgcatccgaacactcaagacaccttctcctacctacgagaacctcaacggtatcatcgcccgagttatgagcggtatcaccaccacccttcgattccccggacagctcaactctgacctgcgaaagctcgccgtcaacgttcgtccacgtccgctgaatacatggctttgccagagtgtatcgataaagacttatttgatttctatgttgcttgggctcgatagatgatccctttccctcgactccacttcttcttgaccggttacgcgccccttgtggctgcaggaagccagcaatagttcgtatcctcacttggtattggctcattgaattcataaactgacgcatatatgcctctcttttctgaacagccaatcgaccagtatgattctttctttcgcatagtcagcaaacccgagcaaaaatgctgatgattcttgttcttctttgttctctaactttgtttctctagacgtggctgatctttgcgcaagtgagttttcgcctttcaagatctcttactcccgtacgtccaccaactgttcactgatacctctctttgatgttgtttttgttaggcatgtttgaccccaagagcatgatggctgccaccaaccctgtacgtgtgctcggacctggagacttccgtccttgatcctgatcggacctgtctttctcgtgggcgcctacttacctgattcgtcttgacgttttatttttaacaaaatacctccagaaccacggaaagtggctgtacgtttgtattttgattaattaggcacatgagcttgggaactgacacgcatatatctgttgatgtcctcggaatcatcgaaatcaaatgatacaggaatgttgcctgtattttccgaggaaagtctatcgctatgcgagacgtagaggacgcgacttataacatccgactcaagaactctgctggcttcgtcgagtggatccctggatcggtcatggcctctgtctgcgacggttagtgttctcgaggcgatatttgataggaggacgatacacaaggcatatgatcactgacgacacaaacgtgctgcgatggatacagtccctcccattggtatcaagcagtccgctaccttcatcggaaactctacggccattcaggagctcttcaagcgatcgcactctcagttctcggccatgttccgaaggaaagcttacttacactggtacaccggagagggtatggacgaactcgagtttaccgaagccgagtccaacattcttgatcttgtgtccgagtacgagcagtacgagcagtctggtgtcgaggaggatgaggtttacgaggaggaaggtggggaggagggtggatacatggatgaggagcagcagtagatttgagtcgtaagtctttggaggactgaccgtgaatgaatggcagatgtcgtttgttttttctttccaacataccttttcaccgaaaaaaacaagaaagcgtttgctccttgggtctactctttctgcctttttgaccttatgtctcaaacataatttttccgtctcttctactatttcctcatatctgttcgtttatcctttacccgatctgctttctatactctcgctctctattgcttttctcgatacctcaacacaaagagatttcagtgtttgaacgggccactcattcagtttgtctcaaagttcacggaaaagctatagacgtaatcggtaaccctaacgaaaagaggctaaaagaaaaacaaacaaggctgcggccagtggcgcgtctgaaacgtggacgcgtctgtgctccgaagaaggtggggaccgatggctcggtcaatttatgcggcaccttccttctgggaatcaataaacttgaaaacctctaagaggtaatcgtcgggctcgatccgtcctcgttgtagtatccatctttctgagctctttgctttatcgagtttgacagtctttcatttatattgcgagctgtttctagtcatcgtctttttctccttctcaactttcatcgtcaaacttcattcctttcttttttggccagatcaagttcccttgacattccttatcggactgtgtcattcctttctcttatcacatccctaccggaaacttctctctttgttcaccactttctttctattgtcccgtcaacacacctctttttgcatctagccatcatctcaggctttagtttatctacttaaaaaatcatggtccagcgaatctcatcccccattaggtcatccccggtcagatcattctccctcggtctctgttccccaataaaggtgccaacgatcgtcgtcacgccatgtgagccatcgagagagccttttctatacatgtcggccgagaaagggccagtctatccatatcgatcgtcagagaggtgggtgtcaaacaaagaacctaagggaaaaaccatcagatgggtgctgatcgtggtcattggaatgctggcgctactttctcaggtggtcactaagcctgatctctttccctataaagatgttcgttctgtttcgtgtttcttcctcttctaccgtggttgttttttcacttgtggcttcatgagacaaagttttgatcatcttcctttgctgatggtaatccagatcaaaatgtcaattccctcacgcccgatctctcccacgtttcttttctcgtcccctcatccctcccctataacaccatccgatgacttggcatcctcctcctcctcaaattctccttcagactctttctacaaaagatcgttctcctttccgacctcattcaccacttcgttcggaaactggaaagttaactggtcaaaggagaacgagacactaatgatcggttcggttccggcctctggtcttaggaatgcaggtttattgagatttctggaacatgggaggtggtcgctgatggaaagaccgacttatcatacgtccgagcagatctcgagttcacatcctggaacaagttcgcatgcgtcgtcgtagatgatcgatcgatctatggattgttctcacgaaccttttacttccttttgtcataccctcatctcttccggtcttttctatctcattcggtcttcgtcttcgtctttctcttctgatctcttcaatatctttaggatttcgcttggaacatattaccagatctcgtccgctgtcatttcctgccttcaaggaagacagatcctgtttcgtacatcatctttcgtctttcgtctttcatcttttgtttgttatgtttattgacgacagggcatattctacatctagattttttcatatcacgctcttttcctctaaccatcctgacgactcaatgcagtcgtcctcatacatgtgtcttcattgatttatccttttcccattcctcctcttttgttcttactggaaccacaggcgggtatgttgagttttgatcgagaccgatgattactcatgacgtctcttgatatgatgaatgattcacccttgcttgatcgtcttttcttcttcttcttcttcttggttttccatggtagatatacaactcctcatattcctttctgacacaaaaaatcggtaacaacaacaagactagaagagacaaaagaaggaaaagaaatagaggaaagaagatcaaagacaagtgaaaaatagagaggataggcagaggcagatggaagaaaagaagaaagaaagcgaagcgacgcaatctgaaggaacaccgagcaaggtcgacgaattaatagtcgtatttgatgtccttggaaggatcgatacccaattcgttgtaaacatcttgttgggtcctgatcttgatgtttgagttgtcgggaacagttccgggcaagttgttcaactcattgaattcctcgaaagtcctgttgatttagagagatgaaatgtgttaggaaattagccagatggtcatgcccgaggaagagggttgaagtagaagcaagacgtactccggctggagaatcattccaccagaggatacagttggatacttctgaagagagatccgcatcctctcagcgagttgtcgctcggtctccatcgactcgaacctctctttgatgatctgctcagacgacggagaccagtactgaaccagtcggaccaggtacggtctcttatcatccggaccggtcttggcggtcgaatcatgggctccccacgaagggtcgttaggcttgaactctcgttcagttcgggcgggcatataggtgatccctagataagctagcaagaacactgcggccgtcttgaggtacaaagggttagagaaacctgttcaggacatccaggattagattcggttgaaagtcagtcccaaaacgaaaaggatctcggagatggagggacagggagaaggagtacacggggaggagagaggtgaaaaaaaaacgatccagtcagaccggagggaatagccgtacctaaatactcctgttcgaaaggttcctgttcttctccaggataagtaaagtgttcgtgtctatcatgactttggaatccataaccgcttcgtccatggttgatatcaccctccggagggacgctatgagcagcagaatgtccgtgtacggcgtgaagcttaggagatggggttgtgaacctggccgaggtgagagcgatagatcggtttagagaaacagaggacagagatagtctagaaaccagaccagccgtcgaaagagggttgagcaagggcatgacaagacaaatgttaccagagagaagagagagagtgtgtgtatgaacgaaggagaaagagatgaagaagagagagtatcggatggttccagagatggaaagtggaaggagaacaagctcagagactaagagggtgattaggaaggtgactaggaaggtgactaggaaggtgactaggaaggtgactaggaaggtgactaggaaggtgactaggaaggtgactagagagttattagaaaagtcatcaggcaagtgattagaaaatctactagaaaagctattagaatcgatccaattcgccaatcctcttagtacaacccggccagatatcttaggcaattcatctggcgctcacgcgtcagatcaaggagacgcgtcgaaaatacgctgttcatttcgttactcaacgttctcaacatcacctgcttgaatcctccttcatactaaacaaatacatacacacacatcgagatgagcgaccaagaaggcctttcgtccattccagactctcctgcgccagcttcgatatcagctaagaaaacatcgaaagcaccaccaaagacaacaacctcgaaaacaggatccaaggcgaatccaaagacagcatcgaacacggccatttcaaagtcgacagcagccaaaaaaacaacatcagcctccaaggggatatcgaaacctgtagcctcggtagcgaagaaaggcaaaggatccagttccttcccgatctcccgagttcagaaaatcattaaagctggtccgtcggtttatcttcccgacgtctcgttacactctgctcattcgctgcttgacgctcaaatctaacctcattcgcctcgctcaaattgatccatacagatccagaggtcacaaactgctcgaaagaagctagcttcctgatttcgcaggctaccgttcgtatatcaactgtatacctgttaaaagtcctttctgtctgatggcatctcgctctatttcttcaacaggagttctttgtcaagaagtttgttgatcaaggctatctcaagtcacgaacagacggtcgaaagacgatccagttgaaagatctaagtacgaatccaaatcttacataaaaagagagaaaaaaaaggagtgaacgagaacaaaatgatattaatcgtggctatctgagcaatggacggctagctgatatttgtggaattgatcggttctctatattttctgtggtaatccttcagccagtgttgttcgcgctacaccagatttcatgttcctagaaggtatgtccttccaagatgacagcttaaggagtcttcaacatcttgcatgcgccgagtatatgcaattcttgaaaaacaagactgaattacccattcaaaccgactctacccatcagagttgatccccgaccccgtcaccttaaatcaagctctagccatgcgtgccaagaagcttgccacagacgatttgccagtcggtatgagtgaatcagatgaaccggaaggatctgacgaggaatctatcgatggagaggaacagaccgctacgacgagtgctggccgacagacgttctttgccccaaccggctcggctgttgccaaaggcaaggggagaggaactggagtaacaagggcaagaaagtcgttaaagaaaggagaatcgtcggctaacggtacttcatcgacggctaagaagacgttagtcctatttgctctctcgttctttctttctgtgtatttcgaccgacgaggatctgtctacctatcagtcgagaacgtgctgatcgtgtggattgtttttgcttttattcgctgtgacgaaaagttccgaaggtgttgccgatggtgaggcaacagaggatgcaccggctgccgaggatggcgcgaccagcactgatgtaccattggtcgaacaatcctcccacatggatgttgatacctcgtcgtagattcgattcaagttcatccccatcttatgagtgaaagaaacatcacggatacatgtatatgacgaacagaccaatacaatcgtcaactgcttatgtgtatgctgaccaggcatctttgagtttatcatatatgtgtgtgtgtgtgtgtgtgtatatactcgtggcgagcaacacgttgcaaataaaagaacggacatgtacccaatagatggccattatcatgtccgcgcggaacgaaaacgttgtggtcatcagcaagaatattccgttaacattctcatctcctttttttttctcctttttttctcctttcctctccaacactcggaacatcacatctcttccttcttctggtctcaccttcctctccagaagtctcttggccgaattatttgtttcgttcggttcaaccctagactccagcggcggccgtcaagcgtccaaacagactcgccacctctcgatcattctcatcaattcttgttcagagttcgattcggccttctccactctcgttctcaccgatcatctctgctccttagcccggttgaggctacctgtactgaaccatcaaacacgtacacaagtcctacctatcgctctctacaatagagttcattcagcctcaagagtctgaggtcatcaatcttacttgatcttccttctggctggctgactcgcttgctcttgcctctgttcttctgacttcctgatccaatacatccgatcttcatctctctcttcggacaaatccctctatcatcatcacctgccttttttttttgagacgagcgatcagaaccattctaccaagcaccaactgtcagacgacgagaacatgtccagatccttgtctcaggaggatagacagctggagcaatctgaagctgttggtcgggatcaacaggccgtggagcctacgacctcgaacttttcgaccccatcccgtcagatagatcttgatgaccgaccatctgaatctccctctcagtctactgtttcctcatcgtcttcctccacttcttctcctcatgacaaacatactcaaaagtgggcagctcggaatcctgcgttaccatcccctttgagaaatcaacatcctaatcaaagccctcaaactacaactgactcatcgctttccagctcgtcatcagctgcttctcctgcccttgattcatcagccaagccggatcaatcatccttgggcacaactcactcctccgccagggcggcgaaaccgacatcacttccttcatcttctgtgccttacacagcagcatcgagtccgctaaaatcaccatgcttcgtccacgagtatctaaaccagtcggctaccctgtccgatttcctccaacgaccaacacctcgttctagcgaaaataccaaagagaaggattcactcaaggaacacgttcaacagggattgcacagaacgaagagccaaattagacttgaaagaggagaagcaggcgaggatgcgacgatagccctggccgatgacgacgaagatggcagtgaggaaaatgaacgggatggagtcgagagtttgacaaagcagctagctgaaacggccgttggagttcgagagatgtccaaacaattgggttcgtgatctatcgtttatatcctttgctttgtcggtctgacttattcacaccttcctatacttatatgttgatgttcacattccaggtcgaacccgagtgcgatcgaacatccaaaacattcttatcgtcacaaaggcgcgggacaatcgactcatcaagctcacgagacagcttgcaatgttcctgatgttgaaaccgaggggcaatggttctctgggagaggtccgaaggggtcacacggtgtgagtgaagcgaggtcttcgagttcctatactacatctgatacgaatgacggacgctaaccttctcaatctgttctgaggtgttagttatgttgatgcccaactccggacatctaagcggtttgatgctgcaggtcagttgtttcatctcctgatgtgttctatctccttttgaggtattttctatcgattgcaaatatccagatctgaacaatcaatcttttaccattaatcgttcagggatggagagagattatccagaactctttgctcctcttgggcgccgacgatcttcttcctcggctagcatcaacacgatgaacggatccgtctattcggagggatctggttcggtttctcctggggagggacagcttaggtattggacgagtgatatgtgttcgaagagtccgcatctgtttgactttgttgtcactgtgagtatacgttcaatcctacttttaaagtcatatgcctagacgcgctgacggtttcttgtatatgcgcgcccaaagcttggaggagatggtactgttctctttacatcttggctgttccagaagattgtgcctccggtgttacctttcgcactcggctctcttggatttttgacaaactttgactttgccaactacgagtccgtcatgaactctgcgattgataaaggaatccgagtcaatcttcggatgaggtttacctgtactgtttaccgagccatcactccggaggctagcggaaagggcctcaaagccgttcgcaaaagtggaggtgaaatcttgatgagtgagcttggaaaaagtgggtgggaagcattggaggatggtaaccagccaccggttcaaggaaaaggaaggaaggacaaggannnnnnnnnngtcatctgtttctcaactagaccggttgaaactttcgaggtgttgaatgatctggtggtcgatagaggaccaagtccattcgtgagcatgctcgaattgtttggtgcgttttttttgtttgccatgccaagctctcggttccttcttactaactctatttctttctccactatcccggaatgttttttcacgaaggtgacgaacaccacatgactacagttcaggctgatggactaacagtttcgacccctactggatcaacagcgtattctgtaagtcatataagtcttatgattcgagttgatgtatactcgggactgaccagagtctggcgtttcttctgccgttactctgacgtctctcagctttcagctggaggatcattggtccatccagaaatccctgcgatctgtatcacccctatatgccctcacacgctctcgttccggccaatgttgcttccggatagcatggagtaagaatatagcgtccgcttttctttttctctcttgttctagttgagaactgatctgggttcttcccttggcgttctattttgcttgaatcaaaaagacttcgaatctgtgtgccacataattctcgaagtaccgcttgggcaagtttcgatgggcgcggtcgagtcgagctaaaacagggagatcatatcaaggtcgttgcttccaaataccctttcccaaccatctgtgctgacaaacagtcgactgtgagcagaatttgacccgctttattgagattctgttcaacgaactatgggagctgacgcttcaatgcgatttctgtttgtgtcttaggactggttcaatgctattcagcgaacccttcgatggaatggtatgtcatctttattcagttttacggattctgcgaaagtatggctcaatctagatatggccattttctatctccaaatcttcagatcgcgagaaacaaaagtcgtttgtcatcgtcgaagagcctcgagcgccaaaacctttgagaccacctcaggatgcggttagcaattcaccggcttctgatgctataaagtcgcctgaagatccggagattgatcttgatgatgaggatgaaaagttcgatatcgacgagtaagccattctcattcttcttggcctcgagtgcctgccacctggagttgtactgacatcgatatctatcagttcatccacagtgaacgcgtcgattgcctccttttccggatcatcagaccagaaatctacgacggatgcttccgctgcccctctatcaccgtcctcctcgaacgacgactggaccgaacctcctgacccacactcgggagtctcaacccctggcagatatgcaggttctcgttctcacccgcctacattgaatgctcgccatatcataggtgctctggccaagatccctcaatatcaatctcaatcgctatcgtctaggccaacatcgacaagccatcatatcccgcccgtcgagccgatgcttcgatctaagtttacaacaccggcaaatcttcggttgacgcctacagacggctctcgggcatcgaacaaacctcaaccggccagtccgtctttagccgaaagggaaaattccgtcgctgccgggtcaagagataagtcgacagtcgatcaatcagcaacgtcgtctttaccggcagaagctcagacgcccaaaccgacggatagatttagaaagcctcatccgccaccacattattcacatcaacaacgccttcagtcatccaggggcagtcaatccggttcttctcgcagtaatcgacagagggacacggctgaaggaacgcttaacgcgaatgagatgagtcgggcatttgcatgtgagttcaattctctccaacattgatttaacagggctaggtgctgaacctttcgtttgtttcattgtatagtctttggccaagacgagtcggatagtgggatgagtgaatctgataacgagtaggcgtggctttctgtgttatccctgtgctttctttctttatcatccatgctttatatcatgcaatttgctactcagtgtcccttcgttcatctgtttcttctctatctcatcagtagtatccttacctattgttcatccgtcaaagccattactttgtctctacgcagaacttaaccatcttgatatctgcgaatgcttcaacgagataagataaataaacagaaagcttatcatcaattttggaaaaaaaaaccattgaaatccactgaaattcaacagatagaattattcctcttggcctgttaagttgaccaaatcaaacctacaacacgaccagctctccaccaatcgatagccatgtctaccggtctccctagaaatcacttcgtgcccgcacggctaaagccagctgctactgaagtcccggaagtatgaatattcttctgaggctgcttctgttcactgaaacccttgtgcttaagcttctttcccttaccgaatgtctgcctttcttcttcttagaactacaagaaatcaagtcggcaccaagcaggaattaagaaagttctttgggtatggcttaacaggtggtatgaatctgaaggtcaagctcgatacaaatcccaaggcgcgactgagaaggatgagttgagtgaagagaggaagaaagcattggcggtggtggatttggcttgtggaaggtctgtttcagtcttctccttttgcctacaacaggagccactcaaacttattagggaacgttttcatatttggcgaattattcagtggagagatcacagagttcttgactcaatggtatcagctcggtcggcttggaacgaacgtttcctcctccagcgacagctcttcttccgtgacttcaacccctacgactggacctacaaatctcgttccctccatccatcccgctcttcaaacaaatttgaaagctccactcgcatctcgacctgctttcatcccacccgctcgtcgaaaaccagtgtctagcactcccggagcctcctctcagacggatgcctcgaccggtagtccctcccctcaggtgccgtcttcgttcggccagtcgtctctgaaaggaggtcaatacgcatccctcgtcagaccgcccgctctaccggcatcgttcacatcgcttgagatccttcctaccgatgcgtatcctactactcacaacccgctgtaccaacaacggctgcctgctggaaaccctgcttacccgacggatcttgtcccattaacgttccatcagatcgctctctctcaactttctttccctcgatcgttcaccgcttcggaggcagaaccgtatccaaagttcgacatgatcatctgttcgtttgccttgcatatggttgaagaagaagacttggctgtcggtgcttatggaggcgaagcctacgacaaggaacgcaaggaaaagaagaaatcagagttttgggctctgctctgggagttgagtttgagggcagaatggttggtcgtgttaaacacaaacaaacgaccggtcattggagaatctaccggctgggctagatgggatctggcaaactggagaatcgccaggcaggaagggtttggagggaagaaggaggacgaagaggatgaggaggacgaagaaccggaggagggagatgacttggagagagattcagcggttgaggtcaagcgagacaggtgtgtttttcctcccctttaatcggagaatttacttaacgatctgtcctattaaaccttggtttccatttcgtttgttctttaatcttcacgaaattcacacagggtccgaatgagagtgtaccgaagcgtaggagggagcgcatagattcgatgaatacgcttctatttgagaagagaggaaattgaaatcgcattgcagataaaacatgtctatggaaagcaaagcgaattttgacaacgcgtagaactacaacaaaagacactctgattaagaacaagtaagaagaaaagatgatggttttgatatcgaatgagataaaagatgagtgatgaaatatccagattgaagactttgagcaactttaaatgcggctccatagatatataatagtcaaagcagggacaaaggaagaggcttagccttcaaacgcggcggtttcatctaaatcgattccaaattcttctttggccattgcctcaaattgtttttgcaggcgttcttctaatccaccctcagttttcccagtaacgagttctgtcacccctgttcaatgagaaaaccgaaatgtgaaggcatctgatcagcggcggaatagaagtatttctatgcgaggaaacaacacagaatggaacgaacattggtacagcttgtttgtccagaagccaatatcgatcaacttaagcgtagcctcgaacaaccagatctgttgcagatctcgaagataagcactcaagccgacctgatagattgattgattggctgttggagaggtaagtgcgtaacccttggcggcccactattgggcgagaaatcaaacacgaacagaaagaaagtcagtttcgaaaacacactgaagtcgattaaaagattcgggtttgaagaagagatgaaagtacggaccttggcagtgatgttgactctattggacggagagccgaggccttggttagcagcttgaagcattcgctgagctcggaccaaaaagatcaattccttcattggttcagagtgattcagccaagaagcaggatcagtaatcgatatcaaaagagaaagtgagagatagagaagcaatgaaaacagacgaactcgaggaatgagctgctcattctccaaaagtgccttcaaccgtctcttcatgtccacctgcagttcgtattccgtcatctgctctcgcttgaggatttcctcactcttcggcgctttcttcgacgctcgcagccgcgttggtctcaagaggatggccgaggcgaacctgtcggcggagacaacacagtaagaaatcgtaagtcttattgatcaggagaaaaaactattcttgacgaggagagtactcacatatcactgtcaaaggtcacaccccatgcccgagccgtcttctcaatcgttccaatatctagtacaaacaatgagcgccaaagtgcagagtactctgtcctgaacttctcagacaacgggatgtctattcagatgaagcataccgatttcagagaggttgttaattgattgattgagggacgtctagaggcaaagagaaagacattgaaactgacagagaccgtgatcgatcaaaataacctgtgggtatcttgggttctcagggttgggtctcacgaggatgtttcctggatggggatcacaatgaacctgaaataagaaatgatcagaagagtcaagtgttagtgaaagacctcaaaaggtcaagcgaaagcatagatccattaagccaggcgctcacccaaccccattcgaaagtctgacaggcgaacagatccaacactatatccatcgtccttctgagtccacctctgaagtcccacttgtcaagttgttccctgtcatttattcgacatccgttgacgtattccatcgtcactgtcgaatcagaaaaatcgtataacataggcgcgaaaactatgtcagcgaatatacatttgagggcacaagcactctgaaggatgattgctgaatctgaagcgaccgaagactacgaactgattcgctcgccactgtattgtgggtatactttaggaatatagacttggccttgtaaagagggtgttttcgacaaaaactgatcggttcttcgcgaattatcagctgccaatgtcgaacagaaatatatgatatgaaatatgagttaagagaacttgatatgccttttgattatcagagaaacacaaaccttcgatcctaaagtctgtctctctgcgcatttgctcagatacgtcttaagatgtcgagagagaaaaaatttgagaatacgcgagtgggtgatacgtgttgaagaatcaagccaactcacaactggctacaaagtaagtgggataatcgaatacggcctgcatacaccacatcatcgtccggtaactccacagatccctgagagagaataagaacaatgcgagtactgaattaatgaaacttgttcgcgctgagtgacagaggacaatcttactcaccactccacctgtttctcgatcgccggtttttggaccttaacggctacctctctgccatccttcagcttggccttgtgaacctgggcaatactggcactggcaatcggagttctctcgaaagagtcaaatagctcatctgggtgggctccgaactctttgatgaataccgggagaatctcatcaaaggagacgacaggagcggcgtcagagaaggatgaaaagggttttcgataagctggcggaagaacggcggcttgggtaccgagctgttgacctgttttcatacatcgatacgagccaagatatatgtgtgtgtccataagaccatttgttctctatgagacaaaatatttagtagaaggttaggggacgaacctagcttgatgtataggcctgcgttttcattgatcaagttggacacccgggtcgctgtccgttcatgaagctcgttgattttctctgactttccaggggaaaagttccatttgactgacacgaacaaatcatgagtcgtggtgagctgagagaagtaaggtcaccggctgacaagagagaattctatgacttacagtccaaggtgaccaccagtctggatcaagaatcgaccgattaatcgagaaaagtggtgatcgacagtcagctcactcaaacagcttacgctagagatgattgaaacaatcaaagagaaaagaaatttttgacgtacccagtccagagggttctgatggtccttactcctgtactcgcctggaacttgttatcgtatatgtacaaccctgcaaccgttcctccgatgatccagccgatgctgtatggcttacgaaccgtgtactttatccacggaggagtaggaaataaatgcttctgcgagggaagcggccggacgacctttggcaaaggtctctctggaaaaaccatggaactatgagaaagacaagttcactcgagaacgtatctactgggaccaaaggatgagatgctgttgaggacaagaaagaagataaagagaggatcaagtaagagtggccgatagaaggagttgatcggacgagacggaggcggctcatcggaagccgatgacgcggcgtaaccatcagccacgtgttaggtttcatgtcgtgaggattacaaattgacgcgtaaccagacgcgcttcgaactcttcctccgacggtgggcagtaagactcttgatatcatcctgacttgatcactcaagcatgtcccaactccatttgcagacactgtctgatctactggctccgaatgagagtgccatacagaaagctaccagaaatctgagcgcacttctctcttatacaggtagagatcttgatctcggtcggacggctttaccggctgttgccgccttgttggcttgtgaagcgtatgtgcaatcgtttcttggggtacgatacagatacctatgtttgagacctgatattgtttatcctatcaaccagactggagcgtccagagctgctcgattttaacaccgctcagaagaaatcgagcgttacaaaacccatattcaaagagaccgtcgaagcttctaggcggatcctagataggaacaaacatctcaccaaaagcacaacaggctctccttcgagatctttgtccggttcctcccagcaacgtccctttcaagatttactctcgagtcttaatttgtatctttcagcagaccaggttaaatacgtgattagacaagcagaagttacccaaaatatcttgatcgactcgaccagggactcgaacgaccggtctgttgacctgagctcggctcgctcaataaagtccatccttagctttgctctgaacggcctgaaggtctgttttcacgtattcatcaactcgagcactggaagatgacatgagatctccccttcgatactgattctctgtgcctcgatcgcctctccctcctcagctaccgaccacctacctggtggaacctcatatcgaagacctaatcaaacttcacgcatattcactgtttgaatccacgtttcgaccatccgaatctgacttccgacgtccaggctcccaacctcctatgtcttcttttagtccagctgcctcacctgcccaaacgccgaagaagaaagcgacctcggcgttccatctgcacacaccctccagaccctctcccctaagacagggatcatccgcctcatcgtctcgtcacaagtcctttttgagcgatgacgctctttcttctgacggagaggataagagggatctagaaaagacaccaacaagaagacttcaaaagacaaatgcgcgactcgacggtcaaataccctcggccggacggacaagaactttgaacgccacgccgagaggtggtcgagtgacaaaacggcggaagagattgagaaaacactacatcgaaggagcagatcagatcaatctcgaaacgtccaaacaaaggtatctaatggtatgttccctttcagtgtttatcaacggatctgtgtactcttgccgagtgtatactgacagtccgtcgttcctttccgaccggtgtgaatatgttcagtggagagagtcgttcctccgagcgcatcctgtgtctgtagacgacgaacctggcacaaactaacatgtagaagttgaacgagatcatcattgttttgataatatgtgaatgagttgtataagcaacataagaaagcttgttctctcttgcgcaagagtgatatgctccccttaatgacgcgcctcatgaaaaagaagtcgacgcgtctgttctttcttggacgcgtcaacaaaccttccactagattaggttaatcctttcctcccgactctcgttgctcaacgagccttgtccttaacgacatctcctatacgaagaagaccgatccaatatggattcgcctctgctcccttccttatcgaggcattctcaaggacagccacctccgagtttcaatctgtttgacacgtctcttgaatctctgaagcttcaggacttgtccttcacggacgatcatccgtctcaacaagtcggatcggctgaacatctctttaatcccccttcatcttcgggaacgggcgacgtctcgttcgatacacctccgagggtcactcgcttggccggtcatcggaaagcaggtgctcctccacctgcagggtctaatagagcaggagctggaaaaccgaggttcagtctattcgctcagcctaaacccgaacccacgccgccgtcacctgtcgaacaagttgaacggagatcaaattcgcttgcggagaccgaggaggacgaagaagaagaagaagaggaagaagaggtagagaaagcaaacaaagagacggagcaggtagaggaagatgtagaaactaaagaccatagacatcgatgggaaaatagccatcagggccaatacacagaggaggaagacggagaagacggacacaaaatcgatggtgggggtgaagaagacgacggacagacattaagattgtctgaattggcctcctcgacaggtctagcggaggaaagagaggcaacgctcaagaaaaccttgtttgacctgcaaagattgaacggtgtgttcgaaggctatatcggtgctctagaatccaacaatgcgttccattcggtcagtcgttatgttatctttgtccaacgtgttttcaccaaccttgcccaactcatatgagctgtcgttgattgttcatctaatacacagagaatagccgatcaaacgatgttcacaaactctttattggacgactacatccatatcctatcggcctctcagaaagtggcttctctggttcaaaaccctcaatgggaaggcgcagaagcagttcgttcactctatctcacgatgatccctttctcctgatcgttttaatagcagatcatctaaaatctcctttttctgtctttttttctcccctctcccacatcgatacttgccaacttaataggacgagagagcgggcatggcccgacagatggcgctactccaagctcaggaacaagctatgcgagaagcagcaattcgagctgaagccgaagctgccgagcttcaacgtcgtcaggagttgagagcagaggaggtcagagcggctgcgatggctgcttctatgtc

SEQ ID NO: 964 - DNA, 28074 bp, Xanthophyllomyces dendrorhous
cgtcagggattccgacctcgtcgtcatcttcggcgggtgggagaggaaagataccaacggtacgacggtctctttctttgaagtcaacagttactcataaacccttgatggatttcctgacctcttccttcgctttggtctttgtctgatgcctcgtggggggcattcttttgttctattctatttttttgggggaaaatacgaacgtgtagtattcgggagtccgttcttcaggatacggtccaccacccaaaaagaaataaacacacatctcaactacccggaccacttttctctctcctcttcacaccgcctttctcgaacatctactgaaccgagatcgatcggtagaccagcgcatgctgatccttcacgtttggtctccgagtcttacagacctttgagggttcatccctaaagctgacaacaacgaaagaaggaggagagggaagagagaaaagaagggatggagcgctcgcttccccaggctggtggagcttcatccagatatgtgattcatggatttgtaattatcagcttgtatctcgcattgaaggggtacctcgagggatcttagggaaaggaaggaaagaaaaaacttggatatatcaagatcgaagatcgaaaccatagctgaagcaaagatggaaagccaaactcatacgcaagagaaaaacagagacataagaggaatttaaactagatgagaagcaccgaaccgttgtacaatccgacacggttcgacgagatgcgactcggtacgacgagacagaacaaaacgaaacaaaacagaaacaaagaagggtatgatatgggatggtttctttgaaatagtgaaggggtgatagaatgatgggtctgagggcataccacatcactatagatatatcgacaaaggattcaaacaaaacggattaggagcaaaagagagaaactaagagaaaaaggagaaggagaaggaggagtatgtacgtatagaccagaaaacctcgtgttctgtttttgttctgtaaagctgagggcgcaagtgaagcgcaacactagcaggagacggaaagagagagagagagaggggaaagcgggaaaaatgagaacgaaaagaaagaaaaaggcccaaaaatcatagaagaaacagacgatacaaagcagaaaacgagagaagaagattgggtaatgtgtacacagaagcgaacttgatcttggacttgggctcgcatcaaggttaggactcgaatatgagtctattattgctctccaaccaaggagatgaatcaaacggactctagccagccctcttcaagtacaaggagaaaaaagaagtcaccaaggctacagaaagtcaagaggagagaaggataaccaaaggaacagggtatggcaggaagcaaagaaaaagtgataggagaactatcaaatgaaagaggatagagaaaacgacacaaggaaggaagggtagacgtctacgcctcgtcatgctacccttacctgatcggccgatggacgaatggtggtaggctagggctatggctggcgttgttcgggtatcgactttggtacgatcttcacccacatatctcttccccaacgacgcctgtttgatccgaagaagcaagtgaaacgtgagctttgcctcaccgagaaagaggatagaaagaaaaggaagaaggaaagaacaaactttctgagttgttcccaaccagcagagaccttgttccttgtcctagcgcccgcatccagatcctccagaattgatcccaaaaggcaatctctggtgtcaaactcgaatgtacgtaacgtgtctagagtggtcatcagcctattgatcaacttgtggtgaatcgcaggttcttcgtccgagatcgttgagggcacgcagaatatacggccgaggaggtggacgatagataacccgatcatggaggtgtgtatgtcgagtgtgtaggaaagcatcggtctaagagatgaggacaaaaagaggatggggatcagctcgactggccagagaggcctaaatcaagaggagacatttcgagagcaagaaccaacctctccttccatcgctagaaagataaaaagactgatgagcgacaagttcttcaaaggaggtatggaaagaagaaagggaaaaggaaaggatcttacttggagaagcatcgtcaacagaatatcagctttgtccgtggcttccgagacttggtaagcgcctatcgaaatcccgaggttcccaacagtcagagccaattggaggatacccaacgtcagtgcacgtatcaatgtgtatggtgcatcgattgctaggcatcaacggacgaaccttcgggataactcatgatggacgtccagtctgtcatgttgtgcatgataggagaaaacacaagtagtgtcgagaagaacagggggagcgcggtaatcctgttatgtattgagggtttccgatcgaataggcagaaggcggtaaaagtagaaagatgagtcagattcaagtgtgcgagtagatgagcctgaagataggagacatccgatactgacagatctatagagaagaacgagatcgatgaaaggaagagaagagaaaagaaaacaggacgacaccaaaggtgcagattgttaagcgaatcatcggtaaggtgagatggataaacgagagaagaacgcaaaacacttactgtgttgagcctgatgggcgacgttccactctacaaatgaggcaaacagtttccgggaagtctcaatccgagtgaccgtttctatgaccaacccgggctgttctgggaggattagtttgttgtagactgtgtacacgtgaaattgaatttgttcggttttcgcgagaaatgttagtgtatggaatcaacagtagaaagatagtatcggggagttgatcaaagaagagaaatgacttaccatcctctgtgatgaattgatatgttccgttttgaagtacgtgatccaccccaccacaccaaagcatagagagattattaattatggaaaacacgacaaacataaccaaaaagaactataggagaaagaaaatgggaacgaacccaagcgatcgctcaaactgagataagcgaggatatacgaatccacacccgtgatatctgtcgagagcctcatgcattctttccaagcggccgtcatagaatctctcattaatggcgggttcccgttaaggacttggaaacttttcagtcgcgagttgtttgttgaccgagtataaacataggcatgagcatccagtctaggcatggaagcaaagaaaagagcaaagaagggagcaaagaaagataagaagaagaaaggacgtacatatgatcatggatgtacaggattgagtacaatctagagatctccaagagaaagataccttcttttgagtgtgcgtcctgcaagctggtgtaatgagccatggcccgagggaagtggagtgagtttgccacttgaagagcaaaggcgtgaacaaggaaatcgcagtgccagactgagaagatcaccatcgctctatattcaggcagagcacgaagaagaagagagccaaatgaacaccggttcgaacgagtggctgaagaaggaacagagaaaatttcgcaaacgccagaagcttcaagacaaacctaacatcctccatcccgacaccctcaccacaggcctcgacaaatctcccgatcgccctccgcacggcttttactccgagaaggtaagtctttttattcaaagcccttacgctgaccgtgactggaggcaagtaggttcattgatccgcaagaaaatgataaccttgtggtcagaggcgaggtacatgaaacaagacgggcgagtgcacgaagagagggtgaagggaagctaacctgtgacgtcaaacaacaagggcgacgatcttctgatagccttcatatgatccctcgtgaacggggaaggcaagaacgggatggacggcgtgtggagtgcgaggtctgagatgtagctatgaaaaaagggggaagagaaagtaagaaagttagtgtggtagcgtagaagaagaagggtaagtgataagaggaaaagtatgcctacaattcgattgctgcaggagatacagacgagagagagaaagaagagagagagagagggaaagagaaagaaaaagagaggagagaacacgaagtttgatcaacgttagcactaggaggatcaataagatatattctcccgcgcactcaccttgtctggcttcttcctcagagatgatacctctgtcgactaggtcgccctcatcgggtgctctgggggttttattatcgattggatcatgctcgccatacatccaaccgtctgaccttgtcttgtccatcaactctgtgaggccgggcaaggtttctctcttttcgacagcctgaccgaatttcggattttccttggagccggaaacaatcacggtggccggggcaggcggagtaccatcactgttgctatgtgaggagtgtctgacgaaagaggatgggtatgtttgatgtgtgggcgatcttgagcctcttccggtctgtgatgggtgttgtggatgggttgatggatgctggtggtgttgctgctgatggcggtgactgtaagaaacgccgggatgattcgggcttggctgagctgttccggcgttgggagaaaagctggcaaagatgcttgaggatggaccgggcggagggatcgagccgttgatggcttgatgagggtgcgtggccggatgggaagaggaggaggaggaaacgaggagggagtgtaaggaccgtttgagctcggcaacttgttcctccaaggaaaacactctgtgttcgagaccgtacgtcggttgggtcgggaagagggtggagattgagggaacagctgtggcggaggaggatgaggaggtcaatgtatttatcggtcggtgctggttggtaaccgggtcggctggtctggaggaagccgaggatggggacgatgccgtgatgaccgggttgatgtttgagctggtcaagtttggagtacctagattcgaggtggatgaagggaccgttctaaaaggctgtggatcggacagagtgatgggaggcaggaccgaccgacggagcgagagttcggcttctccgtggctattggcgggggtgctagcggcggtggtagcagaggtggtcgtggtgggggtagtggtgacgggagcggatgctctcggtctacgtttcggcgcttcgtatacacagatgattccggaggacagacagcctctgcaaggggttgtgttggtggatgtaccgtctgggcctagttctcgaacgcatttcattctgagccaagagtaaagagtgaggagagaacgcggttaacgagtgacgaaaagaaaagaaaaagaaaaagaaaaagaaaaagcggaagacgcgattaatcttacttttgacttcgacatcgggcgcctgtataaattgaagggagtgaaagcgaagcgatgttgggtgtgagcaaaagaagaaagtcaaacacacacatacaaagagggagagaggaagaagaagagtaaggaagaaagcagagtaggaaagagagaaagaccgtggagacttacaagcctggacggttctgttgatctttccgttcgcacttccactcccaccggcgccgggcataccgacctggatgacggacgaaagggagtcgatcggttttgccgatttgtctgctatcgaggctttagcttcatccgaggcacctgcaccaccaccggtggatagatcattttcagcaggcacatgatccgaccgggtatccatctgctgatcgtctccgtcttcgtccggatcttctgatcggggtctctttgcgttggagggatccatcttgatggatgcggatgtatttgttggatgtgtgtgagaggatggttgactagggtgatgtgtcgagatggcagtagatggtcagatggcttgcgtgtgcgtgtgcgtgtaggtgtgagtgtgagtgtgaaagagaggaagagcagaacaagaggagcgggaaggaagaagggaaagagggaagaagggaaagagagaaggaagagagaaagaaagaaaaaaaaaaagaaaaaaaaaaaaagggaggaagcccggatccaaggaggaaacgccgacgaaacaagccggaggaagaaagcgtaaaggaagaagatcagtaaagaatgacgaccgagctctgatggatgacacactaactctggaataacagatggatccgactcgaacacgagacagagaacagagaacagagatagcgagagtctttaccaatcaagtcgggagcgatacacgtcgtgttcactgattaaactaccgaccgacaaggatgaacacagagaagactgcagaagacggacgatgcgaatggagaacacgcccttccgtgtgctcactcggaagacaagatgctcagcgaacgggaaagcctcaagggcagccgggaggatggagggagagaaaaaaaaaaaaagtggaggcgatgccgagcgatcgcatcacaatcggcccggctaatcgatcattcgctaccccgggcggcgaacgtgggcgtgggcgtgggcgtgggtcagggcaagggcgtggccaagagcgtggaagtataggcatggcgcggacggtctcaggcaccagcccacgcggcgggttcaggcacaagtccaggcaaacgcccagagacagcctcgggcacaggtatcgtagcggcggcggaggctgtgggggtcatcgccgatctctagactggccggctccagaccagacccagtcgttgtttagctctcttttctcgtcgtctccttcgtccgctcaacattcgctctgtctcttcactcgctcgtagttcactggccgtgtttcgatttctctatcttattgatcggcatgtgtttatgtgtatgttgtgtgtgtgtgtgtgtgtgtgtgtgtgtgtgtgtctcgtgcgagaactacaacccgatgccgagctttgttttgccttctcattaatatcaccgtacggccgcccgtccgcctgttccaccggacgcttcggccttctctacctagactctgtttttctttacgccctccaacctggcacgtctcgcgccgccttacagactttgggcccaggtgctgaaccggaccctttttcggtcatcgtgcggctgctattgttcgctcctgcaactcgccgtcttttctcctacgcaacgcttatcctggaagagataagtaaacatcattggatattccctgattgtctgttcgtttttgtctttgtctttgtctttgtctttgtctttctcccttcaagacgtcctctatctattcactcccaaagagccaaatataagaaaacaagccattttaggcgaacaccttggtgacgcccaactgatcctcatccaaccgcctgacctccctccttccttcggcatccctttgggcgtcctttctgtccttgtactttgtgccgagctcccggttgctggctgctcggattgccgcaggcgtgacgaattctgaacaaaagagaaatagagaaggcaagaaagttaaagaagaaaagcgaggtaaaaagattctttgtcagttcaatccaacaaagacacaagaatacttgacacacgcgcccaagttctcccaggcatccccgcacctcgcacctcacacccccacgccctatactcgacaccggagaggaaaaaggggagaaaaaagaaaagaaaacgtgtgaaaaggatctcaccagcattctcgtaaacggtagcaccagagaaactaccctcgaaaattcggatgggcgtcaacacgaaccgaggtccgatctcaacgagtgatgtctgaggcggtccgttgggcaccatcgggtctttttccacaatctacaggttgcgcatcaagatgcgttggtgtgtcccgtttacagagtcagcaagtcgcgtcttgactaccgcaaagaaaagaaaagaaaagagaaagtaggccagcaggtttggaacacccacctggtagtttcggaaccaaatcttgttgtcgagaagagagaacgtgaggacatgatcgatgaacggctttgtctttctcgatgactttggcacactgaagatctgtgctcatagccggcaagaagcgtggtcagacatgtctctgtttccaaatctgtaggcaaacgcaagaagcatcgactcacatgggtcaagacctctcgcatcaactttgactcctccgaagagtcccagcctccatcgaaactaacgatccccctcgaccccttcagacagtttccagtcatcttcaattcgtccatagtgtgaatgttcaacacgtgaaacttgatgctcggtccgttgggcgtcttggaggcccacatgtagagatcctcgtgtctcctggcttcaaagtagagagcgttgttgcaagagtgcaggtccgcgagctcgttcaccaagtgcaaagagtttttagagtccaactttgcgtctagagagggcgtgtgtagggaaatgagttggtaccacacagtcagctgggaatccctctcgcttcttgatacatccgaacctctgattgagtagcagacaaagggctcaactcacccttcttgacatgcggcaaaagaacctcgagatcacccatcaagtgtctcattcgctgggtcactcctcgagagctgagcatcaagacctagtttcaagcattgtgtatgaccctcctgttcagtattctcgtcccctctctctctctctctctatatgaagccgagtaaaaacaaagcatacgaaccttgtcctttcgcctcttgacgacctttccaccggtcgaggtcgaagaagcagccggcaaagcggccacactgtcatcctcccagtcttcttcgtccgctccttcactggcctttcgtttctgcttctgggaagcagagatcttgttggctgacttgtgaagcgaggccatgtttgtgggctgtgttggagtgagggtgagtgtgtgtgcgtgtgtatgtgtgtgtatgtgagtcgaggtgtaaaggtttgaggttcgacaggcgggaggatttctcaaagattggagagtccaaattctttcaattcgatcaaggaacgtagtgtgttacggggtttgcatagcaaccgatcacgtgacatagtaaccaacatcacacaaaccctcaccactcgccttcatccagcccagccgccacaacagagggacgacatccttcgagcctcacacggttgtcggcaactaagattgaccgaccggagcgagaatgtcgtctcggccagatcagttgaccttggaaaccttcgactgaccttggacgctctgctcgctcgatacaccatgctcttccaggccgatcgagcaagagagtgtgagcctggggttggtttccagtccctcaaaggtttatatatgttgcctttctcattggatccttctctttccttcctttcctttgctttctttcttcatctttcttccgtggtcttgttcgtcgctaacaggagactcatacaagcaagcaaacaagcaaatacacacacacacactcacttactcatccacacacacacactcacacctacagtcacacaaatgtcctcaaacaaggtcatcgtagtcggaggaggactctccggtttgacagccgctcatactcttctcgaaagaggtgcatccgtccttttgttggacaagatggggtatgtccatgaagtcttgccttgtatcgtgtcgtgtgtccagccgagtttcctcttgcttaccgttcgtttggcgagatcttgtacagtttcatgggaggttcgtccaccgtttaatcctctgtttggactgctgccaaatccatcttcccgaatggtgctgaccggcgaaactcacgtcttcttgttgtgttcttttaggtaacagtacaaaagctaccagtggaatcaatggaggtaagcacaatatcagagttcatctctctatcgctcggttctccatcatggcctcggtttgtagacctcttgttctgacccttctgttctctctactctctttgatcgatcgatctttatccagcgggaacacagtctcagatcgagctcgatatgtttgtctagtctcctctgtctctttcccggacgctgtgagggtttcctgctaacgtggggttctttcggggagaacatagtaaggacaccgccaaaatctgtaagtctaacatgatctgtgctctccctttcggctccctctgctgacaactcccctgggcgcatccaaagtctttgacgacacaaagctgtccgccaaagatctagcccgagatgatctgatcaaggtgttgacgtaccgatcggccgatgccgtcctctggctacaagagaaatttggactcgatctcagtaaggtcagccggctcggtggtcactcacaacctaggactcatcgaggaggtgcccaatttcctgggatggtcagtcccttctttcttgtctgagattacagtatgtctgcgcatcggacgtctggctcaacatttctttctctccgctttttcgcctcttttgtacagacgattacctatgcacaaatgggtgagtgttcgcttcgccgttcgcaccgagttttgcctgctatggcgcaaagctcatttttcactattgtctgatggcttaacagaaaaacttgaggactacgccacctccattccggatagagtcacaatcctgaaaaaggccagggttactcagctactcaaacaagacggcaaggtcatcggtgtcgagtttgaacgagacggtaagcttcacaaggaactgggacccgtaattcttgctaccggagtaagtcgatccgtatcgttggttgtcgcttatccttattcctctcaagattcagctaaacctgaacctcatatgtttgcttgcatcgtagggttatgctgccgatttcggagacaattcgctcttgaaaaagtacaggccggatgtctatcacctccctactaccaacggagaccactcaacaggggatggtctaaaaatcgctgtaagcttctcgttcagtctttgttgctttgaaaaagaacccactggactgatgaaaacccaaaatcaaatcaccaccttcctctatcagatggcaatcggcggaaaaggagttgacttggataaagtccaggtccatccgaccgggcttgtggaccccaaggaaccagatgttagtttttccgttcgactggttcatccaatttgttctccttgctgatagaagaaaagtatacactctcccctcttctcaatctaggcgcatctcaagttcttggccgcagaggctttgagaggtgtaggaggtatcttgctcgataacgaaggacagcgattctgcgacgagctagggcgaagagagtaagtcttgtcgatctttctgaagcagtagtcatgtttctcctgttctcacgtatcgtctttcatctgcagttatgtgactggggagatgaacaagaacggaaagttcccgatccgacttctcctcaacggtcaagcttccaaggagattgaatggttcgtcatcggttcatacatttacccgcactggtgtctgccagaaacactgacctcggatttcctcccaaccaaacgtatcatacacacaggcatgtcaaacactatgagggcagaaagctcatgaaatacttcaagacgggtcacgatctcgcaaaagagatgggtatctcttctgatgttctgaaaaagacttttgagaagtacaatgaggttggcgcgaacaattcggatccttagtaagtatcgttctctttgtgtttctagctcgaaaaccaccgtggccgaaccaaagaactcaacctctcgttcgttgatggctttatagcggcaagagattcttcccaggtggaaagttcactattgacgacgagtatcacgtcgcccacatgactccagtgtgagttcctgtctcctcgtcaatccatcggcctgtctctttcaagattaatgttcaaacgggtaccctttatgcatatagtcttcactacactatggtatgtccaagcatgaaaatcagacctcaacatcttgttcatccggacgctgactgttttgctcactgtctgttctcttacagggaggtctcgagatcgattcgtcttccagagtcatgaatgaagacggcgaacatatcgtaagttcgactgatcagttatctttgttttttttttgtcaaaatcatcgaacgctctgttgattcttttctcatcatcttgtgtcggacagcccggagtatttgcctgtggtgaattggctggaggtgtacatggatccaaccgattgggagggtcttcgttgctgtgagtgccaaccgggtctgccatttgcttcgaactccttctgacatagcatttccttcttgtctggcgcagtggctgtgttgtatttggacgtgttgcgtgagtgatcatctctcgccctaatcaaattctttccgagtttaggacaatccaaactaagcaccaacctgggatgttactattgtcaattcaggggagataccgcggcctcataccttgtttcgtccatggcaaacgaaacagccaaccaacgactgggagctgttgccggtcatctcttacaagcgaaggtgacgattgcgcctggctcaaaggtctctatcgaagtacttgacggtgatgccgactcggacttttccaagttatcctcaaagtcttcgtcgccatcagcctcatcctctgccgctgcgcccccgccggcttacaaagcacaagaagagccaaaggcacagaagggaatcaatccgaaggagggagacaagatggtagctgggtcagtagtctttttcatcttcatgcttgttcatttggcgcaactcttctcatcggtcgtcatattttggggaaccttcattatctgtcgtctatgcacacatcagtaccgagcaagaggaacgtgtcgactctggtaacgttcccaaggaaaagaatacagcaaaggggtcatactcgatcgacgaagtcgccaaacacaacaccaaagaagattgctgggtgatgatcagtggagaggtcctagacgttaccaagttcttatccgatcatcccggtggagagaaggccatcttgttgtatgcaggtcgggatgcgaccgaggagtttttgatgctgcatgatccgaaggtcattcctagatatgcggccgacaccgtgatcggtaaggttgcttaaacttggacaggagctctatccgaatcttcttccccattctcttggtctgtgaatctatgacgactctctctctccagatcttgtgcattccattttcttctaaccttcttgggaatctcttgttgttaacctctttatccttttctatttgggattctatttatctagtcagtggtctagtttatcaatgttgtaaaccctcactccatgtttgtattcttgtgattctatgtgaatttaaatggcattcttgaatcattcgggacagaagtttgcaatccagacaaaacttcatatacatacatttgaccttggttgaatgaagaaccgaacaccatcgttcatcagaccagtcttgcctttttcttgtcttcctcaccctcgacaggaccgtccgacaaggccgagtggtcttcgtccacagctcgttttcctcctttgcccacctggctttccacctcgacgctcttctcttctaccttttgcgcatctccagctttggcatccgacgcagttggagccgaagaaggagcagcaggcttcgctttcttcttgacgattacgcctacaggtagtttcgatttccccttggcttttcctttcgacgccggagggagccccgttggtctaaccgatgggttcgtcgacaatgacgtggcggcggaagaagaagagggcttggcggtgctcgtgttggaggcagaggcaggcgcaggaatagggataggtggagagagaagtgtcgatgggggcgaaggcgacctacgttgagctctgtttcatttttgattcaacacgagcccaggtaagaacgcacagagaagaaaaagcggagacacatgttgagaaagggaagagatccacatgtgaagcttgaactgtgaaggactcacgaacgaaaagcggctaggacgtcttcgtccgcttgtcgacgcgctctttcttcttcttccgatttcgtctattttatcgacccacaatccaaacatcagtccaagaccattgtgcttctttccattgaataacaatgaatctacagaggctgtaaaagactgaccttttcagcagctaggaagtttatctcttcgctatctaatcctctgaattggttgcccatcttcattctgagacgcaacaagtataattccttgagcctcatcagcttcaactgatggtcagacaaggagcagggtgaacgcacttttcgtcccattcttctctcttgacatcctgttcgacacatatcgtcaagaaggaaggatgatgagatcagtaacatcctccacgtccatttacgcgcctcctgccgattgaacagaacgctagatgaaccttgttatgtttgagtttctgcgtatgcacagggttggtaaaaaaaaatggtttctgtgagccttgagactcactatctcggcgagagagtttgatgagaaatgatgcaaggatcatacctcgaacaacgatctaggatcatactcttcttcttgaggtctcggtggaggttcttgcccgattctgatggcccaagaagattgatcagcaaattggatctgcaaaagtacgatgcaagagctttcgttaccttgcataagccgctttctgcaagagaaccatccatcagaatcaatcatatagttttaagaacaaatgaatatcgaaaggtagaccaatcagtctctacaagacggtcgatagagatcgaaacgaacccattcttcatccttattcgccttgacctggtccagctctgtctgggacacgaatctacttgcgactcctcctgttgtgttgagtgagaagccagacatgatcaataaatcgatggatgtgtccagcaatggttgggtcaaacgctgctagctcagcaccgacggctttctcggtccacgccgagacggctaaagaaaaaaaaaagaaaaaagggccgtgcgtttttttcttcgccccaacaagacattccaccatactcccatcaacacactcttctatccaccatgttcgccatccgatcgatcgtcaaacaggtatgtgcaatggtgatttggatgcatgcgacgttctttagctgtctggcttgctgacagttgcttccttttgtatttttctttcgttcttcgctatctcctttctggcacgaacttctagccttccaccgcccgagtgggattgatcaccaggtcactctcggccaccccaaccgttcactctccacttgccacagcgtccacgtctacttcttcttctgcagcatctacctcctcttcgccaactccctcttcatcctcttcgacaggttccgtccgtaaagcgtcttcccgaccgaggccgtccaaaatcttcgatgacggcctgactctcggtgacttcatcgagggtaatcacctcgagccagttgagccagagaagctgaccttgggaaacacctcacagtgcgtttgtttcaatcgatatgtttgctctcttgcttgtcctatgtttcatcttcacctcggcttaccatctgttgtgtcttcgcatatgtcagacctcgacttccatcttacttaaaacactcgattcccgcaggaggctcttactcagccatcaagaaagagcttcggggactcaagctgcacaccgtgtgcgaagaggcccgatgccccaacattggtgaatgctggggaggaggaggcaagactggtgaggagggcaagaagggagctaccgctacgatcatggtacgtcctcccctgtttcaggctcacgttgttgaagaaaccccgagagtccaacataataacggtatcgatcggaatgttttcatgcggatcgagatagttgatgggagacacatgcactcgaggatgtcgtttctgttctgtcaagacttccagaacgcctccgcctctcgacgtaaacgagccagagaacaccgctgaggttagttcctagagcctttttggtttgattagctgagggttgaacgctgactaaaacgctattggtctattcaaacaggctatcagccgatggggcttgggatacatcgttttgaccagtgtcgaccgagatggtacgtcattgttcaaatctatcaagatgtataacggagggcgctttcagtggaaaccagtgcagcaaagttctcatcttatcttcaatgacactcaacagatctgctcgacggaggatcggcccactttgcttcaaccatccagaagattaaacaaaagtgtgtcattcttcttcttggatctctgcctctcttccttgtcattaatccaatcctctctctccctatctcttcttcagagctcctcatattcttgttgaagctcttactggagatttccagggatcaacaaaggacatcaccaacgtcgctctctctggacttgatgtttacgcgcacaacctcgagactgtggaagacctgacgccgtttgtcagagatcgaagggcaaagtacagacagagtctggaggtcctgagacatgtcaaggaggttacaggtggtagagtcgtaaccaagacgagtttgatgctgggagtcggagagcaggagcatcagctcatgcaaactcttaaaggtccgtatcgtttctttctcgatttttactttgtatataaatcactgatcaatgtctcttgtccttcctcctctatcatatctttcgatcaacagatcttcgagcaaatgacgttgatgtggtcacatttggtcaatacatgcgaccgtcaaagaagcacatgaaggtcgatcgatatgtcgagccagcagagttcgataaatggaaacaggttgctgaggatatgggattcttgtacgtggccagcggaccgctcgtcaggagtagttacaaagctggagaattcttcatcaccaacgttctcaacaagcgtagggaggctgctcgagcaaaagagcttcaggctttgaacgaagacgtccggctcgcgcttgatgggcagattaagaaagaggcttccgccacgatcgaggcatagtctttctcatctctctcttgacgttttccccacttccttgttctttcactctgatatctcttccattcacctttagaagctctgcccatatgttttctctcctcttcatccaatactacatacctcgccatcactttctttctttccctggctactcgatatctctatccgctcttgtcttatgtcttttgtgctttctttcgactttcactcgcatttaaaaaatttagaaaattcccattctctcatctttccttgtttctgctttgtctttgatctgagtttagttctggttttggtctttgttggtctttttttttcttttgatactacagtctttgtccattagtgttattcaaagattttctatccccgcgcatcttagaggtttactcaatctaattttttttcatcggtttgaatgcgcttgtacgtgcgtttgtcgaacaaatgatcttgtgatcataccctgctgttctagcttttcgtctcttaaacatatccgttccatatataaacaatgatgtagaaaatagctcaatctagcctggtacaagaggaacgtacgaaggggaaggaagaagaatcaagggaatatgatgaaagaaaaaatcattctgaactcttcatccggatgctcctggggaaggattaacccaagtaccgttcggccagaaagtacccgccttcgtgtaatccccagatacaccagatgcctgatactacggattcccatccgatgatattcgttgttcgtagtttgacaaatttcaacccgttgacggatatcagaatgaaatgggcagaagagggcaaaacgaagaagaagaagaagaagaagagaaggacgtacggcaagtcggaagaagtagggggctgaaatgttgagtgcagttgccgtgtagtctgaataacgacaagaaagaacaagatctttgttagtcgcaagcttgaagagtttggaataacataaggacaagactgctcagaaagataaaaagcctcacttgttccaaccccgacaaatcgctctacatcgtttaacaaaagactgaatccgtcccaaacattcaccagatccgccgggatcggttcccatgcaacagtcaacgaccctaaccccgtttggttgagtgagaaccgagtggaattagcgataaacgatggtagggtgcttcctagagctgcatctcttcgaagctattcagtcatccgatcatggacatgttgaggcacgaaagtgagaatgttaggcataaaatcatgtgagcggatgaaatgatgtaagggaagcaggagataaaaatatcttacgaacctcactggctgtctgtaatatagaatcatacccaaactttgccactccatctgagaaaatacctaacaagagcgcctgtagtcctgcagaaactcttgtggcaaaccctagggcaggcatgaacatgatagcgaatatgtagtggtggagtctaaaagtcagttctggaagctgagaaaggacaaggattgtaagacccagggcgacagtccttcgaaaaagagatttgaattaagaagggacttctgtcagcggcctacgctttctcatcaacattaatctgacaagtacagataggaataaaagagagagaggcagaagagcacaagcagaagagtaactctcaccatctgaggtaaaatcctaaccacccagtcctccacatcaccctgatctgatttcctgcacagatgacgataaccactatcaaaatgaccacccatatgactccttctggccgaatgtttccagctgtaagggtatcgattggaattttggctgatacaacgttgatgagcatacccgggtagaatgggcctagatagaagagagtcctttcgaaaggagaggagaagaaggaagggagggtgaaccgataggcaactgaatctcggtagaaaattccaaatatatcaagtcaaatcataagaagagattcaatcaagaggagatatgattagttcaacgtagaaccttacctcgccagaaaaagtaaccgacgaagagcgttggaagaaaatcttgagagcctgtggaaaacgcagggggatagtctctcggatcagacatagtgtacacatgccagaacccctgacagactaaggtccaaaactaaattgagacaagcagaaggatatgagcgatcttgtaacagaacgagatgatgagaaatagacacaagaaagaaacagaacgaacaaagacgagcggaggaggatccaagaaaagactgaggaagcttgtcatgagaacgttgaagactagtacattccatcgaagatcttggcaataagatgtctgaacatgggaaaaggagaatccgagcgggaaaatggaagggaattcgattgattgaactgaatagtgttcacgcgcgtatagtcgattaaattagaggcagacatggtcagtcacaacgacagcgcagtgcgctggacggcgatgaagaaactcacgatcgtttcgaagagtagcagggaaggatgacacgttggctcgcatattgatcaaaccgcaacctccttttctgttgtctatgaagcctgcgtgaagagctgcggaacagatgaaagaactggaataaagaaaagcagatttcataaacgaataccgatacgccatctcattgagtcaccatatatctaccatgtatgttcacttagtaatagagacataacaaaccatagcaatgaacttactctcctctatataccaattcggactcttccgattgaccacctccaatgatgaatggcacgtagtctggctgtaaatctcctacagcgcgagtattatagataatttgagaagcgcatccggctggacaacgaaacccgataggctctgatatgttagaaggcatgcactgtacatcaaaggagttcgcgtttttttcgtgagaacgaaggtcaagttcatgacaatgatgttaaatgcgaaagacacgcgcaagagacggaccgtagcaccatcaagtccacagctatcccttgatgtccaaaaagttgaggtacaactaagaacttgaactccaccagacgcctccggttctgtactgggcaagaaactgttcgcccggatcaagaaactaaaccctatgatccaacttgccagaaacaccgccaagagagttgcatgtttccatccgccatgaggaaaccgacggcgaaacggctgtagatagtgagctgtgaaccatgtatctggatggaaagactgtcgagtggcattgataggtctgtttcttgaggatgatggaagggatatggatacagtgagaagaggttgaattgacggaagcggatgaggcggacttggacctgcaataaacctctgggctcgtcctatccaattctggactcgaacaaatgaagctggtacttgacgaaccggattgtttgatatgacagaagctgatgaatcggttctggagaagggcatgatgggaactgtctcatcgaaaaaagctgaggaggtagaggtggaggatgcagaagaggtagataacacaaccggtattgttgacgatgggactatctttgtagattgagcagatctagagggcgatcgttccgtgagatgattgatctgaccgagctctatcctatcatccctactgcccagcagctcgttgtcccccatggatggaaactggatggatgatggccttgatcgtacgctactgagtacgatgatggttaggagatcaatagagaggaatcaaggctgtgcctctcacgtgacaacgaaacgtcatcgatcaagccctgccttcactttctctccgttttcgatgacttcaactttgaaccgcaaccaaagacatcatgaacatcgcagtcatactgggctcctcttcaggaggaatcggctctcatctagctcgtatgtaacatgtataggtgtatctctgtctggtctttccaaaagcttatcgatgttcttttaagaacacatccttcgctcgactgcccttcaggtcgtcgcgctttcctccagacctacatctcaaacacttgatgctcttctatctggatcttcaaactcgtcgcagtggaaagaccgagtgattccattccaggtggatgcccttagtggttctttcgatgcgcaacttcaaaaagccgcacgtgacgttgagcaagctttggggaagaatgttaggctcatagtctgttcaagcggaattgttcgttctttaccatctacttgttcttccctttgtttccagtgttctggtatgatgagcctaacaagtggtgtatcaaatcgattattcctccaaaccaaagcttcaccctgagaagtcaatcagtcagattgacccagcccactcgatcgagtcttacaaactcaatacactctctcatctactcacatacaagcattttactccgctgattcctacgattaagcaattcgagacaaaatcatcgtccgataacttcgaagatcctgctaaaggccttctcaaacccggactgggggcttgtgtcagcttgagtgctagggttggaagtataggggataataaaatgggagggtacgtccggcctctacttgtctcttgaacatcggcgagctggaaaatgagtactaaaatgccaacttttatatcttctctggtctatcattcaatgtatcaaactcacttcagctggtactcctatcgatcgttagttcagtgcttctctgtctcctgctcttctgttgtaaccctagctgaccttctgctcttggcatctctaggacaaaagctgctgtaaatcaaaccattaagactctcaaccttgaggtctgtcttcttcatcatgctttagtttttgccttgaaatccatcaagaatcctgatacagtctcataccaaacatgatcctatgtcatactctagttgaagaataagaaatcatcagctatatcactcgcatatcgttcgtcctagattctttccctcttttgatacagattgatgttgatggaaaccaatgaccggatttaacatttgattgacatcttcagatccaggaacgacgaaaaccactctctcgtccccattcatatcttcctcgaccccttcatcgcgatcgaaagggcttttcgaaccgacggaagcagtggaggaactcgtcaatgtattgagtggactcgaaagggagaaagatgggggtggattcagggactggaaaggggacgaggtgccgtggtgatgaagattcggtggttagaacgaatgaaacgaactatggacatatattctgtgtgtatgtgagagaagtaatgccacggacgcgtaatctgcgcggtatgctttcaaaaagaattcttgcgcaggtaaaaaacaaaggcatcaaggctgtgaaggatgggcaatttatcaatagagaagcaatattcaagacaaaaataacaaaacagataattaacaacataagaagaacaaaagggtaaccaaggagaagaataagaataccatgcaagcaaaaagaagaaaaacgcgtatagcttaatctcggttctggttattaagtaccctcaatacctggaggaacaagttgatgatatccaagtataatctgagagctcccatgatatactcatcaggcgagagcttgttcatgatggcatgagtctgattgggacacgcatatgaatgttacagaatgcgtcaactaaaaagacacacatctgtgaataacacctataaagggaggaacttacatcgaaaagaatgtatccggagaagactagacaaccgacacaggccaagaagagatccattcctcggctgaaagggaagaagaccgaaaccaaggaggctgaattgtaaaacaaacagagtaggtactgattagataagaaaattcgtgtggatacaacggtccatgttgcaagtagaggaaaacatgaataactcactagtgaacataaccattattccaccgaaaagccatggagcaagtccatcaaagtcccacttggactggagcgtaaagagcgagagcccgacgaacacgcccaaggtgatcaccaaagcctgaatgacgactttctgatcataatatctatgcgcatttggagagttgtgaggtgttaagagcgtgtgcttactagccttgaaggtcatcaaactgatgtgaaatgaaataagataaatgacgtacgagaccacagtcccaatagaaagagactcaaacagggtgaacgctccgaggaggaacaggttgagcgggtgtgaatcaatcttccaaaacaaggtgaacaaggaggcgaatgttcccaccaacggaagccagaagaaccaggtgctatatggcgcgtgatgtagacgtgaaagtcagtgggaatctagcgaatagaggtgttaaatatagagatgtgaataacctacttctcctgagtccatcgaatggcggcaggctgactcatacctacagcaacaatagcggtgaagaggagctgaacggccaagatagagtagacttttcggataaagcccatcctgatgaatgatacagaagaaagcttgtcaggactgatatcacaggtggaggcaaaaccaagatgatttaggaagaaatcagatgcacaaaccgaatcgagacgtcactgctgctaacagaagttccgaacttgaaatcgtcctcatcgtcatcgtccagaccctgtctgggcacattcgaatgaatgaatgcattctgggcagcagccgaggaagacgctagaagaggggcgtttgcgtcggctgtaggaggagcgggattgatagcatcgtaggattttggacccccactaggaggattataggcggggggagcgctacaaagtagattttgaaccagagtagtcgatgaagtgaataaaaatcccttttcctaacagtcaagtggaagaacttactaagacatcggacgaagaacagacgagtatgatgatgatgatgatggtggtgctattgctggtgggataagtatagagctggtggttaagaagtacaccaaggtcggtggcggtgaggctgtgctgtctgatgaggtcagtgcttgctggtcactcggctgccttgttacgtaatcatgccggttacgccggttacagccgagcgataagatcaagagaactttccgactttcattacaaccacagaccacagaccacagacgacatacgacgatggatggatcacaacatacagagtgtgttggaagcgatggaagcggtagcgggaagaaggaagagttcgacacaccagaagagttagaggaactgaggagtaatcggtcgtggatccttgtgtcgttctggacagccattgtgctttgcctgccgtactggtggatgtcgacctcaatagaaaggctcgcacttccctccttggatccttcttctttggcccggctttctgttggtctctttctcttctgaatgatttcactacagtcgatttgagaagaagcccaaatccttcctgagctcattcaattatgtataccctgcaccagccgccgacatttgtggaacatgtctgcctgtcttcaaccgcgagggacctgacggaggagtctctccaacaactcatccaacagcttcaatccctaatttcagatagaggtagaggtctggaccaagataaaattcttgtctctcttgcaaatacaaccacttcatcttgtggtgtatcaggcacgtcaattttgacctccatcgcattctctatattcatcattaataacttatcggttctgtgttcgatgccggctatgtttatagaccatgttctttctttcccagctcatattcccccagcaaccgaactagctcaaataatcgatgatctcttgccgtcaactcaagcgctgatcagctcaacttccgagcacgggtcgagatacatcaagtacgcatcgcgacttcgactgagcttcacattgcttctagaagatgttacggagagcgaggtcaccgactggaatattgaacaaggccttgaaggtatgtgtttggcgacttcatttttctgttgccttgttgatatcatctcaacatttttcgatacagaaatttttgagcctttcttgagatcactttcccctatacacaacgtcactgttcgttctcagatccaatatcactgccctctatccgttgagcctatccctctttcggtcttgagaccaggtagtgaacaagaggaacatgaaagatgggtcgtcagatcagacgatgcgagggctttcgtgaacactgaaaaatgggaggttgatacgggtgatcaaagtacttacggagatgaagaggacgtcagcgtgttaaagatgatgatctttgtgccgagaacggggagaaaggatatgggattcgagattgaacattctggtatgtgttatgtttccacttgtcttttttcctctataaccgtctcttatgctgacgagctcaatcttatctgggttatacggctcatttgaactgtcaaagatgagttgtcagacacgatccttctaccgcaacaaggagcactcactatccttccttgggccacaagcgtcggatcgtcaaagaccctttctcttgataaccttcgtcctgttcttcaaactcaactccaaacactgcacaccctcctttctgtcccaccctcaacacatgttcgttatgcggttccatccggatcaggcatcacatccttccaactctcgacgatgcgccgtcaacgagcgatagagaatgtaagaagtgcggttgaaagtctgatggcgttggagagattggtaatcaagattggagaaatgagggtgggaaagaacgtcagagagaacgtggctaatgctgtgggtcagcttgagaaggtttgtctcttctcggatccttcaggcctcatctatgcttctgcaagacgtatattgacgcatgaaaatcaacttgtcaatttgattttacacatgtatatttctatcatctgtctacgcaaatctcacgttagattgttctctctacaagtcctcaagagatattcgaacgatcccgaacggcgctaaggttgagctcgaatgcgttcttcaatcctactatgcttggtcttttgtatttcgtacgtctgatctttctctcgagattggttgcagattttacgaattataaactgactctatctaccataccgtgattttgttcattgatgctggacaatatccagcctgacgagcataaatacgcagtctgtaagtgtccatcctatcgctcccatcttgcccgttcacgactgaccaactctcttgacttctccttctggcgttgcacaatctgtctgtgttccttcgttatcatgcgatcaaaatgcaaagatgcaccgctgtttgcacccgtaggcgtacctctcatcgtcagcgtctttcaagcaattcgtagaagaaaacgaagacgtgcgttaggaaaagatcaagcccgaacgtctgttaatcagactgtcaatcagggtaaagagcagaagaaatctttcggaatggaatgaatctttgttttggccggtcgtccaagtttaccattcttgacacaaagagaagaacaaaggaacagaaatagagagagcaacaaagggatagcgaaggtttggtgcgcatatagaacgaaacacatatggacctgtccggtctaaagagaaagtaaaggagaaaaccaaagcaaaaggtaacgagaaactatttccgaggatagagttgtgtatcgagagtgaagcgaacgcataatacaaagagatgaacacagaaagacactttgaagaaagaagttggtatggaaacgaaaaggaaatgttaaagatacgaaagggaaaagaatgaaaacatagtacagatccatgcgagcgattcagagagtctattgtccaagatgaacagaacaaaaaaggagaaaaatcctgacgatctagtagtgattgaaaaagaccataccttacccactcagccctaccaatctgccaagaactccccatgcatctcccacccgcattcctgctcctgtgctcaatcctcctcctaaactattcacaactacatccgggactaaattctcatatacttcccgtagaacaaacactattgtcgccaaaacaagcgctttgagctcagacgagcttaagcctgatggttgccgacgagttatcattcgagagtttgctagttgtgaactcggtctgaaacacgaatgaccctggttggatgaagacgacaatgaaaatgcatgtcgaggagaagaagaatcagacagcgcaaaattcgagaagccgagaaggagagcaaggcgcgttctgatgttttttgtcttgagcataatgagaaaaatgattgtccgaaggatatctcgactggttctatcacgaggtgcaagttcagagggtgaatgtggtcgggcgctgatctctgtacatgttggaaaggctattggggaaggcgaccccgatcgacaagaaacatacgacgtgactgagtgggaatcggcggaatcagggatcagatcgtctggttggtctatgctagaagcgaacaccgaatggagtactgtatctgctggagcgataggctcgagagctcctagatgatgtgttgttatttctttggcgtacgttctagctacgaatgggtcgatctcaaaaaggttaggcgttgaaacagtactaatctcagacattgtcgtccgacggcgcgtcgcactggaagcttgagagtgggaggagatttcactgccgagaggagactccgctgagctgtgtgtagatggaaacaaaattgacggtgttgatagaacatgggacgtttcagagc

SEQ ID NO: 965 - DNA, 61964 bp, Xanthophyllomyces dendrorhous
acatgggacgtttcagagccgtcaaacaaacgaaattttgggagagtgagctcgatattagtagggaagtccggaattatattaggcaatccgactaagcgatcgtcggcgctttgaccagagctacgaggacttgatcttgtctcgatttcgggttcgaaaaatgacgatgatcggctgtgctgttggcctttgacgcaatttggctgatgattgcccgtaggcttgccagattcgtacaatcgagtcgtagaagaaaactcggggcggctgtaccgaagctgaacttcgttggatgactcgccatgcgaggagatatatcttccgttgaactctggtgtcagcaaaaccgacaagatgaagatgagttgagttgttgttctttgatcttccagagatagctagcgctcaccaggaggaagggaagatcgctcaaagtatagctgaaacagttctttctccgacgggaacgtgatcttggccaaggttgatgttggaagcaaccgtttgagaatagtccaagcactagcccaccaccagccgaaccgcagaatgaacactgccatgcaaatcgccagagaaagactcattattagcagacagattcattagataaagtacataatgacataaagcttaccattggaacataaaccagggtactgattacgccccatgtccagcaagaaaggaaggatttccaattccttgagaaacaaatcgaagtcaacacctaggccagtacgcgcgcggagattgatggcgtatgcgtactacgttgctcattgaagctccttccaggtctactaatactgtgaatgttaagcatggagactgctcatcaagcttcaggtcccttaaatatcttctagcacactcaaaactccatctttgggagagcaatcaaatgaagacttttagcaagttgaaccgaccgcttcaagacaaaccggttattctgagaagacttgcattatggaatgttttaaacgttccagacctccatcgtctgatcgcttgactttattgagccgcagtacagccaccggtcgatcgagtcgatcacaacactcctctggcataaatttgaagaggttgacataggacttgtctagatgatcgaaatcaatcatttctggcttggattctactcgccagagtaggtgagcttgaagagcttcgattgtttttgtttgacattgatcggcgcgctgttcgattttcatccaagacacaagtgggtcagcaaaaagaagacaggcacatcttctggtgataagttgattttttcgatggagcaaccagggcatactttgaagaatcgaaagatggttgctacataaggttgtaagagccagtcaggaaacaggaatcagaggtatgagtaaaaactccggtttctcggcaatatccgttcagaagattgaacgcaccagtgtcccgaataaaagctttggctctttcctcatccttctgatcccatccatgtagttcagacagatgaggaacaacttccagcaagacacgttgctggagagtttgaacaacagaaaaattctgtctcaatgccaacaagtctgcttgaaccagggttgaatccattgatagttggaggccctggatggactatatatctgttcagcagggtgaatatcgatgggtgtagatgtcttctaggatgcccaggacgcttttaccactcacaaactagagttgtggatgtctgtcgaccgtttgttcggccgtaagaataatgatactcgagtggatgacgggtgtaggagaagtagcagccctcactcagttagtgctcgaggtcggctttgtcattcaatcacatgcacagaaaagaaacaacaagttttttgagagcaggacaagattattttcattcctacatcgttttggttttaattcgatcgactccacgtcctgtactctagattgatgaaagctcagtaacaacatatatactctgctctatgatatttcactcgaccctactattctatgtttgttccggtcttctgagcttctgaaaaggactgcttcaacgacgtctggtcgaccgctgctgctcctctagctcatcatatggcagtcgcatatccaccttgtcactaacatcctggtgtcgagcgaaagcacctcgctcgtcctcatgtgccacacgatcgtccttgatcatcctgtatgcatttagaaaaacacaaaattcccaaaagataaattgtgagacctttgtcgagcgcgaaagaaaatcagacagaatcgatcgagacagactttgagtttactcgggcatcttctccctctactccaagaacagcttgcggggttttggcttctaggacctggaagaagaagttaaatgaggaggaaggaaggaagaaaggaaggaaggaagttgtatcgaaacatcagcttgcctgacaacacatgagttattatagtaaacaagacaccaagacgaacataatggttgtcacctgtaccaagatgaaaacaagcaagaccatcaaagggcgtcaacaaaactgagagaaacggtgtctaggagaatcgagacggacagttcgggcagtactcatcggactcctcatacaccgtcatgtcctgtttgtttcattttatggaaaagaaatatatcgaacagaagagatcagcaaccctagttatcgtttccaagaatgatgacagactgacctttcggaacgcctttttacattttttgcacatgaataccatctccatcgttcgagcaaggttgtggtccattttttcagcatctaaaggttgtcagtttacaggaagacatcacgtcgatacaccaggacaaaagagaagtcagtaagacctgaaagacggagtaatagaataagaattgaatttgaacttacgacactctgggcactgtcgtttcaaaaatatgtgtgtttcgtacgaataatcagagaggggcgttgcattatcagaagaaatcaacatgacgaagaaggtgaaacgaaaacggaaacggaaacagataggatgtgatttctatacgaacgtcaaaccatttggagcagcacggcgctcggatggcaacctgggcattaagaacgtgtttgctgattgacccggtgaaccataaagagagtcagacgaaaaccaatacaatctaatcgaggtgccgagctcaccacatgactgagtatgagctgttcttgctgatgcttctgctattgctgatggaatgtatgctgtctgacccagttggtagtgaatgttgttcgtgcacagcttttgccggttgtaaatcacgtgcgtcataatttccttttcgccaggtaggatttctcaccgatcctacaacccaactcaccatccgaccttaaccttcaacctctttgcctttgtgaagttcaggatgaagtcaaacttccaggtaggtcgttactcgtgcgaggattctgtttagcatgcgctaatgctctttgtgtctcgaatgttaccttcaacgatcccatcaatgacttcttcgcctggccttactttcgtctcaaaagttctcaaatctgataggaaccgtctacaggcaaggaaatgtcaccttcaccccagatggcaactcggtcctctcccccgtcgggaacagggtatccgtatttgatctagtcaagtaagatctctcttaataatatcatctctatttgttctcatcaagacaggcagaggtccactggctgccttattatgcaaactcctatggatcattcttcctctgaacatcattaccattccattcttttcttttctacagcaataagtcgagaactctcaactttgaaactaggaagaacatcgcgtgcgttgctctcagtccggatggaaatgtcgtgatggctatcgacctcggtaagccgaccgctctgttaagcttcgtttgccgttgaagattccaggctgacccgtaatgatgggttgaaattcgactgatggctcaattcagacggccgagctatctttgcctctttccggaagggaaccgctcttcaccacatgaacttcaaggcgcctgtcaatgacgtctcgttttctcccgatggaaagtacgtttcacagcccttcctcttgagcttttggagtcttatcgtcgctcgtaatcaaattcttgaaactgatctgttcctttttggggacgtactttcaacagattctttgcaatcactcaccaaacgcacctgcagatctggaagacgccttctcatttggctagagagtttgcgcctttcgctcttcaccgaacctacactggccacagggatgaagtcttgactgttacttggagtccttgctctaggtcagtctgacgaaaatcatgcgctagacttctttattgctacttacttactcttaattatcctctgtttgttcttacgtaacgaaatagatacattctcaccacttcgagagacatgaccgctagattgttcactctccaccccgtagaaggattccgaccgaagactttttcgggacatcgagatatcgtcgtcaaggcttacttctccaaggatagcaagaccgtaagtcacatctacgcgtcaatttctcatgccgaagatgtgcttatttcttcttggtccttcatcgggtctgcctaaatatagatctatactgtcagtcgagacggagctgttttcgtatggcagggaaagactactggcggagatgaggcttctgaagatgaagactttgagccggagacaactattctggacgctcctgggtcttctacctctgaagctaagctgaatgaagttgcctacacccgatggggagtcactggtcgacattatttcgcccagcccggaaccaaggttgtatgcaccactttccaccctggctcgtccatgctcgtcgttggtttctccacaggtgtatttggattgtgggagcttccatcgttcaccaacgtccacactctctcaatctcccaggaaaagatctcctctgtcgccatcaatcagtctggagaatggctagtgtttggagctagcaagctcggtcaacttctcgtttgggagtggcagtcggagagttatgtgctcaagcaacagggtcactacttcgatatgaacgctctctcgttctcccaggatggccagaatatcgccaccggaggagacgatggaaaggtcaaggtatggaacatgaactctgggttctgttacgttacgttctcggaacatagctcttcgatctcctcggtcgagtttgccaaacagggccaggtcctcttcactgcttcgctagatggaaccgtccgtgcgtttgacctggttcgataccgaaatttccgaacattcacatcccctacgcccgttcagttttcttcgcttgctgtcgatccgtctggtgaggttgtcgctgccggttcactcgattcattcgaaatcttcctgtggtctgtacaaacaggcaaactgcttgacattctgaccggacatactgcacctgtctcggcgctcgcttttgatcctacgggaaaccaccttgcctcggtttcatgggatcgaacttgccgattgtggacaatctttggaagatcgaaaaagtccgaagtgttctctctttcgtccgacgcgctcgccgttgcgttcaggcctgacggaaaggaattggccgcctctactttggacggtcagatctcattctgggataccctggaaggaaagcaaacgggagtgattgaaggcagaaaggatattgctggtggacgaaaacaagatgatcgggtgactgcttcaaacaactcgacgggcaagtcgttcaactcattggcttacacggccgatggaagttgtgtattagctggaggaaactccaagtatgtcgtcttgtacgatgtccgggacggagtaatggttaagaaattccagatctccgagaatctttctttggatggaacgcaggagaagttggattctagaaagatgaccgaaggaggtgtttctgtcgacacgctcgacgaacgtggaaatgagagcgaccttgaggataggttggacctgacgttacctggtgctcaacgaggcgatctttcgaagcgaaaatacaaacaagaggtccgaacaaaagccgtcagattctcccctaccggtcgttcttgggctgccgcttctaccgaaggactgttgatctactcactcgatgagacagtcacgttcgatcctttcgacctcgctatcgacatcactcctcaatctcttcttgccacacttgaatccaaggattatctcttggcattaatcgtggctttccggttgaacgaacgacatttgattgtcaagacgtacgaatcgattcctcctacggatataagattaatcgctggtcaactcccgaaagtctatgttaaagcactgctcaggttcatcgccggtcacatcgaagaaggacctcacgtagaattcgatttgatctgggtgtcggcagtgctgaccgctcatggtcgatggctcagagatcgatctggagagtttgctagcgagttcagggccatccaaaagggagtgactgatttctcacagagtatagctcggctgttagtacacctctcttccttcctggttcttcttcctgtctctttggtttctgaagaagattgctgactttggttttgtcttcaaaacagatcggacgagaactcgttcagtttgtcctatatcattcaccaacaacaagcgtttgaggctcaactggcgcagggtgaagatgataacagcgacttaatgtctctatagacgctattctatgttaaattgtttcttgtaaacacaacatcgaaagaccaacactgtcaataagttttctgagcaattctttggttctgggtcttgctgatctggggctagatgtaaaagatttcttcgcttcaagtcgcgttgttacatgtatattaatttacaaaataaagaaaaacgcttcaatgaatcgcccaagttaagaggaaagatagaagaaaaacaattaagaatatcggactggcagaccgcaagttaggatgtaacaggaagacagaaggagaatgaagaaagaggtatagagggagaacacgacaagagacggaaatgatctactctagatcaggaagagacataacactaagcatcaatcttagctttcttgggagcacgctttttgggagctgaaaccactggggactcagcagctgtcgattcatctttcgacctgaggggtttgaaaatgatataactaagtttgtctttcttgctgatcgtaaaaaattggtgaatgtacttacagcttcttgtaaatgcttttcagcttgtcgtgcttgatccctttccttggccagaaataactcgcaaagacccaaaggtgttttgaccatctgtcaggttacacatgaagcgcaaacgttcttatcagtcaacaagcttccaaggcaaccaagaaggaagaggtagtcacatacttttcggcatcttcgcccttggctcgcttgtttgcaacgacaaggtcgattcgggctccaaccaaagctaagcaatccttgagaaccactaacttttcctctcgaggaagatcgtctgttccagtcttgagttttttctgaagagggtagaaacataacgggcagaaataagaagcgtttcataccattggcaataaaatcagccattcaaacttagcacttacaagagagctcttaacgggacgaagttcttccttcgtagcagcctcgtccattgattcgctattgatccgacccgaagaaagcttacttagaattcatacctagcgcaacacaaagaatatgcctcaagtacttactagtcggagctgtcggactctgtatcggtgtaggtcggcgtcgccttcctcttgacctgagcggctgctgcttcagcagcagcaatagcggcagattgtgctttggccgaaggtttccgtttcgatgcagcaccttcaggtactggggggtatgatccagagctctgggaatgttgaagcccttgggactgcgccaacgcggattgttcggcgtagtacctagcattatcctcaaattcacgaatgagaccacacaagtaatctcctcttctgaccaagtgaaccgccgtaggtgtgcttttggtttggccttcttccagcggttttcctttttggtcttcaaggaagaacttgccggcaagctcaagcgaagggtccatctggatcgcttcccaagaaccgaacccgtgcttccaaattccaacgaccaaccgagcatcttcatcaggaccccattcgaccgtccagttttgggtcggacggatgtggtctgtaggaattcgccagcggatcagatccgaaacggtactaagaagctggtggactgctttcaagtcaaagtgacgagataccatggtctccgcattgatgctcctgagaatgtgaccgattgacgaatcttaagtactgctcgaaccacgagagaagacaaaaagaagaaaaacttacgagatgcctctgaattccatgaggaccgccttctgacgcatgttagatgtgatcttgaggagtagaagatttgatttgattcagatagtgattacgttcagctactatagaaaactgttatcacgattacatcagaacgctgtacttaccacctctccggcttcctgtttctttttcatctcgcttttatgagcattgatggtggcgattccgccctggatgagctcatcacaagcctgcatgatgacagctcgatttttcgtttcgacctttgcgtctttcgcctgattcgaagcaacacatgcgatgagttcagccaaatttgagacgagtgaagtgagatactcaaagcgataacaaacgagatgcgtggacttacgatcaagtcgtatcgtaatctgatgtctccccacttttggagattacggataagcattcgaagatcccgatctggatccgaaaagagtgaatatttagcgccagctctttcgtctcagagaccaggggatccatatatatctcaaaagtatcacagataacatacctttaagctccaacgctttctgagcagccgtcttccgagctgatccagccttggccgctcctttacttttcggtgggggagagtccctcgcgggtgaactaccctcctcatccatcattcctgagtacgtccctgggttcgttggtgccgccgctcgttttctcgatttcgagctcagcactgtagactctctggagatcgcttcgggtggctcaatcacgtccacaggtcgagcttccacagggatgatttcgtcccatgacagatcggtctttacatcctgaacggcggcgaattgttggaggaaaccttcgccaccaagagaagttccaccaccgtccataccggcggtctcatgatcttcggctctgttcaggatgtcatctaagtccatctcgtcgagtttcttattctgaattgtgtcgtccgttttgaacatattctgagcaccgaatctggttgagggcagggaaatttggtcaataaaactagctccgtaaaaaggagagtagtgttcacagagaggaccaatcatcgaggaagaaacgtacttcagaatagcgctaagctcttctttactaaagttctctgccttggctccaccagcagccttgggtcctagagtagaccctgaagtatccatctgactgatgactgtacattgccaaagcaaaacacggattagcgttggcaatttcaacgagtgcatctgaataggagaaaggaagagaagatagcttactagcatgctctagaaccatctttttctttgctctttccaatacgtcttcctcaacggtatctttactcaatagcctgttttgaaaagaggagaagaaacagaggtcagtgacaatctgaagacgcgcgaaagagaaaggcttggaaaatagctttacctatacaccatgacgtgcgacttttgaccgattcggtgagctcgggccattgcctatcagtgtgagaatacaaaggataagagtatcaggatcgaatcaaagcccctgccgcgatcttacatctgatgacttacctgaagatcgttttgagggttcctgattgagatcgaagtcattcccaagggtaacaagaacgtgagcaaacataaccgaaagtataggaacagagaaaacgtaaataagatcgaagaccgaccaatcgctgtcgaagatgatgaccgtatctgcggaagcaaggttgataccaagaccaccagctctggtagagagcaggaatgcaaagtctggagagttgggtgcgttgaaatgttcgatagatttcttacgaatatccgatggtaccgtacctacatgtcgagacaaacgagaacagttgagtgataccgtggaaaagagagagaaagatccgatgatggtgaacgactaaccgtctaatcgttgatggatataacctctgatggacatataatctgacatgatatccaacattctaaccatctgtgagaaaatcaacactcgatgaccgtccgctttgagcttgttcaacagcttgtccagtaacaccatctttccactgctcatcacaatccctcgaaggatttcatcggttgtgtttgctttgacttcagctccatcgaataagaatgggtggtttcttttgttgaagaagagaatgggaagctatgtgtttagaccttgcgtcttacggatatcaccaaagtcgaatagactcacgaagctttcttcaactccatgactacatgtaaaaataagaacgttccaaccgtggatcacagatagatgagaggcatatccacaagacaagtcgctgattcaacgagagggtgaaaacacaaaccgatgttcaatagactgaactgctggccttgagcaccttgactaagagctgtaaaattctacaaatagaaagcaagacaaggaaacccgaaagcagcgagttgagcgtttcttctttgctttgcgcggattaaacaaccaaggaagagacccgggtcactgactcgtgttaagatgtctgaagataaacaccggttcgagaacaagactaatcagcacacgtctttcttgccgtcacaaagacaccaacacgataacgaggccgacgtacttttgtaatagtgggtctgaagcgccgacatttccactctcaaaatcctctctgattttgtcgggagagactttacaacgtctctctttaatctacgaagcatcacacccgccagactgacgtggagatctttgatctttgcttcctgatcggcgtcattcagctcaaactcgttacctgccaattggactattgaaatattgattgagagtgaggagcacgaagaattcagatacttgaacaagaactaggcgacattacaaaatgcagtactcacatttctctggcataaggaagtgcatcagagccaacagttctatcgatagagagatcaagataaaaggctcggtcagattgagttctcacaggggagcagccgaagcacgactgacctttgacgttgttttgtagaggggtaccagtgatgagaagtctcgaggcagaagagaatcctttaagggcttcgtacaactgagattccgaattttttaatcgatgtgcctaaatcagaaagaaaaaaagatatttgtcaatgaccagagaatagagcgggaatcaaagtcaggaaaagaaattgaatctgaggctggaaggaaaagtccttacctcatcaacttctaaagcctgccacttgatactacccagatcaagtttatccttcagaatgaactcgtatgttgtcaacaacacgttgaacttcagttttcttgccggtccaaactcatattgtctgatgacctctctgctcttcgccgatccctggtaacagatcacgttcatatcgggagcccaatatttgaattgcatttgccaagcggggattgtcgagagagggacgacgcagaggaaaggaccgaactgttgacgttcgtggaagaggtacgagaggaatgcgaccgactggaccgtctttcctagacccatctatagatcacagtaaaagagaaggaaagagctcgttgagctcttggacactaaagatgagaacaaaacgagagaaggctatcaacgaacttcatcagccaagataccgttttccccccgactccataaataggccaaccagttcaatccagtcaactggaaatcctttagttcaccaccggttgctttaatgtaatccggatcgtcctggatcttagtgaataacggtcggccgtttgtgtagttcgtcgatcgccagggaacggtcagcgtggcttctcgttccatgtatgcatcaatttcggtagaggcagccggcggaagatcctcggcgcactcccaggtattatcggcatacaccaggtcttttcgagcatgacaggcgtaagacgcaagagacagagcgagggtcagaatcttctgctcgggcgtgcagaaagaagaatgaaacctgatgaagagaatgaactcaactggtccatttacaaaagtactgaacgtgctgatagttgtgggcatcatctggcggtgcatcccgctgtgccaagattcgttctacgattttatgtgattcaagcatctgacaagacaaatcgacctcatcattagttgttgaaactcacatgagctagacaacatagagaggggaagaacactcacttcgttgattctctctttttcgatatggaacgcttcgagatcttctctagagaccttagggctggtgaggatatgcctctggatagagtacgttccctttatgtaattgtcgactcgtttcattccccgataatttttctttcgaagaaaatcgtacagctcttcggtgttgtgcaggtgagagaatcccttccatttgatgacgaaacgctgtgaacggaccggaagagagtaagtgtgttgtgtcgtgagtcacatagagagaagtgaagactgaccatattgacatgggccacatcatctggatcattcagatggtcctcatctcgaaagtgtccgcacacaagctctatctcgtcctccgctctctctgtaagaggtgtgatatccgttcagaactcttctcaagactagaccatgatagagaaggagaaggaggaaaggttcactgacgatcgatattggaagctgcgtaggcctccatctggtcctcctcgctgtcgagcccataatcaacggcagcctcgttgtagtttggacctatccgtctcctgtcttcttcttcagaatctagaacgacaggcttgacgcgcttgtttccttttttgtggactgtggtggcataatcgtcatctgattcggaagcggattttaccttggatacgtagagagctgtagctgttgaggaccaggagaaaagaagaagagaaggttagaaagagacaaaggaacaattccgcgcgcttaagcaagatagacacgagaacggaaagaagcagataggtggcactaaggaaatcagaaaggcagggaacgtactggacgttcgaccttttggagcgccacttgatcttggcttgaccggcttcttcttctttttgggtcgctcatcataatcatctgattcgtcgtcctcggtagtgtttccctgatcctgaaaagtaagaatagggaacatggaaggagagatgggcaaggtagttccaggagggcacaggctttgatcagtttggactgtaatgaatgcaagaactactatcgaagcatacgaacagattgttttgcctgacgtatgaaagaggtaagagtagaagtgagagggaagcgtagaggagaggaggggaaaagagggtagatataaatcaacaggggagataaaaagagtgaagaagaaaaaaaatccaatcagttcaaccgtgtatttcttttctcaactcccatcttcccatgtcgttccaagacctcgtagagaaccaaaagagcaagaccttcttcggccagaccgaaagagacagacaaaagagaaaccaagaagataagaagagagcagaaagaaggacgtaccgatttccgggcgcctccgttcgtgtttgctttcgctttgggctttccctttgttttcgaactctggttggattctctgtactcctctccttcatcgctttcgctttcgttttctccgtccccgtcgtcgtcctcgaaatcctcccccttttcgctctcgccgtagtcgtcctcgtcgtcgtcttcgggcgagactgagcgctcgacgtaggactgcctgggtacggtctgagtcgaggggaccttgcctccgacgacagctcggtggttcaccggttgtatcggggagtaagatcctaagccgttttccatctcttttcgaactgagaccgagataaagagggatgtaacttggtgtttttttctaagagcaagaagagaggagaccactgttgaatcaaatagaatggcaaagagcggtaaacgagctggcttgacacttttgactctgggataatccgagaggagagcaagacaaggagactgaccgagagtgaaaggacttttagaaagagagacctgatcaaggaatgcaacgtccccgaaagactcgacaagctttagagagcttggattgaaggaggaaagagggagggaagctctgaagggggacaaagagggaaggtggccgtttggagtttgggtgctcgccgtcattcgagatgacaagaaacgctatttctcgcggtctcttctattggacctgatctcttttcgttcttccttctttcttcttcctcttgcttgctcctttcattcatagttcattctttcttttctgattttctctttctcgcctgtgttctctctcgggtactcttcgtatctgtgtctttgtccttgcaacatgtagcatgaatgtatgctgtttgcgtagctcgaggagcccaagaggcaccagataacaaagagaaggacatatgtacgccagtttggtaggagtctgcttgcatcctctcagcaaatgcatacattcaagacaacaaactcaaggtgaacacaaatgaaagaaagaccggcgttctggatgttctggatatctggtttggataggcttgtatgcggtgtgtaatccgaacgaaggctgacgcaccgagagaggaaacaactgctggaaaggtggatctgagccgtatatactggatgaagagtctatcgctgacgatgtttcaacaacagagacgttctgagtgcgtgaacgagacgagagaagaaggagagagcgcaaccgatggtgatggtgaaggagagacgatgaacgagagggtggagaaatgtattggacgtcctattgaaagttgtatttgtttgtattcatttgtattggaaaagtgtattgaatggtgtattagaaaagtacattaggaaatctactaggaaagataataggcaagtctactacgagcgcatctgcaccaaagcaaacactcccaccaaacgtcgcccttgcgctgcctctgtagctctctgttctgatcctccgagtagctatatagcggcttgaccagagttcgtcattgaaagtctttcttgtcttctctgatttcgatgtttcttcactcttcttcaacgcatttccttcatttgagttgtgtcgggcgcgtttcgtccctaccatcgcttctatcaggtcactatcactaccttctagctgtagtggagatattgggtcacaaacacgaaaactcgaaaggtaaaagagcgaggtggagatgaaacacatgcgctcttgagacagtatatgtacatgagtattaacaagcagacaaaacagaatacatggtgcgggaaagagaactgtatcaagaggaatacgagaccgtccacttcttcgactcgtttgagttaggtacgaagagaacaattcctacaatgattaatatgaaggcgagacatatcgagcaaaatatgaggacagctatttaatcaaacaccaacaatcatttcagtttcaatcataaggcttgaaaacgggcggcagatgagacaaagaagagaggagaagagtccgttggggacggcaaagaaacaagattgactaacgtttcaatttctgtcttgatgtcaagataagtctcaccctgatctcctcgaaggtttgtccagctatcaggtcattccaatcagattccgacacgtcagcccaatcttcgcctaccgggatctggaagaccattcgttcaacggatcttcgactgaggacatctggaagggccaggcgaagactctcaatagtttccttgaagagtcgacaagttgaggagaaggtaaggatagaatgtcagtgcacgtcgaatgcttttgtcgtatagttcacgccgccacacaagaaaagaacctgggtgcagagcgagagaacgagcgaaggctatgaactgcagaagaacacgaaaaacgtacctctttggtgaggccccacgtacacatcacggtgtgtttccaatcactcgatggccagacaaccttgaaagccctaaagcgtctacctgaaggcgttggattcagggctgtaggaggataagatgttgggttcgagactggtacatcttgtggaactgttccctcaagacgagaatccttggagtacaaaggaagagagctttcggctgactcgtcagtggagggcagaggtgtgtatggattgctggtcatgatgatgtctggaataaagatagagatgtgattagtgaggtggacgcatgggtgcgagttcttatgaagacttagcaccactactttaatgagcaaaaccttatttccgagctcgtcgtcagcgcttcttggtcaacgtcagtcacttgggcatacttcgaaggatcgatttgacagagatgggcaatactcttggccataaggcagagacgagcacagatgtgcatgtatgcttgatggatgtataagagagagagttctggtgagagctctagtacaaagtgcagtaaaaagtgcagtaaaaaagtgtagtcatcgttgtagtctgcctattaggaaggtttgtattgtttttccggaatacaaaaaaactacagaaagactacaaactttcctaatcaattttctagtctctccatagacgcgcccttgtttttctcctcgctctctttcctctgcatcgtccccttgcacctccatctcggccatccaccatcagcacaggcaactgcaacagcagcaacagcagcaacagcagcaacagcagcaacagcagcaacagcaaagtaatcacagagaacctcaccatggaccacaggtcacctcgttcgcctcacttcccatcccctacatcaccattcgtcccaccaccaagcgagcaagacgaactagatagactaggcgcgttcgacgcaaagtcaacagctctacataccaggcgatccggtggtcgtccgtcggatgcttcgtcttcttcctctgtttctgccgtatcgtttccttcttccttagcagaaaacgtgattataccatcatcatcatcatcatcaccgccaccaccatcgtcctcatcactactactacacctaccctcgtccgaaggatcccttgcgactctcgagaaggataccgacctggactcgccggtcgaatcctcactcttcctcgtcacagaacctcaagaagagtctcacacagactcaagcaaccatggcgacagcaacgacccaacaggtcggaatgctgcacttggtctgggtccttcagccggacaactctcgtcactatcccatccgtccacgtcggctcccatcataggtctaggtcacggcccgagatcgtcccctcagccgatcatcatccctcctctgacaaatcaagcgcctggttcacctcatccgccgcagacggaacctcatcaatcacctcccactcaacgaaagctccagcataatcttcaatcagactcgcacgacatagatccatcagcaacacaccctccgtctgctgttctgctttcctcaccaccggtaaaagatccggagagtcacccgatacctagtccaacagacgcgttcagtctatctcaatctgttcatcctcctccatctcctcggtcctcttccgtcaaggacgaagaaaagccggaagaacaaacgcccgccgcgtttgttcctccgcccaggacgacggatccagatacctcgcccctagacaacccatcggaatcaccagagatcaagattagagatttcgcatacaacgagtcgaacgctctccataggaaaccgatagaacctcgggcgaaccgagcatcgaccgctgatgaactcgaagatggatcgcaaaccgaggggcgcacagatgaatccagaacaaaaaccgcgtttggttggggtgagttcaaacgcggtgaggccgacgaagactgggaagacgagagtgactatgacgatgatgaagatggagatgaccaagacgaagaagaagcccacgacggcggcaatactggaggcggacacggagaggatgaggaggaagaggaagattgcacccctggactgtacaaagcactttacgcgtaggtcttcttcttcttcttctcttccttcgtcctctaccctcatactcgcacctatactcataacacactctcacacttcactcagatttcaatcggaagcttcgtctgaactatccctttcggaaggagacctcatcaacgtccaccgctcaggcggcataggctgggtcatcgccactctcgtctcgcccaacgggaaccctgtcgatcccgtacagcagggactcgtcccgagaggttatcttcggcaggttgataaaccatgagcatgtttctcgcttgctgtcgctttcttccggtctttgtcctcttgttttcttggtctttcctttttcttcttgctttgttttcgtttttgttcgcgcttgtcttcgtgtccgtgtccgtgtctcaatcataaaggcattctatatgttttgtcggaagtgtagtctacttgtctgcctttcctctcttcttccgtccatcacacatgtttatcgtgtctgtcgggtcttattaacactcatcaacagtgaacatacacttttctcttgcctcccttccgtccttcctcctcaatcttccctcttcgcgttgtctgatacaaacaatccgcctcttacgaccatcgcctcttccttctctcctcttctgctctctttgtgtcggttctctcttttgctcttgtttcttcgaaccatatatatatatacatacatatattcaccgaccaagtctcaattcatgtacagatgtatctgatcttgaacctgtctgtcgggttgtatatacgatgcccaagaagagaaaacataaagaagatcagaaaggatcttgattcaatcttgtacagtttcatatagatcccaaacgcgtttgatcagccaattcttgaaatacacataaagttactaccctctctctgggtttcctgttctgttctctcttgtgaatcgtccgctgctccccgggttcctctcctttgttctttcttttcttctttttcctttcagagggaagcctcgattttctcctcccttccatcagcccatcgggcggtgacagacccgtcctgtggagcccacccgaaaagcacagagcgaaaacaagatgaaatagaaaaacacaagcatcggtccgtcagagatatgctctcatgaaaacgacaaggcaaaaggaagaagaaagggatatgtgctcgaacctcatttccaaagtaagcggccttggcaaggtcaacaaatagcccgacctcgaccacaccggtgagaagcttgatgtcagtcaaaagctttataggcggtgacattccattcaggtcaagtaaagagacaggagaaattgcgcgatgtcagcatacatagatccgactttaaatgaaaaagtaagaggaaagagagtgggaaacaaacctgggcagggttgaggtagatctcctcagggaagacggcgtcgatgacaaaccctccattgtcagtcacgaccggtcctttaatgataaacaaagcgaatccagaatcaagtgatttcttcggtcagtctttccgacaaagaagttatcaaacaagaaaaagatgaacaggtcagactaaccagccttcatcttgcccattcgaagaccagccttaatagctcccaacttctgcagtcggagaagaacagcagagtatgcgaactgagcgacttcaatagggactccttgcttccactaagcagcatcagaaaatgaatctcgataatcaatcagccactgaaagataaaggtttcggagagaagagagaaactggaccaaccgtcgtgccgaggatcgacgagttctttcggtaatcagccacaatgacccaactgtatgatgtaagaccttggcttagtatcccaagccgaaagcagaagggcgagacgtccaagatgaagaagagctcagaaaataggttctcacgtctcggcggcctcagcgaggaccttttccctcaattgacacgctcctcctcccttgatggactgaaggttggcgtccactctattcaccaaagacagatataacccccaaggaagaaagagacattggggtttgccgtcagacaagtgtcccttcgatccagattgcgccaagggacttactcatcagctccgtcaatagtcacatcgatagaggggtactgctccagatcacctagcgttaatccagccgaaacgatcaactctttgctctggaaacctatcagttgctcaaaaccaaacggtccaaacagcagcaagtcagaccttgattcgtctcgacgaaaaaagaagagatagagagccgactaaccagtaggaatgaaaattcgaccgaggttggcttcaggaccctgctctttgatcctgtccaccacgtaggggacagtcgacccagatccaattccaatgatctatcataaaccccgaattgaatatatctggtcagtctcgaaaagatgacaacagagaaatagaacatccaatcaaccaacgaacaaaccttgtggtctttcctgatgtggttatcgacagcagcgaaagcagcgagcctcttggcagcctcaatgggagccaactgaacagtcgacgcgggaagggtcggtgcatttgagacggactcggaagtctagcaggatcaggagacgtatccaaagcaagagagttggagagtacccgaaaagagagaaagaatgggtctttgttgcaaagttcggcagagatgcagggagcaaccccaaaagaaggggcctacatacgtttttcgcaggagggttgatcacctcggactttgtgtgcaagtcggccatagtgctgaatgtaacttttgaagagacaggaaacaggagagatctcgaagaacgaagatatagtctggataagattaaccgactcagtttggataaggatgatggacgagagagacgaaaagagagatggcaagattcaaatcaggatgagaattgaaaagaggatgtaattcgtcactcgtttctgaagtttgacgtccgatcggctgtccaacctacccttctcatcttccccgtctctccagtggtctctctctgagaacgtgtccaaatgctatacaagattaaatttatgcaatccaaaatgaacaagcgcaaaagagacagactaataagaattatatgcgcagaatgatacaatccaacttgagaccgaagagttgaccgaagagtttaccaaagagtttaccaaagagacggaaaaaagcatttacaaatacaataggaactaaacaacgtagagaaccagtaatgtcactatagaacaaggaaatcttaacgagggtggcaggcaagacagtgtagcgatagaacatgttccttctggagataaataataaagaggtttgactagatagaggtgctggcctctgtaagtgatttagataaagctttgtaaaatggtcgtacgaattcatgcaaactgtcagatcaatgactccttgaagcttgaacaaactccaatggagacgattcgcagaatctgccgtctgttgttgatgtgtccaaatgtctcaacaggctaaggataaacatccgctctttgctgtatagtcccggtttaatgaagaactctcagatgtcaggaatataatgcgctaatgatatcagcccaaacaccgattgataaaaaaaaaactaagacgaacctagagttaacgaaatgtaacgggagcgcacgggcagaatctatggtagacgtgggcaagaaccgaggttgaaggagtgtaggcgcaaagatggttgcaaagtttctgaaaagcatagaacaagatcctgatgtcagtcgcaagaattgaaaacatcaacgccaaaaacacgacacccacatgtctgtcatcttggtctgtttagtcttggtcaagagatactgaaggaatgagataacaaaaaccaatacagtgcgattgatgctgctcatattgacgggcccgttaatcagaaacgatatggagagagtatattagtttcccgttagacaaagagagattgcttagtgggaatacatacacgggcaagttttctacaaaattccaagcatcgttcggatcctccgaagcgttgatcgctgcctcgtaagattcgaaaggaatcaacggttcttccagctccctcagccacaattttaatagcgaagcgggcacagcgggatcagtaaatggttgaagatcatataggcctattattgtcaggtgatagtgaatatggtgatcaattactagactctaagacaaacaggacagtcagaacattgaacgagcctcgatcaattctatctttgatcatagcaatctggtctccgtttccaggaaccctctacagtgtcaagaaaaggatcgatgatagagacaagagaaccccctatcagtaagacgtgcgtcttaacagccagaaatgacgtccgcaacttacaaagatcccctctagggtttccttctggcccatagacaggatggcattgctcaagaaaggcaagatgacgggcagacgttcggtcctataggtctcggcctgttttaacatgatatctgctaatgttgtgttgaagacagaagggttgaaagcaactccctatgatcacgacaacagggactgatgagttattcttgtttgattcggaaagaacagtttcagtaaagaataacgtaccatggcactttcgatctctaagagtgaaggcgctcgccctttagctggtttgtcggccatcagctttccatagcagactatagtggaggagaatgatgatgataattagaagagttcgtgatgttttttttaagatgtagaacaaaagaaaaccttgaacatacatcgcgccatgacctcgatctttttaccaacttccggctgatgcatctttgacgacgcttcgaaatgagactcaataaagtgtcgaacgtatgactcaaacgtcttggacgggccgaacgtgactgagagaacacacaacagctcccatcccagcaccatagaagctctgtgaaaagacaaccaagtgatttcagtcagtttccttcctagttactgcctctatcagaatgaaaggaatatcccaaatcaacatacgggccagggttttcggtaagctgtttaatcaattgacagtagacttcgtctctgagttctgatccagagatccccgctgtcaacagccacttgatctccttcaagatgacctctctctctgccgaccgtacttttgccttgcgtttggcaatgatatcatactgatccagtccatgagtggacgaacaggaagctgatactgaatgggaaggtagaacgacgggtctgtcacggtcgaacatgacgtgctgaatcaccttgaatgtccgaaccgagttggctttatgagatgagggaaggagaggagttgtgattgggagtttttgccaaaccgtcatctgttctacctaaatcctccacgttttcccagaataagtctcgattgagtatatcctagatgtaagaaggacaatggattttacgatttgaacaaaagacatagagtgcttaccggaacttttttcttcaagatgatacctcgcgtgtgcttattagagaaatgctgagtagcaaactgttgagtatctttggatatatttggacgagacgatatacgttgactacaagccaaatgaaatgaattggttaaccgttatctattcacaagattatatttgagagcaaaacggatataacatacctggaatccaactctatagtgtggggcgcaggattaaacggggtattctcgaaatgacgaaagtctgttcattcaaatattggatcaagaacaagagaggacaaggtaggtcaacaaaacgactgcctcaccaaaggaaacaaacagtgagcgtacctggtaccgtatcgctctttctcatcaatcgattcttccagcttccgagcaaggttccgctgagccccttcgactcggttccttccactggtgcacctaaaacgatcatatccttgttctcattctccaaaaggaccgctcctagagatggcgtactcaacgctctcgctcgcttcctagtcgttctctcggccgagagggtgttaggattggagatgctgatggccgagtctttcatggaaagagggatctgtaatttctgggcagcgctctgaaaggatagatatgtcgccggcacctttgatctggataatggtggggatgaatgagacagaaatgaaacagatactgagcgattccttctttgagagcgcaaggcagcggcacggtttgtagagagattcgtgcggttggatcgagaggacgtgtcgaaaaaccccaaggacgtgaactgggtcaaagccaaaggtatgataagtggaacgtctggccgacgccattgagtttgttttgtctttgtgtgatagtaatacacgaggccatcttgagtgtaatcagagagttcccaccattgaccttcggaggcaataggtagactataggacgccaagaaagatcgatcagttaagctaacgttcgccaattgttgaagtaggatgcaggcagatgagaagagacggagagaatggaaaggaaaaggaagatggcatccacattcagatacgtacacgtagactccacgaggaagtttccaggagcatgttcccgtctttgggtttgaataaaaaattgactgtgaaaggacaagcatccataatatatatcccgttagacaaaaaaatccctgcgcacaagaaagtttcacagataaactcacgttctcatcctggatggtaacttttatgcaatctcagccgagcgtcagcagatgtggcatcatctggttgatttaagtggtggaaagaatcagagtgcaagagtgaatgacgactcaccccagaaatgtttctgccagatctctattccatccaatttctcctgaacagtcggtaggtcgatattaacgtccttctgctcattgctctgagcagtaatcttctcaagtacagattcggcccaaccaacttctacgtcgataccttctccgattgtgcttgctccagcggacgacagtccggggcgaaaagtcgacgtgcgcgaccgatcaacgggatctgagccagacataagttttgtacttttttttcctcggagcgccacggctgagttccaaataagacctagaggaaacaagcggaccttatgaggtcgagctcgtttcactcctttgaaaaaggaggagagagcgagagcagaaaagagtcgagaatgaaagcaagctgaagaagggaagggtatcggggagactgaagctaaataacagaatctgatcggatggacaaagtcgataacacgtgactgatcgaggcacagccttaaatctctaaacttcccgcttactatgatttcaaccctggattcctactctgccaacaacgacaatgaccatgagcgatccaataaagaaacacacgatgtacagatagttcttctgattgtttgcctctctgtcttctttctacatgggagttgtttctggtacacttgactgatttagtcgtatttcttctcctgccttttctcccttgcctcgaatcaagtacgttcaactttcctattccctctccgtcccatgcgtccatcatcaaacggacgctcgaggtagatggcgaacgaacgcctcgagaagttaagactacaatcttagataaaggagacagtttggagatgtacgtttctaggtcgacatggttttctctggctcaatagtcaatctgacaagcggttcttttgatatggtttcgtgtcggcttgcctaactcccatctatgccctagttcgattgcaacgtccacgctgaggttacttcgaatgaacgtaaactcgatgtttgaaaagctagatctagttttaaggaccgtagatgcattcgagtctccggatctcatggcttgaccggattagtcgatatttattgtttataacagacaaaccatctcgagtgaaaaggatcaaggtgattgccaacgatgataacaacaacaacatgattgatcaaatgagacaagtaaaggagatagaaaaactacaaaggaaagacagaaaagcctctgaacaaccagtcggcttgattctcttcttttatttcttgggatgcagatgtctacttggcgccgaccttctctttcacatcctcaacagccttctttccctttgccttgccctcctcaatctttttctggccttccttggcaacctccttcgcctttcccttcgcctcatcgtactttccctctgccgcgttcttgccttccgccaatttggcctttccatccttgaccaaatcctcagccttccccttgacctcagcgtacttgtcctcgacctgggccttcaattcacccgtcttctcctgtgcctggtccttgagctcaccagccttgtccttggcctggtgagcgagttcctcagccttggccaaagctgcctttgactgaggcttgaaaactccaccggcaaggaatccaccggcaagaatagctgcgaggacgaacaatccttgcttctctgcagagctcaaatctcgactggtctcctcagcagaaacgagcggatcttcgatcccaagatcagaggtggtagacgttccagagacaggacctccaccagggtgggtcgaagtcgaagcggcggtgtagaccttgggaacgaaagcctcgggtacctgtgattgagaaggcgaatcgctagtactcgggaacttgtccgagtggaaggcgaggatccacggctattgaatagtgataaaagaatggaaaaacaggagacagaatgggttgttggtaattgtcgtgaagctgtatattacatgacatatactcaagactaacgataggggtagcagattcgggctggtctcgagaatcagggaatttgaggtccaatgtcatcttgctctgtccgaacgggttctccggcactaatttcaatccaagtatcatgtacacgaaaacaaaaccaaaagcctttgtcaaaatcaagatataactggagtggaaagaaaagaggaaagaaattgtcttgtaaaaagaggagatacttacagccaggagcgaccgtatcggataccaagatgtcaccacctaatgcaggctcgatcgcctgggatgcgactggaattgacggaggaacagacaacttctcggtcgagatcgccggtccgttgtcccgaaccttgagggcgtcctcggcactgacagtggtctctttggtagcggacgtcgaggcctgtcgtctagatgggacaggaggaatctgttgggcttgctcaaattcttgtagctttcggatcagatctttttttagcttgctgccaccgctgaataggatcaaaatgacacaacacaatacaacataaggaaaggaaacaagccgtctcttataggtcagtcttggctactcctacactcgattcatcccatcattgatctgggagacaagagataaaaatatcggataaagattggcaaggataggaaacttacatagcgatgtttcgcttgctaagctctcccttcagttgagaaaccgtttgtttctcccaagggccttgggagagcaagacagacgaagccaactggcgctgctgagcaggaagcataaagtgaggctgagcctggacctgagcgaccgctctgagagagccaagagatcgagttgaacggagcatcgcttgtgatttgttatgtgtatatggctttgagttgaggtctagatacagggagaaagagatgggtggttggttgtttagtgggagtggaaagtgaatgagcaaaaagaacatctcgtctagccattcccaccttaggtagattttcaacataaatatcaaattaaacaatatcaaataattttcatcgtgtccatgacattatcggttttccttcgatgaatatgcacttcaaagaccaacagaacttcctgccttttctctttactctagctttgatagtcatttgttatggagggatacatattattgctacagaagccaatcagctctcctaacaacagttaggaggggcaagggaataaattatttgaaggcgttgagacctctgttgatctcttcctttccggaagcaaaggtgttgcttttggactgagtttctagaccagcatctgcattggtagcaccagttgtagtggtggtagtggtagtagtggtactactccttccagcaatgctgatttatcaacatcagtcgcgagacaattaaggaaaaattgacgatctcggtgagactgttggttttcaagagaagcgatggtaagaacggaaactaacccgtcgcctagtccatcagccgccgagttgattgagcctcgaatgacttctccagcacctgttccaaaataaccatcgttcccatggttcagatcagaaacgaactatatcgaacaacagaaatgaaagtgacaaaaggttcagaacactcaccatgaaatacattccatccgcttttcacagcattggagatcgaattggcagtgttatttgaagtagacgaggtcgtagtggtagttgattcgatagggttggacatgtttatcaatgatagaggtgatggtgaagttgtgtcgacaggtgattcagtcggttttgttgtgtaagcaaaagcgggaaaaagatggaaagatgcggttagggttaggttgacgtcatcgagtacagaaggacgttcaggctaaccgatttatgatcaccattgatatcgacggaggagggacatctgatggccttctaggacaaatgaagaataggaagaggccccaaaacgaacatgaaatcgagaagaaaaaaacattaataggagtaatctgtgaatatgaagcaacaagagagcagacaggataagagctcaagaaagagggtggataatacacgaaggcttgtcatagatgtggtgatgcaaagtaggatgattttcggtttagggaaaggatgagaagaagtgctgctcaagagagctatgtatgaagaggtaatgtgtaaacaaacaaggaaagtaaacaaggtacaggcggtggacaaggttccggtagctcagatatcaaaactcaaatccttcgaacaggtcgtcgtgagtttgatcttggtccaactcagtagccaatcctgctaaaagctcccttcctaatcgatgatctctagcctgcaatgctgcccacttgctcttgccgtttaatcttgctgatccggaactaactcctttttgttccggggtagctctgctctgtctaagcgcagacggtgctccaggcctaacaatcttagaacctgacaaggacgaagcagacggcgtcgtggatgacataatcgaaagtggacgaattgtaggaggtggtccgttctgtgttttggtcgtcgccgttgcagaggatttggatgaggtcgaaaccgaggatagcggccgtcggctgacagagggagtcgaagatggggctcgaactgtgctaagatgattggaagcagaggagggagcgtcccgtttggtggtagataaaacagagggcggaagagatgagaagccaatgcaggtcgatcgagagtctctagagttcgaatttgctcgagcagagattgtcgacggtgtgggacatcgtggctgattaaggaggacataaagttcttcgtccgagtctgatacaatcgtgggatggtatctagtcagtaagtattgaaaacggagacaaaggcataagaacaagaagcacgcgtacttaaatccttcagattaagatctaaagatccatcgcgatagtcgtcatccagaacgatatcgacgggaggaggcaaatcaaagaaagaggatcctccaaggaatatggcagtgcttcgaaccctttgtccaagatcggtcatatccagtgtatcatatgggagctcgaaaggttcatctgagtggaataagaaaatagaaggaggaccaaacgcgtcagatatggcgaatcaaagtaaaaagccaagtcaagcatcaatactcaccaacaaagcctctgttcatctcttcaatctcgtcgtcttcctcctcgatctcaagcacattttcttcgactagctcgccaagacctggtccagctccaagaacatcgggatcctcgatctcgaaatctactaccggatatctcattctcgccgcaggtgtggagaatcccggatctacttgtcttgatggagaatgagtactaagaacatttgatgacttgttgggtgaccgagatagattatttgaggaggttgaggaggagagcggggtatggagctgcttagatcgtcgacgcgttcgattggtagacggaagaggagttgagaggatatttgtcagttgctgagtcggcgaatgagattggcctagggaggttctctgagttggatgaggcgttcggaggacatgctgaggagtaggcgctggccgtgactttttcagtgtcggtggtggctggttcgagttcggtttggccaatgcgccgtctttggaagacgaattcagctggagggtgcctgatgccttgggtgaccctcgattggtttgtaaggtaaacagtcttctaggttctgttgaaggacatagatgtgtttcataccaatttgttgaagagaagaagatagaacgctcagatgagctatccgaggacagccaagacaatgtgaggggaggagagagaatgcccgaacgaacctatcatctgtccatctttcccttcgcctgttttcgaattaccaagattgactccaccctcggtccaaatcttttctttccctctacccgtttgagtggtctgaggcggctttcctcctagaaggacggatgtctttgtgaagggcgtcttgacgttgggacgaccgacggttcgagcacctgctgttgcaaaagaggatccggccagtcctattcggagcggcgtcctggacggcaagtggtatgtattttctttatcatggaatgtatgagctagagagcgatgtaacatagtgtataggagaggaaggttgcgctagggaaggggacagaaaagagggtcgaaagaagaagaagaagagaggatgtttctttccgtgtctacagcgagggtgagtgtatccgaaaggaagaacgagaagaagacgcgtgaaaggaatacacatagcacagcaaacgcgcttcaatcagtcacgtatcttcatcacgtgacacgattctattttcggacggtctgtgctcaatcatcccaacacgttcgttcccattcaattgacatttttctttttgccttcttctctctcttccactcactcactcactcattcacttgcttggttctatctctcgctttggtctttatagcataggcacacactgacgttcatcttggacacttactaactgaaccccgagcactgggtgatcgtcagtctgcttctgtctttgttacctatcgaacaatcttggatccgagctcactttatatccttcccgtaattacctctttcctaaaataaattctagtccaaccattttgttgaatggttcatccgagcatcctttttctcaacccatcatggctgatcctctcggtagcagcatcggcggtggcattggcctaccaaccatagctcctcctgcgtctcctcctgttgcgcttcagacgccagataatgacaagcatcctcactttcctgttctcgaacgaacgcgctcaccgtcgatccctacgtatccacctagacaaccggcgactgccaccgggtcttcaacctcggttaatcatatagctgccaaagtctcgatcgctctcccagctccaaccactcctgctaacgctactacaactactactatacccgctcttcaatcctcctcctccaggtccaacccacctcgatttgcggaacagttctctactcccttgcgaagaagacatcgacacgccgctgccaccgccgactttcccttgatatccactcctggtactgttcctctgaaaacagacaccccgtctcactttagtcctcacggcgagtcatatgaggattccaccgaaccatcactctatcggggtcttcctcgtatgtccggtgctccgggtctaccaccagcagcggtgtttagatcgtaccatcggggtcgccaactagacgaagaggcgatcagcttgagaagctcaaattcgtccaggcgtacgaggagatcccggaggagttcttccagcagcagcagctcctccggaaatagcttcgttagtctgggaaggagagctgtagttggagcgttggaggcagtgggcagaggtctaggaatgttgtcaagtgaaagcgacacgagctctatcagaagcagacggagaagacgatcgtctggtcaaagatcgaccggtcttacggatgacgaacgaaatgtaggaggaaatagttctcaacagatgcaaggcacaagaaggcgaagacggtctcttatccagcctcgaaggatccgcgcttggtcgttcggttcttttttggggtcttcgtcttcttcgtcttcggcttccacgttctctggcgcaggcggcagagcctctaccctgtcaatcacatcggtacagcagattcctcgaaaaaagcgcaagcgaaccaaacgtcgcaagtctatgaccacagcattcagctccggtggatcatccacatcaaattcgtctggtgacgaagaatccgatcatgagcctccaggtcgaagggtcgttcctggaaagaaagaattctcgcttctcttcccttttggtccggaagaggctttgccagctcctaattttctttctccgtcatcaccatcggctggcctgtcccctccaactctttcgtcatcttcctccacttcaccggtactctcgcaaccgtccgcgaacagagttactccatccccacgcttgcagacaactacagtcttatctgagcttcttactagtctacaaaccatccgaggcactccacctctatccacctcatccccatctaatacgaatctctctgactcacctccagccccagatatacctccttatacatttcctaaccctcccataccaactccttgttcaactcctcctctctccaccgcatcgatccccgttgttcctcaacggctgacgcctgcccagatcctcaacgtgtctccaacaccatcccctccgctctctccgcgtatgagcgcaaaatcaatctcggagggtcgtcttcatcctcatccgcttagtatggcccccgtcaacagaaacacgttcgaaaagaagatggatgcgaacgagaaggacagcaaggccgatagacgggatgtaagatctgaccgagagacgcagaagaatggagcagaagatatcaagtcaagaggaccatggtggctggacgtccactgtcctgattgggaagacatgagggttattggcgaggtgagcacatacagagctcgagtagatcgaatcaagaatcagttcgcttggtcgctgacatcttttcccgtccatttgtctggggatttcctgctttctccttctcttccctcgaaaccagacattgaacctgcatccgctcactctggaagatattcttcatcaagaccctcgtgagaagctcgaggtgttttctagactagactattatttgcttgctattcgatcgatcgacgaagcatatttcaaatggacagattcctctccatctccttcttcgcccccgtctggacagagtccatctatttcgactactactcatgatccatctgtcacaggtcttcaagccattccagttgacccaacgttggctggcacaaacccagatctgccgttccaggaaaagccggtgttggtcaccgctgatggtcggtttgtccgacctgaaaaagaagcctccgcgccagagagtagaaattgggattcgggggagggcggaagaggaagaagagggagaagtgcaggaaaagtagagattgtggaggatcgaccaggaaaagaaggtttggaaggagttggtgtaggagccaaaaacatctatctcgttgtactgaaggatggaattgtctcggtacgttcctcgaatctcgattacgtcttatcctagtcagttcccgatttattagctgagcgacaacactggatacaccgttgtcactctgtagttccacttcgaagacgtttcaaaacacattttgaatgtgagacagcaaattcggagttctcatatccggaatacactctcatccggtaagtctgcccttatttgtttcgctgtggttctagctgtcccaacgctgatcgagtctttttactcttaccgtctttgtctcagattggattgcacatggtgtcgtacgttgctttgtcagaacacatgaaatgtttacaacatgtgctgaatcgtctttattcatttatctatccacacaatcatcagatggattcagtagtcgataccttcttccccctaattgactttgtggaggaagaggccgatgcgatcgattccgaaatcatcatgcatgatgcactttcggagttccctcttcgaaaacttgcggcagaagccgaggcggaagcggctcttatcttggaacaagatgagcaagacagaaaggagagagccaaatcaactgtttcgacaggcttcttctctggaaactggataggtcgaaaagtgaaggatgaaattcagccagaaactcaaaagacaacgacgtcgacgatgtcaccgaaaaatgaatttgagatgaaatccgttccaacatctaaatcaattcctaccccttcatctccattatcgaacttatcgtcctcgttcactcctgtatcaacaaccaaagaaacattcgtggcacctattgatcggaaaccgacgttcacttggccttctacaacgacattcctacctctgatgcctaggcgaatcattcctacgcgaattatacctcgtcgaatggctctgtttctctacacattgctcgctagaatacttctgtttctttcccttcatccggctcaacgacaagccaggaagggagctaagaggtccaagacatacaagttggaaaccaatccagatctcgatcgaggtgagatattgaagagaatggtgaatatgagaaggttgacaacagggttgacgaggttgttgggacccaaaagagaagtggtcggtcggttgagaaagcgagtcgaggagttgggcaaagagggctggggaggaggctccggacgagaaatgggaatttatttcggagatattcaaggtatgttctctaaactccctttcaacaacttttaatagcccagatgtgataaccgttttattatccacttataaacaatctcaagatcatataatcgaacttcaaagcaccctccttcactacgaataccttttatcccaagcccagcctgcgtatctagctcaacttcaagtcaggctatccatgaccagagcgaggagtgatcgagccatcctgagactatcttacgtcgccattggaatcttgccggtacaattcataacctgtatgtttccgtttctttcttttccttgtctttacttctttcgatctcggtgagaatgcgcttgcctagcgagtttaaccagcgctcaattcgtcatatacctactattttgaatttgggtcggtgtggtagcctcttttggatccaacgttcatgtgcctgtgagtagttcctcgatcctcgatcctctctcgtctttcgccttcgtcttgaccgtttttccatcaagccaagtatctgacgagcctcctttcacttttcaatccatgtacctgttctagtacatgcgggacgatgatcatccagagaacggtcatctcgagatgttcttcggaatccttggcatggtcatatttgttttggccttgttcgcatgtcttatcatgtacttcaaacgacaagctagtcgttctcggagatttagaaatggttgaagagttttgtctgttgtgctttttatttgttttgattcgaatatgttttgttcaattcatcttcgatgaattttgtcgcttcttgtttcccctctttgctcctgctattgttatgtttctatattttccttatgtacgaaagagttggatgatgttaatcctgatacgattgtgatgaaaaagaagaagcagcatgatctcgttctttccataaactatagggcgagggtatcaagagcattgagatccaaaaagagaacatacgagaggaaaagagagaaagcaaggcctaacaggagtaggagacgcaagatgtagatataacaaaggagcagttaggctatcatgaaaattcgtgtctgtaaagaggatcctttaggcgtaaacagatgacttagtaagaggttaggaaggattttacagtggtgtcgatgaatcaacatgaggagcaaagtacagaagaagatgcgaaaataagtgatgtagacattgagcataagatgggcaagatgggaatttgttgtacaagagaaaggaggaataaggaaggggatcggtcattcaggcgggactgctcttcgtctgatcatactccctagtttactgaatcgtttctcgcctttagtgatcaatggagagtcctgaccagcccgtttagaatcgtttgccacaaagagagaagatgataccgttcgtgttctctcagatttgattcgagcagcgtcaaaggagctagttccctgaagtgagctctgggaaattgaaggggcgttcatagagctttgataagagtttggaggccgacctgctttaagaatcgcagtcttaagattcacagacgtcttccccggactaccttggaggaccgaggaagatataaggtcaggtgagtggctatctcgagatgatcttgcttgaaagagtttggattttatgattgttgagattggggaaggcgaatttccaggctgttctggacgggatgaagggatcgaggaaaaggttgaggaggaaagacgtccgagagaaagtcgtttaatctcttctgcaaagtttttgcggaagactatcgagaagcgcagagagttgtatcaactatccttgtcaatgcaagagatattcgtcagcacagagataggacgtacactgttccattgtgatgtggaacggggacatagaattagggcataataagccatgcagcacgaggcatctttcgataaccatagtctatacacgaacataagtcaggtttgttgttggatgttgcgcagaaagcgtaaaataggaaatccactcacatataaatctatcgaagttcggagctcttcaattgcttcgatctcttctggatgttgtgctgcataaacctccgaaaaaaaggcggctctccaagcgggaatacctccgttgattggctgcgtgcaaagaatgagccatattctctatcaacgaagagactgacggaagcattaagctatacataccgcatcaaccgcgccatttaaagccattgaaagcggacttgtattggtctcttccattgtttcgatcatagtcgtatatcgagcttccaattcctgataagatcaatccatgtggcaggtcaggtaagaggtcaatatgagagaaaacatagagcatttaaaaaactcacggttaactcctttgttttcccgtgtacgtcatctaaagcgttttgaattggcgatatttcaactctacgacattccttgacttctgatcgacgcaaaatagtgggaaaggactcctggagacacagagaagatctggataagcaagtcactggaaatggagaagaggaaagcgatgtacctcagtggtcaagtagactttttccaagtaaacttcagcaatattgatctcttcgtctactcttccatgtttattgaaagggcgagaatatgagaataccgagacattgctgatagagaaaagaaacattttaaaattcagatgaggacgtaatagaagagatgatatgtggggctgatttacttaaactcatggtaacttcgaatctctctaggaacgttttggttgaacaccgcaagagatcggtcgggctccggtgttacagcaacgatttgaattcggagctgttcactcgattctgttgatctgacgatggatttgattaaggttgccgaaggatgattgttttgaagtcggtcacaaaacgctccatacttctcccatgcaccacctcggaagataaattgacgatctcgaacggcgataggaaacggcccaaaatatgagaccaagaaatattgaggagatggcctttgtttagtcacgattgactccaccagttgagctcggtgagataaaagttcagcaagacgattgctataaaattgaggcgaatgttcaaagagggtatccttcagaaatgcaagctacctctttcaactcataggaaaagaatcttactagtcaaaagtgacgctactgtgttgcgactcaacctcttggcagatagaggcagctagttcataaaaacttcctctacctagattaagacgatgaatatctgtgtcagtcatgtacatgcatatacatcaaaaaaacgagaacgaacctaggtagtctataacttgcatgaggattgattccttacgacggaagtgagactgtctggggaactccatagaaccgtacgagaagggctcgacaaattcagataggttccattcatagagggaagcgtgaagtttcaatgtgagaccggcctctacaaaatcaccgtttctgacatgaacgtccacaagctgatggacatatgagatatctataatttgagtgaaacaatactgtatgagccatgcaatgaatatttctgaagctattaaaaactacttacacaaagcatccttgccgccgatgcgacggataaaattcaatagccgaagtgcacatacagtcctatcatcctcatactcctcacctttgggcaaatcccgaagacttaaaagcagacttaagaatcggtctactgagtctagaaagtctatagcttgagctcgaagttgaggatccactctggatgaagagaacatagctcgcaggttggatacgaaataggctcgagtaagatcatcccctccaccgccttgcatgaatatgatatcgagcttgtcgatcatctcggattcgacctagaggagaaaggatctcaagacttagcttcactatctgttaacctcttgagaaggaaagaacaaaggataggatagttgcgacataaagaaagatagcataataagtcggcacaccttactgatgctgccattggcagaccattccgagacaaacatggtctagataccatattccagacgaaaagatcaaacaactaacgtcagtaggtttgattatcacgaaatagatcccacaactcacataaaggatctctacagcgcgaattcgtgagctatcgtggtgcgagagacagagtgatagtatgtcggagacgaaagtgagaaaatgagcatgatggcggccagaccaagatgtaatacttccggactcgtttgtatgcccaagagactgccacatgcgatgtagaacaagagaactctcttctcgaagatcacctcccaacctccaaacagctcgacatttctgttttacaaagcgaaaagaaacacgcgcaacggaagattgagtgtttgagctcgagatatactggtgacgcgagaggagataaccatacttgaggcccaaacgattcaatcactagctgttttgaaccgactatcgcgaagatcgtcttgaacgctgccttccataattcaatcgccgagggagctagattggagtcttgtggaaggagtgatgccatgatagtggtgatttgatcggtaaacttaaggatcgagaggtgtgctaagattgcaatattgatccaattatcaggaaaagcgtcgtaggcaaggatagaggttgctatctgaaagaaggaaagagctgtatgatcaaaccgctcttgaccttggaattctagttggtcttccagaaagattcgtagaagtttaggggtctgaagcgagatcatctctaataagacaatagaaatctcgccgaggaggatgttgaaaccttgaagtacagtcgaggtatcattttctcgacgaggaagatagcctactaaagcaaatgggtatgatgatgggaagacgatagggaccagcgccagtaccgttgctagtggtcgatgtctatcgatggcttgaagggtctcgacgtcgcgcaactcatggtaagagtctagtattctacagaagaagagattatataagtgataatcaagttgtatcaatacttaatggttatactcgataaggtatgccatggaaagagagacgtactttggaagacaactgaacactaagtccacattctcctgctcctgaataagtgccttctgatcggcggtcgcaagagattctgatagccgatcaagcatcacagccaagatattgatggagattcttaggcactcaatccaagagatccgagcagtgtcttgagcggctgatatctctgcatctgaaggagtcgccaggaaccttcccagatgaggcttgatccaacaaatcagcgaagggatcagagcagcacgaacagttggatcttcaaatacaacgcttttgacagtttggaggtgaagaagaagcttccaaatagctcccttaccgctcagcctagcggcggaatcagagaattttacgatgatgtcggacagctcagaagcgttgaaggttttcgagagatcaggaataatatcggagaaatattgtactattgtgccacagaaaatgcccgaatctgattagcatcagaatcatcttcttcgccagttgagaaaaatcaggcttacgtgcgatggtctgtgtaccgatgatacttggctgatctatcttcatcaggtctgtgaagtctcgtagaagcactgcatatcattttgatatcaatttacacccgacacataaacatgatacacggtattacttgagaagaaattgaatcttacagtgcagcccatctttaaatgacatctctagatgttcaactaaccgctcggatgtccctcccatcatactcgcctcttggatcttctgcagttctcttgatctcgaaatgagacggaaaatgtaacgcctatatgaagaaaaaccccggaaaggttgtaattagaagcattgagagaagtgattttgacgacacacggagacacgaaccagactttgatagccgctctcaactgttggctcgtcttgagctttaaaagtcgactcatagcagaaatcagcttcttccatacgttcgcgcttgagaagtgtccatcgatgtagacgtccaacaccttctgaaaattactaaatctcctatcctgaacaattcctagtaccctaacaagcgcatcaaagaccagaccttcaacctcaggatcgtccgaggcatcgacaatgataccgaaaagagtgtcaagggtcgcggacaaaactttgcatatctctacttcagaaacgaaggtaagttgtttgagaaccgacgtaagctctgaaggatttgacatcaggtcgttcttcttccaatgaagaaatcgaactagcacctcggattgtgtaaaagtagttgagcagaggaaagaccggatggacagagaatctcggattggatgaaccgtacgtgatagtgtagatgagactttattaagctccagatgagttttggctgcgctagaaaatggaagggaaagataaagtttggggttgatatggttgagttcctctgtagttcggtagaggatcaagacatgatctccgtcgggtaagaacgagccgtcttcctccggtagcaatggtacaaatgcgaatgcaaaaggcttttcctgatcctctatcatgccgtcgattttttctgaattgctcgtcgttgttgaagtcgaggtggagaatagtcgctgtcgaaacgtaaagaacagatgacagtctctcatgctatctggaaggacatttgagatcttgactagttctccgaaggtgggagccgacgatttgttgaaaacaatagaagaatattctctgacggagtgttccctagaaccttgacttattgcgttgtcgacaatccgtccatctcgatcccgaacttctaggtcaacttggaaggcttggtgtgtagccaccgacgatccgccgaatccaattgaacttattccttttcgtatgcgtatgctgccccctcctcctgctcctgctcctgatcctgttggtacctgatggaaacttgccgaccagagtttgacgtagaagtcattgcgattctggtcaggaaaaactacatcagggaaaccgaggcgttgagtacatggcgtgtcctgtaagagagaggaattcgatctaagtatcctaggaaggtgtccgtggaagaatcgaatatcaattgctatatcatccgttctataaccatattgaaagcagaagcacgagtctcagcatatggtaaacatagaaagataatcccaaccaagaatattcccacctagaacttctctcaaacatgtccattcttccattgataatgtcttcgtgtatgcttgcaaagtctgcttctattgctggtttgaagattttcatcttgagctcaacagatttggtttctgagatttcacttgtattgacgagatgtcccagtttgactaccgcgcatccgaaaggccttctgaaaacacctgatgttcctcgagaagccctgtagaggttggcgcctggctgagaattgttgttttctaaggctgatgtagaactggaggcgtgctgattgaggaggaggctagtgtgtgaaaggttcgaagaccgatgatccgaatctgcagttaaggcggatgttattccggtttggtttgaatcgtaaatcgttgattgtgtgctgggaattattgacatcttcattcctccgcgccttatgatcttacatactagcatgatgtcctcaacatcttggactccgagatcttgaaagagtgtccgaaccggtacaagaggattgctgacagggttaccttgatgatctaggataacaagaaactcttcagtgatgaattgtttaagtgcatccgagtagagtgagaaaaacagctcggccgtttctcctgggatgcatagatttgctacaaaagcccgtaactctagaaataagtgaaagtaatcaacagagggaggtgagtcggagctgagtagagatggtgctacgcggctgtcactagtggttgttcgccaacgcaaagagggttctgggcccgaatcgagacgatttcgagagaatatggaagaagggaccacagatagggattttttcctgttaagagaaggtagaggagccgacgaggatttatcacgagaagagctcattgggatatcgagcgcagtagatttggttgcagaagtgatatacgcagaggcctaaatccgtcgaaggcggtcagtagtttagtatttagttgttcctaaacttttctattgagaaaaaacagaccacagtaaagacttaccacctgcatggtgaacattcgagttccactgactagctcggtgtcatttcccttcgactccagtttatctgtacttcctactaccaggcctcctttggaagggtgcctgacgatgacttccaagccctggatgacatttcctctaaccaacctagcaacacaatctcttcttaggctatcaagctcttccatatctaaatttgagtcaatcaactgtcgtcgagcgatgtggagagcgcttatatgcgcgcggactgtatgaaagagcgcgtaattttgttctagtaggtagacaaagaggcgctgccaagtgaaatatgaaggtgagaggaatataaaagcaagttactgaactggacagacaaataaattacgcttacaaaatgccactctctgagcgcgcacgcaatctcatcaacaagcggctctgttgtccccttggctgtctcatctccggccttcagacttggtattggaggagcaagctttggagtccttttttgaagatcgccgtttgaacttctaagattttctccctctcgccctcgtcctccctcaatctcctcttcctcttcctccgcaagcgcctccattgaagctttccctctttttctatctatcgactttgcatgttctgagcaggcggacgtaagtttcttctcggcatcctctagctcttctctgatatgaacgaagctggctggaaatattccaagtgtcacacttggttccggtagaggaatttctttggcgaaaggcgatgggaacactgcagaggtctcggccttattttgttgttgctgttgttggtttgccaggatgtgaacgggtacctgggagctcgatactatatatcctctgtaccacatgtcttgcgcgaccccttgattgggtatatatcgctcaaaggcgtaaatttcgtctccaacctcgaggtcggccatgcaggaatttgagtagaaggtatcattcagattcgttgaacgtgtactggttttagataatactgtggaaggatgaaaggggtgcttttgagggtagacaagtcggtagtagaagggtagggcatacagggattgtttagccctctgtggcatgatctaatcaaagaggataaactcacgatagcaaacccaaatgcaatcttgcaagacgatgagagtctcgcagtatggtcagaacatgatattcataaacattgatcagcacctatagacagaaacatacctttggtagaggttcccatccctctacctgtctaagttccggtctgattcgtgttatgtcgttagtatagacaagggtaaaacctgataccgacgtaatcagggcgaacgcctcacctttgatttatagaagacatcttgacagaaacctcctcctcagatatgaacactagatagcttctaagatacagccagacagcgatagagtttgacgaaaaatcgaagagaaagatggaccagactggatgatagcagtatcgattacaggtgtgtattcgaggacgcatgactgaatgtaaggagtcgaaacataggggcagccgccacacacgtgatataatatagccgaatgttcagtacagcttctcacaacatccgccaaatctttgcccagaaaagaattttataactttcttgtccctctctaggccttccttccgacacacaaaaccactatcatacctctttctcttgttcaccatctcttgatttgcatagagagaacaagaaatgtcttcccttatctctgctcttgcttgggtgcctcaaggaaagtctgctagattcccgtccaagtacagcttggattctaaggagcttgagagagtctctgccctggctcgagttgagcttgacgacgcgaaacatgcattgatggaggccgagggtgtcgccaagggtgccaaaggagtcaagatggctgaggatggtgatatggtcgatgaaggctgggagacgtgagtcgacgacttttctctttgctatcggttgatgtgcatgtataggaccttgcgtttgaataaagaattgcacaggatcatatcgaaacatctagctggagtggaataaaccaaaactcatgatctctatctctatgcgaattttatcaacagggattctgacgaggagaaggacagtgcagatgactctatggccgtcgacgacgaggagaatgccaaaccggctgatcccaatgatctctctgccttcaacctggatacctacgatgatgagccgagcgccgaggctagtacgtatctgctgacacactgtcgctactaaaatcaatagtttaatcatgcttcgattgctaccatccaggtgtgttcagcaacatcaaaggattgacttattaccgaaacgcggaagatgatccatatgtaaccctgaaagaggtcagccatagctccgcgtttgccacctgctgctctctatattttacttaaaccagaacttgggctcactttgctctcgatatctcactgcttcaatccaggacgatgatgagaatgagagagaggagcttgaggttcttcctacggacaacttgctgatcaccgccaaaacagaagacgatatttcccaattggagattcattgctatgatgaatctgaagagaatctctgggttcaccacgacctaatgcttcctgctttgcctctttgtcttgagtggctcgactacccacctcacccttcggctgatcaaaacgatgcttctgccggtccatcaaagactcatgggtcgtatattgctgttggaacgtttgagcccgagattgaaatctggtcgcttgacacggtcgatggactctaccctgacgggcttttgggtcgaccggacaagtcggcttcgcacgtgccggtcgcgatgggaactggaaagaagaaaaagcgagtgcagaagccgagagaggtctcttcagattatcacgttggagctgtattgggtctttcatggaacaagaaccataggtctttgttagcatccgcatcagaggatacgaccgtcaaattatgggatctctcaagggagagcacccacgcggccgtcagaagtttcaacgttcactcggacaaggttcaggccgttcagtggaactcgttcgagccgacatcgttacttaccggtagttacgatcgaacggtcaggacgtgggataccagaacaccggacgctggtgtaggcgctgtattgggaagcgacgtggaggctgtcaggtgggatccgtttgatactcacggattttatgtgcgtccccctctattttggctcttgtggcaagaaacactttacccagtctttgaatcctcacctacatttgctttttgcatcatatgctacgtttcctatctacctaggtttcgcttgagtccggtcttgttctctactttgataatcgaactcttccatccttctccgcgctttcagacccgttgaacgcgtcggccgccaagtataccatctctgctcatcagggtgctgcctcttcgcttgacgtttcaccacacgttcgaggctgccttgtcactggaggaacggataagacggtcaaggtgtggaacatcaacgaagaaggcaagggtggcaggagagatgttagcatggtcactagtcgagaccttggagtggtgcgttacttcttatgcttcttcaactgaactcaaggctctctcggctaatatttctcttcgtgttgttattcattgaatctttcgtagggcaaagtattctctgttgccttctcgcctgacacgccgctaactgtcgctgctgctggatctgccgccaagcttcagatttgggatctttcagcaaactctggagtgcgtaaagcgtttggccagcggctcagacaggctggacgggaactcaaagaggagaaaaagtccgacagcggtgggctgatcggagtgatcagcgatgacgaggatgatggggatgaggatatggagtaagagatgtcgggatgataatatctgaatgaatttgccaatagaacgtaaggcccagtgtttcctatcacaagtaaaagacaagagaacgaaaatattgtagaagccctgattaggcaactaatgggacactgttgggtgaaacatgggctttttgggggacaaatgggttggtcttggtggttcatgactcaaccgcagtcgatcgaaggaacaaaggtgagattttccaaaaacggtcaaactatgcgtagagatactcttcgagccgtacacaataaataaagggagactcctcttgacgcgttcttgtttcttctttcaacactcaccttcttttcttttttctttcccttcactcacctctttcaagctttcttccctccttcccctccctatccctcttgagctggtctcttcctcgtctccttccctcttccacagctttctctctttccttttagcgcaacccctctcttgatcactcccgaaactctcaccttcccgccaatttgatcctctccctcctctttcgactcgtcaggaacgcgactcttttcccttcacaacgcgctcttctgcaacgcttgcacctagcttcatagccactctttacgcacacaaccacgtataaacctttccgtcccatcctccacggtttttcgctactcttccaaccttccctcgccttttcttctagccctatccctcgtcctcaaaatggcttccaccaacgctcgatatgcttcgtctcttcttcccagaagtatgcacgatcctgaacttcttgatatgctcaaacagggagtgaccaaggaacaaatccgtatgtgcctctagaatgtcttgttttgactagcgcttgtcgtggttcgcgttcctgaaattcatcacgcgtacttggacttttcactcaaccataggacaccttgccgctaaagcaatttcggtgattgtagtagatcagccttcgactgctcttcctacgcctcctacgtctccctctagggacggttatgattccaccgaagaggagctcgctcaagatatctcgactccctcccttccgtcactgcagacgttcattcggctgttggtcgaacagtccaacgtccagccatcgactctgctagttacacttgtttatctcgagcgactcaagtcgaagcttcctcgggtagccaaaggtatgtttacttacctctcaggaacgctctgacgactgtgacagccgttccatatgctgatctgtccatcatctttcatgtaggcatgcactgcacccgccaccgagttttcctcgctgctcttatttgtgctgccaagtatctcaatgattcttcgccaaagaacaagcactgggtaagttgacctttgctctgtacctgaaacaagactttcttacatcttattgacctggttgtatctttatcttgcctcagtgccgatatgccgctctgttctccctgcccgaagtgacattgatggagaaacaactcctttacttgcttgattagtgagtcccactctactgtccacgttttgaatagcggctcatccgatgttgtttttccggctctcgccatcttgtcagtgatctccgagtgactgaggaagagctcttgattcactatgcacccttcatcaagagtaatcgagaaaagagggctagcaagctggccgcagttgtagagaatgatgtcgctcgaagatccggatcttcgtcggccgtatctcctacaaacgtgttgcccgcgcgacaggccactaaaaggtgaatctttattcgtgttttgtcaaccatcgtggatctatactcatcttgtctgtctttttttttcaccgcagaccttccaccttgcttcagccgcctgtgcttactcggtgtgaaacccaagtgcccgccatcccgtcgcctcctgagtctttgtccgattcttctcttcggacattgactcaatcgctttcgacgacgcatatctcggcacctcgtcccatgcgcctcacgatccctgcctcccgatcgtatcacccctcatcagcgtcgtcgagttcttccgcaagcgacacgagctcacctggttcccccggagcatcaccttcaagagttccccggctggttcaccgaggatcgacatcctcgctttcgtccagctcatcatcatctgattccgattctgattatcatcaccatcgtcatcaccgaagaggagaggctgtttctcagccgaaggagttgcatgcgcctaccaaggaggctcaaccccaaaagggttcgcagaggatgtccaagatgccttctatccctagcttaaggccgaggggatcgtttgccaacttggttgctagcgccggtggttggggtcggttcatgggtgtaggcggaggctccaaaggaaaggagaccgttcgggtggccggattggacgagagagagatcgggtattgaactggatcactctgattctatctgacgtctttcctcattttctttcttctcccttttgcatctatccctactgcgtgcgttcatttaatccccccgtatggctattcttccttgggttcctgtatcttgcccagtgcattgttgtgtttctagttccttagcaccgtctttctttacttagttgacagtctatcctggccgccggtcggccaccctctctcctctttgtgtcttgtctaaaccttcccccccttattcattacctgcatatgtctcgtctgtttcctgtatttcgattcggcatactatttgtgatgttgatcaatgaacttgaacactatagatttgtcaaggactataaaaacatatgaatcataaccctaacgttatcgagcattgtctaggtaaaacccgtcaacgctgctttgattttcttttgtcccttccggatcttccttttgagcgctaagcgatgatagacaggaaccagataaaatactgactgactcgtttctgtgatgaatcccatttgtgccctgattcttctagacaccttttctctttcttccttctttcctttccttcgttgacctttttttctcttcttggctgatatcccgtctttgtgaagagctaacgacttgtacatcacacttttcgttcgacctgaaagtacacgggaccttccccatcagtctctcctctcgtttctcccttttctctttaatccttacctgtatcagtctacatcatgggatgtgccgcttctaccgaagattctgctgccaaagcccgtacgtctagacgtcaaccctgtactcgtacccactatatctctgatgtaccacgacccgactgatattcttcaaccggtcaccgccgggttatctacaacacaggcaatgaagcgatcgagaaccagatcaagaaagatcgtcagaatctccagaatgagatcaaggttcgttcgactctcgcaccattttagttcgatccaagaggactacatgcgctgatacctgtgagcgtgctctatctctattaacaaatagatgcttcttttgggagctggggagagtggaaagtctacggtgctcaaacagatgaagctaattcatcaggggtttgtttacacttatccctttgggcactccacctcgtgcatcggttggttcctgacagctcttgtttgccatcgggtctactacatcaggtcgtacaagagtgaagagcgagaggcttacaaagagattgtctttagcagtaagtgctgtcttgttccaagtttttctgggctcttaaaatgagatgttaccaacacaaatctaactgtatgtcgtctatatatatcagatacctgtcaatcgatgaagtgagatcgtgcaggagttcgcatgtccgttcctttgtatcataaacactgacgatttccttttgtcttgacccctcaagggtcttggtcgaggcattgacatcgatgcacatcccactgggcaacccggctaatcagcgacactgtcaaaccattatatccgccccccatcagatcgagggagatacaatgcccggtcagatctctgaggccgtcagatgtctctgggcagacgccggtataagagctgtctttagaagaaagaacgagatacagctcaacgactctgcgcaatagttagtatcatcagtggtctgccctgcttatgtattttggttagctgatcggttggtccttcttttacagctactttgatcatatagacgaggtcgggagcggaaggtacctcccatcggaccaagacgtgctgcgatcgcgcgtcagatcaacaggaatcacagaaaccacgttccgtataggagacatgacgtatagacttttcgatgtacgtcgtttgcttcacattataccatagtcagattaccagactgaccaaagatcatctgtccctataggtcggaggtcaacgctcggaacgaaagaaatggttggtagtgcccgatgttttgtctatcgaccttcgggaggaagggggagactgaaacatactttgaggcgattacacaggattcactgtttcgaaaatgtcacagcgatcggtaagtcggctcgtctctatatattgtttaatgtactactccgcttcagcacattgctaattttgtcgatctacatgtactcttcagtcttcctcgtggcgatatctgaatacgatcaaaagctctacgaggatgagagtgttgttggtacctctctaacctgatcgtgaaaggatctgcgtaaacatactgatatccttctctttctcttgcgcactgccagaaccgaatgcaagaagctcttaccctgttcgagtccatttgtaactccagatggttcgtccggacatctatcgtatgtctcgtcttttgtttcaattcacagatagccacactttcgatgtttctgacacgttgattcaacagatcctctttcttaataaaattgtgagtcggttgttgttgtcataatcaattaaaaaggaagagaatagaatacccatcatgttgattgatactgcggctggaacgcaggacctcttcgccgagaaactgccgttctcaccgttaggagactactttgaagactagtgtgtatagatatcagcatctgattggttagcttgccgatgtccataatgttgatctgtgtttggtttgtttgtcttgcctgtctcttcttggacttgtagtaaaggaggagatgactacgacaaagcatgcgaatacatcctggacaggtttgtttccctaaatgcatcgccagacaagtcgatttactgtcattacacttccgcaggtatgtcaaacgttgaatagacttaaagcatgaaggatgcgtgctcaaggcatatcgacatcttatgtagtcgacacgaaccagatcaagtttgtattatcagcaatcaacgatatcctgattcaaggtcagtttaattctgtctaattaaatctgtcctatgcgcctagactgatgcttcttgtttcaaatctggggttactcaatcttggtcttctcgatctgtctgcagtcaagtaagttcccaaccacacaggtattgttcctatcctcaatatgatgctgagccctctgattcatttgtgacttgtctagtctccgagattgtggtctcttatgaaagacaaattgaactatacatctcagcactttccaacggttttcgcttcctctccaacaggtttcttcatctatatcttataacctgtcgacaacatggttctgttttcccttctttattctatatcttcttgtttcaccttgcctttcgacatttaaattgattctccaccacatacacttcatgaccccatctcatatataccaatgcattatactttatgattttcgacttattttatgagtcgatggggtttcctcctcttcaacgaaacctataacaacagacctgcgtttgtttaagcgagatggatttgatggcttcaatttttttaatctgtcggacgcgatggaaccgaaagattgagaaggaatttcgcgcatcaaagtttcaattcttggttcgctagtcgtcccgttccatctcgtactacccatcagcatgtcggccatcacagctcttacccatcagatcccttggtttcttcgagatccggctatcgcaatcattggagaggtacagtcattgtttctcgttgcatacgtcctatccttgccttcttccttgggatcagtaacttgccagcgaaagaacaagctaacggacatgatcactttcacctggttgatttcaatgccatgaaaaccgcaactgaacaattggaatgtctatactcttcactcagaaatgctacacgacattgatctatgattttgatatattagatgggccatgtttgacatacgcaatctctaaaggacttgggtttgggatagtcattggtggatcgattgtcaagatcccacaagtacgtccagatcatctctcactttggttccttcttgattctgtcattagatgcgattgccgtcccaagtttgtttgtagatacttatcctgacctttcatttctactggacattatcctctcttcttaaaagatcttcaaagtttctgcaagccactcagctatcggactgtctctacctgcatatgtacttgagactctctcctacgcgatctctctcgcctacgcgtatcgatccgaattcccattctcaacttatggcgaaaacttgttcatgaccattcaaaacatcgtgatctgcctccaaatcgttcattacggatccgggtcgagagcgctcactgggatgggaggcagtttcggaaagagatcgagtagagaacaaggaagagccaaacaactaattggctggatcattggtatggcgatcgtaggcgggagcttgttcagtcaaacgatcattcctttcccagcctgtcagtttcttcctctccttactcacacctgcgttttcttctctttcctctgtgtcgcctctgggagcaaggttcttcgaaactgattctcttgtgagatctgctgtcgcttctcttgaatgatattcgtcctaccggtttggctatgaaacagtaaagcttttacaggtagctaccgtgcctatcggtcttgcttccaaggccccgcagatcatttccaactaccgacttaaatcgactggaaacctatccgccttcgctgtattcaacggttcgtccatctttctaacaatccttgctggttaaacgaaaccagaagatacagtattttctcttccttccgtgttccgtgctgacttactcttctttgttcatctcaacatcgcgtgctcttgactgcgtttctagccctcctcggatgccttgctcgagttttcactacattgacagagatcaatgacccactcgttgctttctcgttccttctctctgctcttctcaactcgatcatcgccttccagatgatcctttactggtctcagcctccgtcctatccgacgacatcctctcaatcaaacacccctagaggaagtctgtccggtccttcctcaggccgatacggatcaaaaggaggatggggcgagaagactggaacagaatgggaggcagaggagagtggagtgggaatggatggtcaggcggcgcctacgtcccctatgaagggtccgaaagaatggtcccgaaagatcgattgatgtgttcgtactggacgtcgatagaattatcttgagatttcttttccctcttctttcgtatggtaccgtcctctacttccttgctcactgccatctgctttatttgctgttgttgttgttgttgttgttgttcttcttcttcttggtacccccttaccttttgtgtttgttcgtcgatctagtccttgcaaggttgatcacgatacagaataatttcaacttgggtttgtgatttcatgataaagaaagaacgaaaacaaataaaaaccggtcgaaaaagaccgaaagtagcactggggcaagaggtgacgaggagggtaagagaaacaagaaggaagcgcgaggtgttgagtgtgggtgacaccacgagatggaaaggatgagaaacgagccgagccgagccgagccgaaccaaacaaattcaaattcagaacaaagtaaagcagagggacctgatcaggttaaaggattcgaggaaacagacgggttgaaagaaaccagatggacgttaatgggaaagagaggagatagaagaaaggaacggtataagaaagaggaagaaaaaagatatcagagggaagacataaccacccaaacaaaccttggcgataattaccaaatttgatagagtgttgcacaattagtggtcgggattgagattgatacgaaggcgagaacaagagcaggctcaatatacggaaacgaagatggcgaaacgttaacaagaataaaagaaataagaatgaaatgaaaccaagatgtgtgcgaaggaacaaggttgtgtgagagcgaaaagattggggagtccaatcgaatggtcctgatcatatcgatatgcgcacccacacatatccgaaagatcaaactccaacccatccaacgttcaggtcgtaccgcgcgctctccttctcgttcccagacttgacaccctcgagctgattcatcgaccgtgctacccattctctaatgagtgatctaccaaagacaactaaatgaggaagcatcccacctggccctgggacgtcgacccctttgggtagcccaggagttcctggaggaggagagaatatcccgatgggccaaccccagccaagttccggttgagccgggtcggtaattcgttcagaaagagaagaaccagcgccgagaagctctgtcgatccatcctcttccgcttcgtcctcggtgtcgtctccttcgtccgaagagtttgtcacaaaggacgacgagaaggaagaagaagaggacgaagacgtcagatcgtccatagactcgttcaccggtagatcggtctttatcctcttcgcccatcgccgtctgtttccgccacctgtggatcttctggcaatctcccaagtgcgcgggaatcgtttctcgatcacgccaaacgtcagattgacctgataggtcgcataaagcctcatccctctcgacaagccagctgtgagtccgaggacttgaggaagataatccaaaggcaaacccaagtctccgccgtttccgctgttggaagcggcgccgccagcgccacccatgaacgctgccggggaaggagatgaagtcgagctggtgagtgagctaggtgaatctgcagagatatgtgaatacgttgaagtcgagagtttggatgaggaaggatgaggcattggggttgatcgagcagaggtactactggagtacaaccgctgcgttcggctgtgaaggattgtctgctcgtaagtcgtgatatgcaacaagaccagagcatcgatcaagtagctagaagacgagtcacgattaggaagagaagggtgagtactcgcttatatctagttgaagcaatcaaaacaagaggatggaaactgcgtacacgagtcctagcattcctttcgctgcctcttcccttgcacgtttccccttggagctgcctacggaagcccctttgacgactccctcccaaccgcctcggacgactttcttcatcccatctaaactcttccagacttcgaggttgactcgaccgggagttacctggtcatccgcccagaaggcgtacacccagagcaggatcgagtccgtcagctctatgagcgtctggatcgaagtgaatgtagggagtgacgttggcggataaagtctggatcgggcgtccgctttatgtttcagtgatcgtgcaagacctcgatatctgttgggtcacaccgaaccaacattgaaggaacaggtgtcagcttggcacatccgcagtgacacaacaggataaacgaccgggaacaaggttggagaagagaacgttggacgaacgtgtgagctagctctttgtacctgtccgagtcccatcgcttgacttcttctaatcgtttcctcaacctggaaagcctatcggctctttcgtcagcctccttttgcctggccagccgttttcgttttctgcgttcacctttcttggcggcttcctcgctattttcaatctctgacggaggagagggaatcgcttgcctagttcgagagcccttagacgctgaagaggagcccgagggatatgaagagttggaaagagagagagccgatgggtcttcaagggaaggtgagggtgagcgggacggaggaggcgagagaggtaatgtgggcgacaaagctcgaggaaatgagctcaggatctatcatcggcggagtccgaagacgattcgtggtcagcttatagtcaactgaaacagagaggaagggttttcttgggtttcggatggatagcctgaataaaaagggggcgaaagaaaacaaggaaaaattggatgtagacagagtgttctcttgtcgaagaggagggaactacatcgagtagtagattggacatccgagtgcctaatagtaatccgcaggcaacgtaaccctccaaacagagcttggtccccaacgggtgacaacccggacggactgctctgtgcagaatttcgtcgtttgccatgctccaactgaaagacatgtcggtcgagccggatgaccaggacgaatggttgatggggaccgggagatcaaagaaccaagcagaaagaacgaaccttgacttttcgtctggccagctccaagtcggacaattcggaagacctgtgttttgcgaccggttcgatgtacatatgaaccaaatagcaggcgagagccgaaggacacgaggagacaccaaagagaaagaaagcaagagagcaaaagaacaagacagatgaagaagacgaaagaaagatatataaaaaaaagtgatgagcctttgggaacgtatgaatcatgcaccctcgggacggccggcaagacacgacccaagcaaaagaattttcccggcctccttcttgaattcttctgaggattggctttgtggtgatcaaaagatcgagctgcgttccaatcggacaaccgagagagaaaaggaagacagaacgtacatggcagaaggaggaacactcgatcctcgcttgagaagagcagagtcctggatgtgatcgatccggtggatggccgagagggtggactgtggaacgccgtctgtcgaagtcgctcgctgatgggtcggcggggagacttgaggggacgacgaggaagatgaggaagacgacgaggacggtgatttcttggggaacgttctgaagattgccatctcttctcttctttctttcttccttcctttggagagaacacggacgaacagatccacgatgggggtcgatgtatgctgaccttgggcgttgttctttgtcttccgagtcggagctcttcagtttaattcgccaacgctgagccatcacacgcgggtaaccactagtgcgggttagtaaccgaaccaggctgtgtaaaacacgtgacttttgaatgttgtgcacacacattttgattttttctcattctcctctagacccagtgaatttttcgtgttctgtccaggtcaaccatcttcccgattaatcttgatggccaaacgaaagagaacagacaaacttgtctcggagatggatccttctgatgctgttgaagatcccgaatttgaggacgacgaggccggtccgttagaagcagtcgctcccgatggatcgatcatcaaacttcctcaggtcggtccgtcccctccctttttttttcttctttttttcattcgactctttttccgtctcttttcttctttctttctcaactgccaaattgtctctccttttcatcttctacagaaaaaattctaccgtcagcgtgcccatgctaatccgttagcagaccatgcgttggaatagttagtcgcttttgtgttcttctcactcctccgaggcgaccaatgtctgactactcgcttttccctctctgcagcccctcgtgcccatcagcaatggactggtcaaaacactaccctgcgtatttccccatggcctctccttcggctgatgcctcctccggctctgttgtgacctcctcagacaagaaagtcgagtttgcagacatcggctgtgggttcggtggcctgttgatgtcgctctcaccaatctttcctgagaagctaatgctaggttcgagagttcctctagctttgttcattccaaaccgtttgggatcagtcatgttaacctctctttactacctctgactcttctcttcaggcatggagattcgagtccaagtcacaaactacgttcacgacaagatccaggctcagcgactgatccatcccggaaagtaccaaaacgtgtcggtcatccgaggaaatgccatgaagttctcgacaaactttttcgaaaaagctcagctctcaaaaatgtttttcctcttcccggatccgcatttcaagacaaggaagcacaagcagcgaatcatctcgactacccttctagcagagtacgcctacgtgcttcgtccaggcggactgatgtattgcgtgactgacgttcatggtgagtgctttccttccgagcgtttacgtgtacgcgagtaatcgagaatcccaagggacagccaatagagggacgacatacatgatgagatcatacaaaaatcgattagtctttaagacatattttccatggttacaactgcaccaattttatctctgaactcgatcttccctccattggctttccctttgcggtctcaactcgatctttctccgcccgttttgctcatcgttcttgaactgatgtctatctctctttggaacccgatcacccggtacagacctccatctttggatgacccaccacttggagcagctcccacagcttttcgctcgactggatccagagtcgaccgagttcaaggaagatccgtgcatcaagtgtgtgctccagagcacggaagaaggcaagaaggtcgagcgcaataagggcgacaagttcattaacgtttggagaaggctcgacgacccgcccagagactaatcagagactttcttaaccggctgttgtctataattgtgagtgaatattcagtcgagcaccttcactcgtcaacgagctatgcacgactagtgggacgaaaggaactcctcgaatgagaagagaacaaggaaaacatatgatgagatcttataaaaatcgattagtctttaagacatatttcccatggttacacacatcccattttacctctgatccaaaccgtctcgctattatcgttttgaaagaagatcctttccgttcccactggtctctcgttctcgctccttctttttcaacgagtcattgtctttgttttgttcgaagatcagcactgacgtatttggttattcaactatttgtctgcttatgtgatccgtcatagattacccgaagtgcatttctctagaagccgcgcctcaacactcggtctccttttcttttctttccttcccttctctccgttgtgtttgtacttttagtttcgggctttctgacaacgaaggaaacccccctctctgctggacgtcgctggccattgtagacagatgtatatgaatatgatcaagcagaaaatataacccagctctgcctgcggatgacgatcggctcttgtctggggtcttggtttcattgatgatagatggcttgttcacgatcttcgccggcttgttgactgaacattctaggccccagatgatcggcgcgctgagccctgggtcgtattcgacgcgcgcagtctaattcgagggtccacgtgagtggtcaagcagaggaaccaaatcgacctatataccatgttcttgttgcttcctcttcttaca

SEQ ID NO: 966 - DNA, 4131 bp, Xanthophyllomyces dendrorhous
cctctttcccacccttctctttcccatccttctctttcccatcctcgcccattccccaatcgtcaaatcctcctcgacaactttgtttgacacaaaggaaactgcgagatttgaatcctcaagagctggctctcttatctacgacttttatctccttcctccatccgatttaaacaacataggcgacgacctcctcgacgacgacgacgacgacgacaataacaaaaccagcaacaacagcagcaactatcgacagccgacatgttttccataagccccttctccacctatgttcagaataccagacggccttctaccgttcaagtagttccctcaagttcatttttccgaagtaaccgagcccggcaccgtgcgacgcgtctgtttttcgcccttggatctctcctcatggttatctggtggattttgaacccgataacgttgttgaccaacctgtcgtcggtaaattctcgaactggaactggttccaaacaaatgagactgaggggtgggctggaggattcgaattggatggaaaaataccgattaagagcagatactattcacggagattcgactgggtatcccgtgagcagggtggcggaaagacatcaggccatgacttccccgcttaaccatggtgcgtctttgagttgtccctttatacctttctacggattcatgttcaaacagctaacggacgatgttgtttatgaacgtgaaaatacattcctacagttcacacgtacgcagcccgactcacgtctgtcgcgacgaatgcgccggtcattccgttgacctccggacaagagcttgctggtctttttcatttcttggtttcgacttcctacggctctcttcctgcgttggctctttcttcaaagtacgttcccgcaactatgccgcttgctgccgaatggatcctcgatttcaaccctggacaacacgcaggaccagatagggatcaagctcttgctttgtttgagaaggaagtttgggagggagaagcaaagctagtcttacttggcagaagaaagttcggtggaccgtggttgaacgaggttgaaaagatcttgatagatgatctcaaagtcttgccaggagagatcctgacgatcgatctggacagtcgaggtttgtcttctctctgtgctctcgttgttgcgacaaaagaaattgacacccaattcgatatcgtctttcccaactaccagtcgatgccgaagtccttgaaccagttttcactcggctcatcggcgagatgagcttcccttcgatccttcttgggggcacgccaattggcgggttcgaagatgtcaagtcacttcatcgaaacggaaagctcaggcagatgcttgaccgagcgggtgtcagggtagagaaaccggcaaagattgtgggaagaataaatggaaaacggaggagataaggtagtacgatgaattcctctcgctttcaggatgatagaaccacttctcttatcctctatatttccctactatagagtttctgtcttcattctcttcttcttgtcttggcctccatctttatcttttgatctctttccaatctgttttatgcctttgcctatctttctcatccattggtggaattatgtcccgatgtctagtacacatcgtcgttgcaacccctcacaaagttctcgtcctcatctacattggatcttttttttttaccataatccagagagggaaatcccttattgcgctggcttgctcgatgacccctatctcttatatagtcataactttcctttttccatgcgttcttacgaaccgattagtcttcggttgagacaggggaagcataaaactcactcagagcacaggctatagtctagacgaggatgaatacagacagaagagcgaagaagtcttgttcttctaccgaatgcatgcgccaaacaaccttgctttgaccaccctgactgactcgatcccgaaacatttgtatcggcatctctgaataggcttggttttgtgcctatcatcgttgttcttccaacaagtatgttagcactattgtgaatactgctatcttcattctcaatgatatgattcaaataaagctacagccaacatatcacagacccgagtttgtccggcagaagagatatcggcatcaaccgggggcacgcacagctttctcacgtggatctcgtcgccgtccgaatttagtattctgctggccttggcacgcttggcaccgctcggccggtggacgaaggccgatattattgctgtttttgatctctcaacgagatttcgcttcttctaggattttatctagctctcttgccaatgtctcacctcgctcaccgtggccccacagaggaacgattcttggatcaagaaacaagacacttgcgcgaagttttgcggagagtcaaatgcagcattcgtcgagattatgtcgtgtctctatgttctcttcttcaatcttcatccgtcaattgaccatcccgacaaccgtcacctttcttcaatcttaatctcaaacccaacacccttcgggtcgatagcttcagaacaatccaatgtccggctctcaaaccggtatagtctcttcttcggacgaggcacctcctcaatacatcgaccgaccgttgcctgccggttggatatacaagtgcgacccaatgtacgttgcagacttactcttcacctatgaggggactgaacccactccatttgccagtcatctcacacccgtcctttgtgctcccctctagtcatggcactcgcttctatgccgacactacctcggtcccacaccggtcgacctatgttcatccgctcgatgatcctatatacatcgcgtccttgaccaacacaccgacgattccggatgtcaatgcagccggtagggctcgtagtcgacctagctcggatccggcagttccgagaaaagcagtcatcgctaaaaccagtgactctttatcgaggacaggaaaccagctttctcaaactagatttagacctgcttctaaaacaacgtctgaatttgtcaacgagaacaagccgaagaagggactcagcgagaaaataatggatggactaactggaatgagtagggagcagagaagacagcttgaaatgaagaaagaagaccttgaatttgtaaggatgacatcttctctcgagcaatagtcaaacatgtcaatgaaacctgacatttgcggttgttcttctccttctacagagaaagagagtagcacagcagcgccaagatgactttataaagcagaagaaagtcgagcgaaaagatcgagagagggctcaacgaatgatggataacctctattatcacagtaagctctccttcgagttttgtgccgcaccttttctttcctcccgccactgctgaaccaagcatctgattatcggattcgtttcataatctttgaaagacaatctctgtagacatccacactcaaagcaagctgctttcaatgctatgcaagccgcaaactttgctgctatggtgtcagctaacaacacgggatctgcaagttgtgcgttcgaacacctcattccctcgatttttcttctgatttggccaggtctaacatgtaatgttttttgtatggcgagttcgtaggtacctgtcctgctcatggtagagatagccattgatcgagtatgaagccgcacaagttctgtttctacattgtttttcttgctctaccttcctctgttctctgctcccaatccttagttatgtcaaatacacccactggtctcatacaacatataactgatctcaaactgcatacctaccagtccatcatcatgtatatgaattcaaacaaaatgtagaacggtgagacagatagaagtgttgaaaatgataagcgatgccgaggagttaagacgacaaagagacaagaccctcgattcggacaactcaagtctgtcttgcctctgctgacttcttgggttgagagacggaacgagccagcaccatatctgcaccagtggcaatgccgattgaaagtaaacactcaatgtcatagattagatgctggcaacaatcagatgtcagggatgtgacctgagtgttacacctcagtaaccttcttttggttctgttgtttctcctgcctcggta

SEQ ID NO: 967 - DNA, 1545 bp, Xanthophyllomyces dendrorhous
tctgaacccggaccctgacatcagaggcatagcctgctcacgtggataatttgtccttcattcggcctaagtctgtcctagcccggttcggcacggttcggcacggccctgcactgccaagaagataattgataccacgttttgctaaatgaccatattgagcattcaacatcttgaactatattccgagttcctttgccgacgttccgtcatacacacgatggccccacagagagataaagagagagagataaagagaaagcaacatcggctgaagggaacgagacagttgccgaacgaccatgaagaagtgtatataggaagcgccggaatcaggtcgtccatgttcacttctctctttctcatcccctctccatcactgttcgatttcaattcacttcctcaataacttccattcatccaatgtcccattcacaaggcgatatcgttgtctatccggatgaagcacctcctctctatgatgatcggccattgcctaccggttggatatacgagtatgatacaacgtatgttcaaagcgctctctcacctcctctcctctagtaccaacatctcttaacacatgtgtcgacaaaccgttctgttctgccggtcctagttacagagctcatttctacgtcgacattgtagccgaaccaccccggtcatcttgggttcatccgcttgacgatcctatatacatcgcatctatacccgacacatccccaagcttcaatatcgaatttcgagtacagtctaatccgtatactgtcggtccgagtcctgttagcccaagcagctctccgtcaaggacagataaccagcctcttgaatcaacgtccacatccacatccgcatccacgtccatgtctacgtccacatctggcaccaagactgagcgcaagaggggactcggcgagtggatcatggatgggctgactcaaacaagtagggaggagagaagagaacgagatagaaagttgaaagacgtcttaaacgtgagggtttaaatcgtctcatctcatctgtctttagacaagtattgcatcgaaatgtgaaatctgacgttggtatggaattctttctccctttaaccttttgtctttggcctacataggagacgaagagaaagcagcagcttcgtgatgaggccatgcatcagcgtctgatcaaagaaaaagaagagaaggaggttcggaagcgtgctaaacgcgcttaccatggtacgttctcttctggggtctactgtgtccctctttttcctctctttttcctacaacgctcatactgagtgactgatcgccgtatatgttgttatgacatcagaggctcaagtgcgtagaaaccaacaagggaacatatcagctcggaacaatagaaacttcaacgattcgactggtctaaacaatatgctgatgttcaatatgatggccgctgcgagctgttcgtccaattgaattcctcattccttctcaaacgtctcgttctttaggatccactttgtcctcgctcattcatctatgattgacttccgcgtaactagac

SEQ ID NO: 968 - DNA, 12455 bp, Xanthophyllomyces dendrorhous
gttgttaatccgagtaatttttacccattctgaacgagttcgctttgcatcgttttcatctgttcttccgttcctatccttttttgtgacttcgattttcgatcttcttagatttcctttcttttcaattagcttcaaatttgcctcacaagcatgtacctaatatcaacgactttcaaggaaagatagaatcaaacaacattccaacgaggaagcgaccccgagacgatatgaagaaaagagactagtaaccctctgtctgagactcgaaccattgccagagatctctgccgagtgtctcgtctgtcgcacagggcgaagcgtcgcctacctttgcccatggaataagatactatatcgccaagaacgaaacacaatagaaaaagatcagtgatcggacgagaggagagaagaggtagagagttgaggaaagaaaaaaactgagagatgagattggatcagacttagtaggactgtacctttcctcctagatctttgccttcgggggatgtccctccccagagttgagtgagcgctcccatagctgagggatacatcattgtccaactctacttgttgtaaacagatcaatcgatcaaaacgaagtgagacgagatgggacgaagtagaccgaaccagatcaacttgaaacagagagaaacggtaaaaagaattgacttgacataacaagacgtaccatcactttccatacgatcgagtatgtgttcctaccaaggtccgaattaacttttacatcagacggagtgatcccaaatgtgacgacagtgcacggaacaaagaggcgacacattaataattgaagtatgtctcaagaaagatgggttaggttgaaggagaactcacggcacccaggatggcaagccatagagatcaggccttggtcagaatacctgctgttgagttcattcgagaagatgacgttcccctatcgtcgagcatgcgcttcaagctcatcagattaactgtttatcatcggagagttgaggaagataagagagatagcaaggaaagatcgaaaaaacggaccagtttactctgtgcgtataaggttgccggaaagcgagggctcttgaaatttccggtctgttcatcaaccttgagcgaaccccaatcgatcccacctctatatccaaagagatgggcacatgacgatgtgttgacgaccctaggaaaaccttctttcttgttaggagacgagagaagagtaggaatcaagatggttgtgaggtggtagtgtccgagacagtttgtgccaaactggagatcgtggccgtgagttgttaccgagccggaaggaggcaacctgatgcgcgattgaaatgagagaacaaagagaaggaagatcaagatattggcgataccacgagacaaggcttgtttgtgcctacatgacgcctccattgttgaatagaatatcaagatgatcgattttgctaaaagaaaatactcgatagatttgaacttgatcaatctcaaacgatcgaaccgaacaagcatatattaatccgaactaccgacctcatgagctcctcagcgcctttcctgatactctttaggtccgccaggtcgaccaatacaaagtggatctgaccagtagaagatgggctaatctcactgttgagtctatcaatcgcatcacgtgcttttgattcagatcggccaaggatgtagacggtcgcgttcttgttcaagagtgctctggatgcaacggatcagatcgaacagcgatataatgctccggattgagctctagaacgatcgcttactttactgtctcatatccgataccagaataaccacctttgtgaacaagtttcggagaaagagattcagatcgagcgagattatgagcgatacgcttccaagtcagggatgagagggaccgttaaagacaaaccggtgaccgctgccagcttgcctgtgagatcggggatttcatcgaccgaccaagttggtgccgccggatagatttgctgcaaggcaaactttaggtagatcgacatttagagtgctgggctagagtgttgattgggatgaagtgaaggaatatgggttggatcctctggatgtgccagattaagagggatgtatttaattaatgatagacacgcagcatgttaaaaccggcacctcattccagaaattatagtcgtcgcacggctataatgattttgttttcttcgtttttcttttgtcattcaattctttagaagaacgattcatgctgcacacaggccaataatctatattcatgatttacgctcgtcaactcaatttctcgatggagtcggagagtgcacacctttgtgtccatctaagaggatagaaatctctatgtactgcgactcacatgatgttcggcatatctggacattcttatcaacgagttggttggcgaacggctatgcacagccgtaaatgcgactagaagtcttgcgcaacagatcaacacgacaaccgtaccctgactccagatgagcgagacatctcccaacccgtccgactgcccactgcccactgcccaccgcccaacccccgggtacatccactgtgtccgtcccaggtccctcgtgctatgaaaacccggacgttgaaggccgagctggctgcttacataagatgacgtaagctttgcacggacgcgtgcgcgtctcaaccgtcaacaagcgaaacaaatcagtcgcgacttttttccacgccgcctttctttcaaccgcgcagcaaaagaagagagagaaaaaagagcgtgtttgtcttgttcagtcccgtgggagtgtggagaacagagatagatacaacatcgaaggaagaaccagggagatcagtcatcgttgttcaagagagaccactgtaagtgtttgtgaaagtgagtgtgacattgtagatcggtggctggctggccgggtgtacgtgtttgtgtgggtgtgtatgctcactctcctcgactcttatcctccagcctcattgtgaaaagacccgcccgaggacgatcgtcttccgttctacatccaatccgttcttctttctcttccttgtctttctttcggtgtgcatcctatcccttctttcagacgcgtacacacacatacacactctccctctctctccctctctctcattccttatcatttctacaagtccaagcaaggaagaggaagaagaagagacaaatccaattcgtactttccgtcggaaacccctggatacagacatcacccgtttggtgtcttcactggtctctttgttcaatcgtccatccatcaagtttgattgtgtccattctctgacctcacttcattagttccttgccttccgctccgacgattccaaacaacgactacgatctaatctattcattctattccttcccttccgacgactccaaacaacaactacgctttgcgtctgcttcatctgcagtaattcttctctctagttcatctttataaacccaacaccctgcccacgacgtcccgtttcgttcgctctcctctccctttcccaaactcttccctctcgattccctcttgacccttcttttccttcctatcgagccatccttctgtcgccgtcgcacagaattcatcccgcacaactctgaacgatgtcgaaccggccatctatgtcgttccaaaacctatcccatctggaaaattatacagaaggagatctcattggacaaggcagcttcggtatcatccacaaggtcacccgaaagtccgacgatgcggtcagtttcatctctgctcatttcaatccttcggtctcttcttcaatccttttctttcccatgattttttccccctcctctgctctttccacaggaagatcatcttcgatggccttcccgtccaatcttttgcgatccatgacaaacacagataaacatggaatgaagctgactaacatttctgtctctgatgtctgcttctctgtacactcttaggtgtttgctcaaaagcagcttaacttttccaagatgaccacacgagacaaacagcaacttgtggccgaagtgtacgttcctactcgcaaaccgttcatgttttcttctctttcttttcatctgaacctccatcgtattcaccaaacatattcgatccgtccgctatgcttcctacagaaacatactcaacaagctacaacatcccaacatcgtcggttacgtagagagggtccgtcacatttgttttctcttcgattcttcgtctcaactgacgtttcctggtctgctcatcaccctactatcgctatcttgaataaacgctcttccatatccgacatcaattctaccttgtcatcccatcctggacgacaacttctgcctcacaccagatcctcgactctgagcggggcatcatctacctcatcatggagtactgcgggggcggagatctatcaaatctgatccgggaatgtgaacggtcaggccgtacgatcggcgaggaaactatctggaactacttctaccagatcgccctcgctctcaaacactgccactcccctggctcgtctgatcatgccgacaacgacggatccggcacgtcgggtccaaccggcggcagttcctcagctatgggaagacggacatcgagtaaagatcgggaacgagtgttacatcgggatctcaagcctgataatggtatgccttccagtctctttttacttttcctttcttacaagatcatgcctggagtcattcgactgacttctgagtgaattcctctttcacaagtcttcttggacgagggcagagaaaacgtcaagttgggtgattttggattgtccaagtcgatgggcgcggccgcattcgcaaacacctacgttggaacaccttactacatgagccccgagttattcagcgagtcaagttatgacgcaaagagtgatatctgggctctaggctgtgtgatctacgagatggtcgctcttcagtaagcccttgcagtcttctgtttctcttaatgttccttcctcttctccgtcactggtctccatcaagccaacatctttggttgacatcacgtcctcgttgttccttctcaccttttgcccttttcccataagcccccctttccaccaagcaaagactcataatgacctggccaatcaacttcggtcccaacgaattcctcctctaccccggaaagtatcgccaagcctgcgagatttgatcatgcagatgctatctttcgatcctaagcttcgaccgagcgcggccgatctgttagccaccccaatgatggacatccagcgtagaattcgagagatgaacaaaacgtcagtttgtttcctctcccagttcccttcaattcgatatgatcttttgtttccgttgtagatggctaaacactcatgcgtcgtttgattgatattctccagtcaaaagatcctagccagcaaggtctcccaactcgacgaacgagaggtttctctggccaccagagagcgagccgttcttgaacgtgaacgtcggtgttcatctcaagaacgaagaatacaatccctccgtcgaggactcgaggccgaccgagaattgataaaagcagaacgcgcaaagtgggacgaagatcgtcggcctggcttgctcagtgaggccagcagtccgggagagatggatggtgtggtcgaaatcccgggcagcgcgggaccaaaaagcatggtcggaagtagagttcctaggaggtcatttgtatctagacctctagaggagaagccgtcagtcgatccttgtttgtcgtctcgaatgtttctgaagctcaccaccgatttctttcttccttcgaccgctgtttgtttcaaacaccacagagttcccaaccagttagtatctggcctgcctcgctctcgagacagttgcgtgtttgacctggccacaccgaccaaatccgcctacccaccgtctacccatctcgttccgtcgtcaatccgtcggacgggcacaccatccagattggcttccaaatcaatgggcaaccttgccgctgccgctcgggcggacagacagcgagaggaggagggcgggaccttagaagctgtcaagagagatctcaccagatcgatcataggtagtccaaaagactataggcataccggtcttggtctcggtcggatgacagctatcaatgccaatgtcaccaatggtggaaacaacaccaatggtggcatgcctagaaggctgtccccaacgaacccattcggcgctgaatccagatacgatagaccaccttcccgaccaccattgccttcgtctgtatactctatgcctgccactaccaccgtcaacactctatcctctattccctcttcgtcttcatcgtcatcatcaacctcagtagcaacggcagcaaccgcgacgtcatcgtcatcatccgcaacttccttgatgccaaatacgccggctaaatatgacccacacgatctcgagaatcttccttcaccgtttcttcgccgaccaacggacgtcctttccaataatcactccactctatcatccttaccgtcaccttcctctgggagcagaccgtcgataccgaggtcgaggagtacgatcgtccagggaacggtcggttcaaacgcgggcggcagtttagctaggatggcattaggcaacgcggcggccgctgcttccaacccttcttccgtcaccacaggctcacaccggaccgagtcgggagtaggaaggccaccgacgttgcagagggtatcccgactgtcggctgtgtcttcctcggtttctgcttcgtcgaaccttagggatagagagaacaatacgagggagagcgtggccagggcagagcttgctgtaggtgatgctcaaagagcgatgatgatgggtcactgaccggcgtcagcggtatacagtctttccttatgaagacttactttgccatcatcccttccctccccccttgtctcttcatcggatttcccatgtataatgagggaggaaatacaggttgatctgtctatgatttattcattcgcttgctcttccgtcaatccattcatcccgttccaatataacccttgtttttctgtctttttcctttcctttcatttctctctctttctttgataaccatcccgctctccgtctctgtttttattgcataatgctctttcattcgggtgccgtccagaccaagatcctgttcacagtcttcccttgttccatatagcatctttacgatcttactttatttccctctttccttttccgttaaatatccttccctccttaaccctttgatttaatcaagctgactttcactcgctacccacttctttctttttttgttatactcgtgtcgttctatcgttattacctccttcggttctagctttgtcggcttgctcatttgtccttacctgaacagatataacctttttctcgatcgatatagacgtacgctccctcttactatattctttccctttcccatacctttttcatttctttcacttcctcttccctgtttttcatcatccggatgctcctgatattccatgctttcagtctcatcaatctcgttgtcggacggagattctagaatacggggttgataagataagaaggtgactcacgtggaacgtaattttgccttctataaggtcacgtgcatgtctttcatttcttgacgatccatctcttgcctctcgctagtcgagtctggagcatctggtcatacttagagtctttgtcgttggataggataatcatccagcatacacacacacacagatttgcggactgaattatacgtatacgcgtgtgtagtctaggaaagagagtctcgatgccgtttacacaaccagaagatttcgagtcattcttgttggcttgtcaaggttagttgcattcagccctttgagtttcaatcgattctcgatgtgcttgatatcttaaccgttcacgtcatttgcttcgttttgggcttgagaaactcttagataaaccagagctatcatctgttgccttggaattggaagctcttagatctatctatggagaagacacgctgagacttcatcgacctccagattcggacgatcgggatggaccgatcgtgaatgattctgagggatggagagttcgatatgaagtcgaagttccgtaagtcacttctttttcctttccgttcatttctcaaagttggcagatcgagcttgatatgaaccaagttgaaacgataatcgttggcttactttcatgtgttccttacttcggaggggatcatcgaatgtagattgacagaagatccagaagtgacgattgtcgtcctcgtcacactacctccgaactatccagagtcatcgaaatcacctcagcttcaactcttaaatcgatatgttggtgattttggcgtagatagtgatctttgtatgttcgccttctttcgtatctctttcttcaactttcacgaaacatcagtttgggtgcgccttgagacgcaggagtcgatgattgaggtattgatctttccaaccatatcttgggtgacacaagttggaagggtgttgcgaacgttcttttctataccacctcccgatggagatggtgtaccatttgtctctggggatgtggccgtatgggaaggattagagcatgtccggggaatctgtcaggtttgtcaagttatcttttgttcgggggtcttgatccttgattcagcgcatacgtgattgacaatctacgagtcttttacatcaggaatggtacacaaacaatacaatcactatatcagaattatcagctactcgagacgccgcacacccccaaaagtcaacaccctcctcgtcgagaccttcgtcccctccacaacaacctgcctctagattgccgactcagctaccggaaggaatagtgatttatacttcggaacctattgttgatcggaagagtgtgtttatcggacgagcagttcagatcaccgatcctgctcatgtaaataatattctttttctcttctaccgtccctcaatgattacaaacgcctcgaactttatactgactttaaacttgctttgggcttgctatgaatcagatcccgatcattctcaactacttgttggaagataaaaaaatatcaaaagcagcacatcccatcatccatgcatataggcttcatgggcccggtggaagtataattcaaggtttgtcgagatgatttcctacaagacttgctcgagcaataagtcgatgttgatggctctttctttcgcttcttatttttggggttttcaaacacgtgtccgttaactgaacatccggcccggtcagataatgatgatgatggagaaacagcagctggtggtcgtatagctcacttgttacagatcctcgacgtcatgggtaagtttgatccgaaacagtgagctgtgatgttttcaacagcgtaaactgatccagaacgcggtcgattggacggatcatagatgtgctcgtggtggtgtctcgatggttcgggggaactcatctgggcgcggatagattcaaacatatcggccaggtccgttttctacgaagtttttccacttcaatgtccttaaactgatcgtttcctgtcttctatcgtaataggctgcgagagattgtctggaagttggaggttttttggaagagaagaatttgaaggcaagttcggggaagaaaaaatgaaataataatgaattcttactttcttcagaaatatttactgcttgacatcaccacataacgttgagcagctgcaaatgtcgttgatttgacagtgaatcacggtcgattgagatttcgtagccaaaccatcacttgatccgagcgccattgatggactgtgcatgtagtggttggaaaagtcttgtaccctaagatgatcacctgcctgacattgattccttcagcgtgcaaatctgggacagaatagtttgactttgacaaatttgatggtaacgctcactgagtttgagaatctgtctaactcatgtaatgatttcaagctaaactgatcgttgcataaagcctttcgagtgggcctataaaataaatctggtagccctgatacattccgtttcgagatgagaagattacatggatggttgcttctgtgtatcgcgactaaccattcatgttgctttattcttgccttccttcctattagtcaagtgagtggcttgtcacacttcaacgactcattgtggattgatatagtcatgtatatgatacaagcaattcaggttgtttgaccgatgatatttgatctatgtctctatagagtaatcgttcgcccttccatctaaaacaaaacgacacagcagaaaccgatctcttctgtttataagtatgtctcctttgaaaacaccaaagataatctgggaacacgaaggatatgcagcatgtaagagacagagaacccattagaaggatgtgcctgctagtccgtgctccttcagagcccagttgaccgcatcttccacatttcgctcgagccggaatggagcatacttcggtggcccgttttcggtttggtaaacaccggtttggactaacatcgatcgccagttgtagtcgttcgcgcctcgaatgtctgaattaatgaaggatgaaaaatatgagtatgtgcttgcttgggagagtttcgagtacaatgtgaacatgtgagacccacctgattcagggttatctgaagatagcgaacaacaacaaaaaggcagacgaggattgatgtacaccaacagacgtcaacaaatttctctttgtcgtttccaggtgaaacttgcggctggcagtttgaatgaaaagataaattagaagacagagcacaacgaacctccgaccatgtaaaccgtacccaatccacccttcctcgtgtgaccaggatacaattcttctacccttctctccaacatctgctttgcgaaatcataagtcggtcggtgaggtttaccgtactgaacggattggatttgatgttccgggaatgtctcttgatgaatctcgacaaaggcggtcttgaaagctaatgtcaagaaaagacacaaaatcagagatgttgttatgattgaagtgtacggtgacgtaaaaaggaagcacaaagaatgatcggttggttcttacctcctgctccatatcgaggaagtatgtagtcactatcatgaatcaacagataaggggccgtcagcctacctcttgattttgccattcttttgcgcatccttccaaccaaaagaaaacttgttcaagacttacttcttccatagcagatccgggttgcaatagatgacctcgactgtctggttagcggttgtgaccttttccttgatcgttcccagcacaccatctcgggcggcgagaatttcagacatgacagatatatcaagtccccagtcgcgtgagtcattgatgacgatgatggctctgtttgattgtgtcgactcattagagatggaatcgagagatgcatgtttcaagagaattgatagagatggaacagaatacgaacttgaaggatgtttgcgaaaagtcatgttccactgtgtatttcaggtcctcctgtgagagctctctcatcggccacacactgctctgccaacgcttgacatcgatggagaggaatgccttgttgagaccatagctgtttgcgacgtatcgacccaggtcattcttaccaccgacaatcagcacagcctcatccgcgtaccgcttagcgagagtctctcggagaggcgtatgggattgaatgagctgggtgggagatatctgcagtgatcgtgaacaatacgaccaggaaagtcagcgttgggtgatcatcagatctctgtgagacgttgaaggaggcaaacatacggtgacacctaggtctttcgacagaagagaacatcttttggcatcggtaactccgcctccattggtaagtagtacgtatggaaccttcctgtagtgatcagaatggccattcaacccaagcaggacgaccagaaggtagagaaatcttctgaagtattcagacggatgtgaagcttactcggcctccaattgtttcaaagccctttttgctcctgggaagacttcctctccatatttgaggacaccatcgatgtcgaacgcaaacgagaccgcgcctttttcgagggctggatggaagatgttggtcgaaggaaaagaattaatgccagtatgacgtatcatccaagaaactccgaagatcacacaaagtgaatgtatacatgaggaggagacttgctactaaggaatctcctgtacatcgcaggtcttggagctagtttcaatgctttggaggtcagaaagagagacatgtttgctcggatgaggatgatagaagattgatggtgagatgaaggaaggaaaggactgacgtatggaaatcgccagtcacaagggaacaccacaaattccagtcatcacccatccacccatccacccatccacccat

SEQ ID NO: 969 - DNA, 17642 bp, Xanthophyllomyces dendrorhous
catccacccatccacccatccacccatccatcgacctggcctcccatcgacctcttcaccttgtctcgcttgtttcctcattcatagtttcccatcgaggacttatctttttgaccgatgtccgagttctggccgttggtcattaacaacgggagtaaggatccggctcctgggagtaagttcaagtggactatgtacaccaatccctaggagttgtgcaagaactcactctgtatctcgttgaaaccgttgaaaccttcctacacatagttccatcggatggtaaacctgattctctccgttcagatcgtgccatccatactgtaaactcacgttctgcgtgtgttgctgttcttgaatacagatagatttgaaggaccctggttccaaacccagttaaccctttcgactggtctcggtgtattctccttcctgctcttttgttttctgagaacacgatatccaattctttttgctcctagaacaaagctcaaaggtcagtcttgagatgtatcattcgtgatcgtcaagacatcgtgttctaagacctgatgtaactgttcaacagacttcttcccgtcggaagctcatttacatgatccccgtgggttcttctcgtggatccttcccaccttgcgcacaagcgaatttactgtccttcagtgtgtcggtctggatgcttgtgtagttagtcatctcttgatctggccttcatttcgagctttgactcgactgaaatgatcttgattgactcaaaatgtctccctcccactttcacagctcctcagcttcttcaaaatgtcgttcttcttctttctaacgtgtgcactggcagcagccggagtactcatgccgtttaatctcaaagtacacggctcagttgattctgaaccggacgacgatacggatgatccaacgaagaacatgaccctctctgctctgtctatgctcgcctctatgagaaagaagccatcccagcctaaggaacctagtttcctagatatccttacggatccaacaacatcactctctctacatcttctattcacctacctgtttacggtttccgccctctttttcgcgtacaggaactttaacaaattcattcagaaccgtcaactctctgcgcttgagctcgttcacagcatatcggctcgtaccgtactcatccagaacatccctgcttggctgcgtggagagcgagctctgtcagagtatttcgaaaacatgggttggggagttgaaagcgtgagcgtttgcagaggaatatctcctctcgaagatgttttggagactcgaaccaagatgcttatgagcttggaggaggcttgggtggattttgtaggaaacccaagtgttgtgcctcgtagtcaatatgcgtcaagggcaccgtctcctctcccttcaggaagcagggctgagaatatggacggctcttccgccactgccgctgattcggtccctccttcaactcatcagcatagtgacgacatggaaagccgctcgggattatcggctaagggaaagcgtttggagattcctggaaggaaaagaccgaccgttcggaaggggggtaataactgggcgttctggagggagaaggttgatgcaattgagtactgggaggaagaattcgtcaaggctgacgaagcggtccgcaaaaagagacgatcaggaaagttcaaagcagatggcgcggcattcgtcacgtttgaggttagtttcaactcatggttttgggaattcatccaatttagaaaaattattgagtttctctggctccgctccgtatagagcatggccgatgctcagattgcagctcaggttgttcgtgagtatgacctcgtctagatcttcttgtaaatccaatattggtgctaattcttcttatgtctgttgcagatgcttctcgacctgatcaattgctcacatgtcaagctcccgaacctcgagacggtaggtgcttcattgtaatcattctgtagaaccgtgtggaccgattttgagatgaatatccatatatatctccacggtaaattagttgtttggcccaacgtaggaaagtccgaaaacaaccgatggattagggatgtcttgatcatgaccttcatggctgcgttgctaatcttctggcagggtacgtcaggtttttcaatctcgatcgatagaatatttatagcagtctagctcacgatttctgatttactcctcatcttgtcctatcaaatctctgctttacagttcccgtatcgcttttgacttctctactgcactacgaggagatccagaagtggctcccctggttagccaagttgattgataaatccgagcacttgagagcactagttcagaataccctaccatcgatggctttgattggattcaatgctgtattgcccttcttattagagggtgagtttaccttcctatgttttgaaacccatcaatgagcgctgtctgacttttcgctctctcctcgatcgcaactttaccgcgcatagccttgtgttactctcaaggaattcaagccagaagttggattgagtattcgttgctcaagaagtgagttctctatcaagttggcagaagttcatcgatcgatcgtgatactgatcctctttaattcgatcattgcataacagatactacctgtttctactgatctccgtcatcttcgtttggaacattaccaacacctattgggctttggttttagattgggctggaacgcccaccaaaattccgtatgtccctatttatgcactcaatttgactaccgtctagcttctcaagatgatttcttcattcagtgagcgtttggcaaagtccctaggtgctggtcttgcacgaaacttcttcatgtcttatgtcatgttgcaaggcctgggtatcatgccattccagctactcaatataggcacagtcctttcactggggttctatagagcgttttacaccaagacacctcgaggtgcgtctatattgaacatcataagctagcgctgatatgttgtgtctgtttttactcaacctgatttactcttctcgatgtgtaatctacactgatagatttcgccgagctcaacgcaccccctatgttgaattatggaacaggtatgcttcgtaaaattcgtgttactaacgtccatacacgcttgtcacttatctcttcgttcatttccgtttgaatacagtgtatccacaggcaatcttggtcttcacggtgacattgatgtactctgtgatctcgcctcttgtcctagtttttggagcaatctacttcggaatgggttatcttgtttacaagtacaaacttctttttggtgagtcagctgtcattactttcagttagtaagtttactccgatggagttcaaagttaaaaggtcatttttaatcaactttgtcagtcttttacaagccttacgaaagctctgggcaggtatgcatgtcttcaactgcgtgatcaacttatgtcagatatcgacctaaatttaaattatcttctatataggcctggcctatcacattctctagacttcttcttggagtgatgctcttccaaatcttcatggccggactcttcctccttcagagagcatacatcatctcgggactcatgatcccacttctctctctcaccttggtctggtccttccagatatataagctctaccaacctctatgtcaaagcgtcagcttgagcttgatcgccgatgtccagaagggcgagagtgcagagaatgtgctgaaagtaaggagtgaaaggagtcggatggagcaagctgagatcactagatcacaatggtgaggctgcctcgttattcctttcctttatgaatcgcgcaagttccaaaccactctgaaatctgcaacatcaatctaacccgttgttcaatccaaccggtctgtttgcgtccttgccgttgcaaatagtaatttgaatcgtcgaagatatgcggtcaatcaagaggacctctatcttgcaccagctgatgatcgaacggattatgtgagtttcctagcattcgaacccttgttctatctcggtccgcttacgcttgattcttttatggggtggtggtgtaaaagtctcaacctccgatgagcagttatttccctggtgtcctcaataccggtcgaaaacgttacgctcaccctgctctagccggagttcttccatttccctggctcccactaaagcctggagagtccacgatgtctcaaacggaagtcgaacagaacccgtccaacaacgactcgaaacaaaaggggtcagtcgttctctcattcgggaggaaagtccagaaactaggaaagaaagcagcaggaaacaagagaaagagtttcaccgatggaccacatgaagactctggcgcgcagttgaaagatcgaaatgaaagcctggatgtgaacgggaagagatcgaacacgagaaagtcttctggaacggcaaatgctcaggatccatcttcctctgctgccggtaatactggcaagaccgcggatcgagtcggcctgccgctcgacgatgacgaacgaaacccgtggttggacaatcctcgacaagatttcctgagaagaaactccttaggtgtcccagggatgcattatgacgaagacgactcggacgacggaagtgaagaaccagatgatgagacttctacgctggcagcagatgagaactcaccacttgtaggcgatcaaggacgatacagggtatgtttctcctcttcttccttcattgtcaatttgaggacttcacgatctgatgcttgatttggcaccacgaaacagccatatttccctcatccggaaaggagacgagcgttctcaacatcttcagctcacccatctcgatcaacttcagaccctgtcggaccaccatccggtgtttgaactgtgcatatatgttgcttactctctatacgttctctctttcttgattgattctcttaattcagctcgatttttgattttgtgccgtactctgtacctttatgcaaactcgttttcccttgtccagattcgtgcttgtttcttccactcaactgatgattcctcttatgtgtcccgtgcgacaaaatatcttcttcaagtcatcattgtaggagggtttgattgctgttttctcttttatagttcgttttgcgaacactctagtttcaaagcttcacggcagtgtgaatggaagcaatccctccggtgagatccctccatgcgccaccttcaccctctctcatctcacccgtctggaagcctgcttctcgaatcctattcggtttgaagattaaacaaatgagaaaaaaagttgaaagttgagcaatcaaattctgttctagatcggtcggtcaaccacaaaaagtgtgggagaggaacgtacatctgagcgaaatctggctgcgaagggaatcgctcgatagactcaatcaaatattggtaagaatccctatcgctggcaaggatttgacctaaaagaggaatcatcgagaacgagtattgtcggtagattctgtcgtttcgttgtgcgttcgggagagccaaagagaacatatacatgagcacagagatgaggcagaatgaaagagacaaagacaaaaagacccacccggcgaacaaggggttggtgacctttccaaactccatacagcagaagattcctccgggcttgagaactctgtaagcttcctcgagaacggcagggatgtcggtacagtttcggataccgaaggagatcgtgtagagatcttttgaagcggaaggaatgtcgagcgcctgggcgtttccgtgagtgaacgagatttgcgggcctagaataggaagcaaaagtttagttgactcttgtttgcaatgacaaaacacaaaggtctatgagagaccaaagagagagaaagacgaacctccgtggtacatggtcttcctgaacctcttctcaccctcggccagcatctctttgttgatatcgagaatctcgaccttgacatccctatccgcgtgcttcaacctagcgtgatccaatattcgctctgcgatatcacccgttccacccgcgacatcaagacagctccatccctggcgacctctgcctccaggattaagtgtgctcacgaaatcatctttccatagccgatgaataccgagtgacattgcatcgttcatgacatcgtacgaggacgcaacggaagagaaaacccctcggactgttattgcgtatgaggaatatcacataagaaagagaggaaagcacatagaagggttagaatgattgagttctcctatcgggttgacccattggacattttttaaactagtgaaagagagagagagaggaaacagctgaagaatagctctgcaagatctatgtcccctgacactctaacgagcttcggattcttcgagacaaggaaggagaacgaagaaaaaaaacttacccattccctccttttcggcctcagggacggtcttgaacccaaaatgggtagtctttgacgactcgggcttatttgaagcggaggtctgggtctctgcctctgaagccaaaggagaagaagtagaagtggggacagggttcgagggaagcggctgggactgaactatcgaggatgtgcggatcgatcgagcaagttgcgaggtaatagttgtcgatcgaagggactgtctgataggagcaaacatagtgaaatcaaaagcggggttctttcttccttttaagtgtatctgcaggtcaaaagaaagcgtcgagtgagataggagattccaaatgtagacgtagtagttggtggtgatgatcagcgatctaacgagaaacctgaggaaggcgacgcggattattgtgggtgacaaaattctggacttcagatgatcaccaaataacgacacgctatcatgagccagactgccttcgtcgtttttgacttaacttgctatcagcgatcgtcttgctcgtgtagaatatggccaaatcatccggattccatacatgaacgaacgaacgagtgaacagatttaaacacgcaaaacgtttcctcgtccatgatacatttaatctttatttttggtttacatcacgaatcaatatctagcaaccttgcccgaatcccatggccggtcatacaacggcgcgtcttcctcgtctgccgggggtccggtatgagaaggtgggaccgagctcctagccggactcctactcctgtctctatcgtctctggcgtctttgtgggcggtggctcgcttgccaggcacccaaccggcgttttcgtcgatcaaagaatcttttgggttgatctctcgttcgagacgctgaccagctcgaagctcagaagctagccgaggggacggtaaacggacgtgaaggaagttgcaaactgaacagaatagaatagaggacggtcagccactcgattaaagtggtaaaagaggacaagcgacctaaaacgcaaatgcaaagccactcacgaccacctctgttgcagtctccagtctcgttctgtctgcagcatgcctccctaaaatctgtcaccgggctgagttcagcccaaagtggtcgggcctggtaccatctgtcattcatgttggcaaccgcggcaccagcctcaacctcccattcgtaccgagcataaacgtttccaaccaaatggtctcctacgttgtcacaaatatgaatctcgagcaagtttccgaactgagcgagttccctgttcatcaagcgtcatagacattttatttgtgttgttagctatgtgttcttgtcaagtgaatccagtatagaagaggaaataagacgagaaggacacacataaacatgtcttcgtaaaaggcatcgaaatcatcctgaagctcctcgtccgtcaaggtgcattgtgggtcgagccctgggttttgatacacgtttgaaagaagaatggtttgagagtgtacaggcttctgatgtcgtcttgagcagcggtcaccgtgtcgacaggctccaatctaagttttgagagagaagaagggaatcatgattgagacgcgtaagtgacgatggtaaatgaggataataagcagaacaaagctggattgcttactttataatagaaagaacagttgactctgcaggttgttcccagatcaccgattatgagatcaaatatcagtatatcggaagaaagaacgacatagaaggtaatatcaagttgaaaatgcgttgggatgagctacatctggatctgatacctccgagtgctcgggaaagaacagaccaagagaagaagaaaaagaaggaaaagactagacaaacctgtcttgttctgttccaaagatactggcgagatgagaggccatattgttgtgaatgcgaggctttaggtatctgtatgtagtccgaagtgagggtgagaaagaaggtaggaggggtaacaagatggaaagcgtgtctgcccatacgtctcgaccttaggtgaatgctgagtaagggtgagtatttgaatcaagcttacatgctcatataagactcacgtgtgacgcaccgctttgaaaatggctagtctgtcttcactgtaaacaccagatagcttgtttggcgaaaagcctaatgaaagtttgtattgttcagtatcatttcctaatgaagcgtcgtaatacttttccaataggagatcgatttgaccttcctagtgatctcaagtagacaccgttacgttctccacatacttgcgcatacgttcatcttggacgaggaatagagaaggatctgtagaaacatacgatcactgcatagacttctgtttctaaacgcttctgagcgtgccgggcagtcattggacgggtgtgttgtttgttgttcaagtacccggtgtatcgactctatagaaaaatccatatatgccatcagaacacttgactacagatggcctaataacttttttttaacgagaaactacaaagccccctaatgaaatgctacaatttatcctaattagtgttcacactgttttgtgtttcaactcccaaacaaccacacaacatatataccccacaccactcgttcgctcttcttcaagcctttccgatcagccaaccatcaggtctgtcccaacattcatcccgtgtagaacaggtcaagccaacagccaacgatggcgcatccatctggtccatcggtcggacagacattggatggtgatcttcaacagctccaacaatccaccagaacaccttactcttcaacaagggccaccttgctccaacctttattgctctccactctggccctctcgttattcaccccgacaaatgcttcctcgtcgtctcatcatccaataagctcatcccttcactctattcgttctatccttgattcgttcaacctgctcggttcaccattgtatgctccttcgttcgcggcgacatcctcgaatgtaacctactcctcttcggtctctactctactcaacggccggcttgactccactgctgtacctctaccaattgctcaaacctctgacggtggcatcatctatgatatgtgtcttcttggagcttcagccacatccaatggtactctcatcgtcggaggtgatttttctcaatttggaggtgtccaactcgacaacgtcgccagaatcaacctagattcagacactgtctctgtcctgcctcttgaaaatggtggtcttgacggtgtcgttcggacattgttctgtgacactattgaaaacatcgtctggattggaggttctttcaatggtccatctaccagttcgctcggttcctcgactgcaaactatggaggcagagtcgttacctacgatcctaccgcgaactcgttcgctccaccaccctttgttgggttcaacaccggctctgttctctcgatcaccaacacatccacatcgtctgttctcttcaccggctcattccaagtggcctattctacgctcaatcctactaccaacacgtcaggtcagaccgggttctcttctaccggtcttcccttgtctaacatcactctctactcacctggatcgactccattctcggcctcactcacccccattcccatactcggctcaactaccgatatcaccgcatcgccgaccaccaccctcactggctatatagatcctgatgtcatgttctgccccacagatcaggatggacagggccaaagctggttcggcggagacagccagatttctgtcgtcaatgtcgccctgggttccaaccgagtcgttgccgcttccgggcttaggattggaaacactttccaggacggaagaggaacaagcgcattcaggtatgtgtttcttggaaataaatctttttcaatcgaatatcgtgttgatcactttgtttcaacatcagaatcgtcaccctccccgacaacgcagttcaaacggtgacctaccttgatctggagaccgacacgatgttaaattgcactacaacttgtcctctctctacgaacagttcaattcccttccaagacttcatattcaccgcaggtcaggtcgagatcaccggtttccagttggtcttgcttgagtggacggggtctggaccgggattgcatctcattgaattactctcctcaggtacgtctcggctgtctttctcatttcacagagtggcacgcttggactcaactaaaacgcgttctcttctttacatcaacaaggctcttatgcgactactctcccgaccaacaccacctcctgcgcgtcgataccttcgacagcaaattctgagatcgtgggcaactggacctcaattcaggtcgccaatactgctctgggagggaccacatcagaagcaatttctgcatctgttttgccgactactctgtcctacctgacagaatttccatcaataacatattacccatacgtaaccagcactggtaattatactattagtctcgtcgtccctggatgtagggttgttggcgactgctcgacccgaaccagtctcgacgttctcttcacgccctacagtggtgcgggctcttatcttcaaacagttcctcctagttcgaacgaccaagcatatccaatctacacaggctcagtccaagcatcatcagattcgttcaaccctgcgattaagatttcgttgagctcaatcccgagtggggtcaacggggatcgatatactatagtagctagtcagctgatattcgagctgttgacagttgatactgtcggcgatggatcaggttcggttcatcatgtaaatgggtcgggtctggttgggccgacgaacgtaacatcttcaaacacgggcttgggtcaaaatcctagctcccggtcggttggatttggagtattcgaatggaccaaagcacaagcggatgcggcaaacgtttcgatcgacgcgacgggcacgatttacaatagttccgagactccatttgatcagctttccgtcagtatttcgaatactctcggcttcatcgactcgactaccacaattaccacggccacactggtggactcggtctactatgtaggcggaacgttctcgacctccgactattccaacatcatcgcctttcctatcaccaatggtacatcttccgcggcgactgactcgagcgtgatccaagctcttgcggaagaaggacttaatggcccagtgtacgccttagtatcatctggaacaaatctttttgtgggtggctcgttcaccgccacaaagtctggtgagacttctctatcaaacctggctctttacgatacgagcaccagaaaatggagttctatcagatccggactggacggaccggtgaccaagctatcgttcgggcaggacggccaaaagcttctcatcggtgggacgttctcgaatatattagcttcgccttctggatccttgaggaagaaacgagcggcaaatgccccggtaggcggatttagtctttgggacttcgatacaaacaactgggcagccgatcagcccggtgtctctggaaacgtcaactccttcagcacagtcgctgggtcctctgaaatgtacttcggaggcggtatcacaggcgtggccagtagtacgccaatcgtcgtctctaaatctaggcgtgagatctctcttcttgtgttgacccatattttcaagacactaaaatactgatattgccggtctgaacccgtgttctttctagatcatctcgcccgaggtgtggtcgtagttatctgcatggcgatcgccttaggagtcgtcttcctcggcgtccttcttggagttgtcattcgtctatggagacggcaccatgaggacgagtcgttttaccctgtcggaccaactacaatttcctcagaaaaagagaaaatgccgttcgaaggatcgcctgcaatgacaaacactcaaggaaactcggctctgttgtcacacatcaatgcggccacagagggcatgattcttgcttcccggagtaaaaatgttggtgttgatagcggaagatcagctggaacgggtcctgttccgggcgcaggtgccgttgccgctggagtaggcgcggctggattgactgtagcggctagtcgacgaggaggagagtcttcagagtcagctgaagtttcgcctggtcagacgtcagacagtggggtggatgaattcgatcgggggccgtcttcaatcaggctgggagccccaatcagaactgaacctgaatttgagtctggcgaaggaaccggagaggactgggaggagggagaaggagagatggtcgaagctagggtggcccatgcgaggtggagcttaatcccagatacagatgcagatagggaacttcggctgagtgccggtaaagtacgtctcgtttatcttttcttcattccaatctccttctttcttgttaattcatctgattgataatcatactaacgtgtctttttcttatatcacgtcctatcagccatatctcattttgaacgactcagatccagaatggtggcttgcgctcgatccgacaacaggcgaacagggcgctgtccctgcaagctggatgttgtaaaacgacgagcgtctctcgaatatattcctactttgctttgctttgctttccagtgttttactttcggtactatgcagccgttattcaattgtcctcgtctgccgtccgacttaacaaacctttgttattttctttcgtatccgctcatatacgtgccgccttgcttttgtttccttttatacagtacaaaaataatttgactcgttctttacgtgttcattaatccctgttcgtttgcttgccttctctctctctgctgttactatttcgtgggcttcaagctgtagtttttcttcagtaaattggaaagccaattattccccttcttctcagcccaatcttatactttcatcttgattatcgcttctcttccttgcttccttttagcttcagaaggaggagggcggtgtctcggccgtactactacatgtcttcttcgcttccagcctcttcgtcgttcttcattaattagattttgagggagatctccttctggacacctctttctatcttgacccatcaatagtactttcaatatgctattcaattctatagtacctttatactctaaagattaattcgatgttctgttgtagaacacaagatgtttgatgataggagtattgaacccaattcgctcaagctttgaaagagggcggggtctccacattttcttgctttttggtgtttacttgttcttgtctcggatgagacttcgctccaatcggtatccgatgtcaaggtcatacctcgttcttttcttcattaccaccgttgtcatcaccgtcaagcgggtccattgccttcacatttgctagatcagacccacagtcagaacatcacacaaatatagaccgaagagaacgacaacggattatacatatacaaacttagaggtcatagcggatgttacctacattcaattcgccgtcgagtttaccaagactttcgataaataaagatcatagtcctcgtcgatgttcgtgtcctttccttcctcttcttcattcctttgttccagtttgtgtctagacgtatactgatgtgtgtgattgatataaaattggtctcgctgggttggacgctctgacaatcgagtagctttagccaaaccatggttgacagcctctcctacgacatactctggcataccttcgacctaccctcgcagcggatcttctgggaccgacaccagacttagcaacatcctccgttctcgaacacgggtgacaaacttggctatggtcatccttctttccgtgcttggattaagtctctttggaaatatgaggacttgggctgggaaggttgagggcgatggggtcgtctgggagaaggactcggatggaaccatcggaaggagcactggagggaaaggaaaaggactccggatcggatcagtgaagtcgatagaagacacgatgagcaaaagtgatggctttggaggattggatcatctaatcgtggttgctggtcatgctatcgttggtttcctcctctctcacatctctcatcccttccttctctcgttcttgcttctcgacgatctaagcagggaacgcgcactaagtctttgtattctgagaataacagtggacgggtagtgatccggaattgagagatcaagatgatcagtggctgcttgatcctattcaacggggtggcaggactgtccgagctatcttagaacatatcaaagccgcgttcgtcccacatatctcttttacttctaacgccatctgactcattgtcatcgactcttgttacggaaggtcttatcaagattaacgtttgttgattggttttgtaattgagacggatagatctgatctggcagtcacggacgcaaagtcattactcgtctttagcggcggtcaaaccagaagatcgggtcagaaagtttcattgaccttgttgatcctatgctgttgtctcatgtcttgactttgatcttttttcccttcttttatagcaacacacacggaaggtcaatcatatctgactttggcgcttgcatcatccatgttacctcacacgacagcccctgctggacaggaagctgataaaggggagtctgatgttccttcagtctcaccgttcccgagagctacaagcgaggattttgcacttgattcttatgagaacttgttgttttctattgcgaggtttaaggaggttagttaagattttcactcatttaaaacatatctcggcggtgctgagtgaaagaatagctcatcattgttcttccggtcgtcctagtacacatccaattacccgaaaaagatcactgtcgtaggatttactcttaaggaaccgcgatttgaaacacttcatcgcaaagcaatccgattcccatcgaatgctttcgagtacgtaggaattgatctcgaaggtgatctcacagagttcagagagggtgagaagaagtttgggtttgatcagttcaagagagatctatatggatgccacgagttcctgaccgagaagagaagaggaagaaacgttttccgaaggtggcacccatacgtaagtgaattcctctgtgttggcacttcttttgccatgtgctagttcgtcgatgaacgaagtaaacagaaagaaacattgaccgggtggattgcgttatcttcgattacatcctagcattcgagtgcaccacaattacgtgcgctcatggagaattgcccctctttgaacgaagatgatcatcctgtagaacaagaccttttcaaaggtcctcttccttgggatccgtaaaggtaaaggaaggagaaaagaagtggaacagagggagaccagagggatttaatggtgttcatcaaattcatattgccttcttctcgctgctttgtttcttttgtaaaggtggtcaacttgaaagtctagtcttgttttgaattcacataaactcggaactggtggcgatgatatcatcgtcacgcacagcttacatcaggagtaacttgcatgcgagcgtgcacacacgatctctggattccttggacagctctaatgtgtatcatgctagatggatctcttagctggttgtgtaggtgatcaaaagagatcattcggcagaatatttgatatagaatgaaacaaaggatggctctttgagttctgccgaacagcatggaattacgtatgaacgcgcagtaaaaaaaaaggatgcagcgtccagccgtccaagatccctaggatgtttctcgtaagcatttctctcatccctcgagccctcacccaacacttattttcactcgcttcgaaatcgtcttgctttcgaaattcagagaaaatccagttctatctgctcctcaagatatgtcgacgttcgatccctcgagttctcgctcacctatcgatgggaactataacggtatagcccgaggtcaacccccaatgccagagagatccgttcgaaggcaaagctcggcagggagtatcatttacggtgctgcccctccgttgctagaccaatcgtcagtctgcctgtctctcccgtggtccctttagttttctatttctctctgctgggctttcatagcatcttttcgtcttctcgatgttccggatgtctgcaaaggaaagagaaaaaaagaaaaggaggatatcatttggcgacctatcaagtttccccgtttcttcttgcttgcgggtcttattttgattcctcatgcgaacttttggacttgtatgctgtatcgtactctgcttccaccaaagctcatcacggtctttttgttggtcaatgtttatacgattcaaacagccaccttcgaccgggcacccaagccgctcttctgtcacatacgaaaacactcgagctctaccgagctaacgctaagaagacaaacgactcggaaatcatctttgagtttgctgtctttatgatcgatgcttccaagaacctcgctcttggtgactataccggtggagaacaggtcgctattgaggatcaacgagatgacctcattaaggaagctactggtctactcaaacggttggccgacagaggtcatcctgacgctcagtactttttggcagattgctacgccaacgggatcggtaccgttagaggaaaacaggattttgacagagccttcccaatgtttgtcctagctgccaaacacggtcatcccgatgccgcctaccggtccggaacgtgctgtgagaacggttggggttgtagaagagaaagcgcaaaggcggtaatgttctataagtcagtgtctcgcatctcatacctttcgttcgttatttgctcggtgttcttgcccattactaatgcctctgtcactcacatcaattatagaaaagcggctgctgctcttcatcctggagccatgtaccgtttgggaacggccgagttgaatggccagcttggactgcctaaacgacccaaggaaggtgtcaagtggcttaaacgatcggctgaacacgccaacgaagaatttccacatgctcttcacgagctcgcgatcttgcatgaacgagggattgataatgttctgtttgtggatctggagtattcggcagaactcttggctcaggccagtgagttggggtatgcgcccagcgcatacaagttgggagagtgttatgaatacggaaagatgggctgcccacaggatgccgcactctctatacattac

SEQ ID NO: 970 - DNA, 89939 bp, Xanthophyllomyces dendrorhous
tctctatacattactatgtgagttcatcagtctatggtttctaattgtcttcacgggttgaagattgaccgctgacatcatgcaaatgtctggacggttttttctatagaacattgctgcacaacaagatcatcgagaagcttgttttgcgttgacggcatggtatttggttgggtctcctggtgtcttgcctcagtcagataccgaggcttacctatgggcgaagaaagctgccgaacagggtctggctaaggctcaatatgctgttggatacttctctgaggtaagcatgttttcaactagatacagtgtcctggactgatctaacttggaacttctctattcatcttacactctgcaaggttggaattggaatcaatccgtctccgcaggacgctctgagctggtacaagcttgctgcagacgcaggcgacaagcgtgcgacgcaacggctcacgtcgaatgggatgaccttgccaaacggccgagaccgaaacgctgaactgttgatgaaagatcaacgaaatactgaggggggcgggccggataataaagaaagttgtgtggtgatgtgagcgacgaggaagtcaccgatccaggcagtttctctttctccccatgttctcttctaccctttctttcttctaatcaagtctctcgtctctccaacatgatgccttactgtttgttttaatctcttttttctagtcttccttagctgaaggttgacactcctctctgtatgcgacgttcttcatctctcaacacccttgcctgttttctcttttctttttcctaatctgttcatatagcggcatcaacctcattctcatggttcccccggcacgtctctttttcatctcgacgactacatgtttagttatatattcattcttcactatctgcctcttctatacaccctcatgtttttgcatacttgatgatcatctggcattttttgtttcccaacttggcatctcttcggcatcagcatcttgtagagtggttgtgttcaccctttatgttgatcgtttctttctttttctatcagtgtctttgatcctctgatcgcggaggttctgttcctttgtcctgtccggttggtgcctgcatttagccctgttcctagtggagtatataagagtgaacaaccctgtcagttcttcttcttctctcgttcctttcttgctcttgttgctctcgaccatctgttgttcttcatttccagctcacggtactatcatctttgcactcactttgttctcaatttctcgtccttgtctggttatcatcgctgccacacgtttctgaccatacagcgtatatccctcttctctcgttcgctctcgcccaatttacagaactcgtgttcctctctctgtgtttttcctctgttccagcttttgtcgcacctttgagaacatgtcaacaagtcttgatccagcaatcaaactacagtctcccaacaaacattactctcccctcaaacttgccattgtgaaaccatttgtctctcgcaaagtcatctctcctatcaaccttgctcgacatcatcgtcgtcgccgtcgtcgtcgccactcgggccgttcctctgttcgaccggtctctcatcaatcgcctcttggtacgaccgaggcactcttccggcaccttcggaaagagaagctaatcatatcaaacagcgaggatgagtgggacatggaagagggctcctgtcttccgtcaacaaacgcgcagagcgatccggctaccatcgaaggaccgtatagccgtggaagagctgtacctcgtcaggtccgacctagaacgttttccaggaaggcaagaaaggtacaactttctaaacaacgatctcgtccaaggatgaatttgagatcagtttccgtccctgcgatctcgccaaattcttcagatgttgaccttgtattaacactgagctgtcagtctacacccatccggaatcatagttctgcctccactttgatctctcatctagatcacagaggctttcttgtgcactctacccctaataattcgtcaatcgcttcaacttgttctccgtccacaccttggagtaagagaagcgcgcaggaattcagcatggactccatatccttcgtttatgacccgccgatgatttcggatgagttccttaaaggacccgctgttgcgctctcacccgaggccgaggcgttcgttttgtcttctccgttcaacccaatgggtctcaaggtcaagccgaccattggagaagagactcaacctaaaaggctacagttcacagagaaaaaagcgccgttaaacattcatcagggatcgcctatcaacccagatttgctgaagtccatcgcgccttacatccctacttctcttcggacaggaactgagaagaaatttgtggcgccggtcgctccaaaggtgaagaagacagtaccgatacatcaagagggattcaagtctattccagtgatggtcgggccagagtcacttccttatgccaggaatccttcgtacgttagtacatctgctactagagacgcattgtatgcttatcaaatttgtgtccgaattcttaaatagtggtgtcgatggatcagtcttggattctgatggacggttgaacgtctggcggccatcagtggatgaccccgaaccagaggtatgttcaatttttctcgaaagctgattcttcttatatcaaggctgatatgcatcgtcatttttgctaccgatagcatctcgaccatctacacttccagcgacgacctggggcgcccaatcctcctcacagagctgtcagccaagaagaagacaacagctctgcttatgctcatccttcaatgttccgagtgtacaccatgcgagataaggcggcaatgatgaacaaatctcaacagccgttttctacaaataaggtctcagcctcgtatataccgagtagttttcctgttcgctcgccttccatgtcgacaaaccccagccatgtctcttcacttcctattccatcctcacggtctccacttccgtctgggaatcgactcgaccatgcccagcactctttacattcgaaccaatcagcccatcgagaacacgacttttctcatcttcatccgtcttacccggttagttcctctgatccaagacggttcaatgagcttccaactggtcaacaatatccctcccaagggccagatggcttcctccaggcgcagatgggccttgtccacgatccaatgtttctcggacaagatatcctacacctcacagctagtcttctcaaccttggtctcgaccctgctgtcgtgcttcttcatacagccagacatatggctttgatgaactctggactaccctccgagcttattccttatgcttccagagcaaatgcatctatgcaccttgggtttgatagatcgccttctcctggtggacctcaaatcttctctcctcaacatgtggagaacagtacagaatgggcaacaccagcgtcaaattcatctgttcactatcatgcacctctacatgttgctcctcgaatttctccatctctttctcctacccttgtcgatgtgcatcaagacgtgcttccccatctgattgacttagcagctttggactcagaccctgtccttccaaaaattcaggttgaatcgatcgcgcactaccgtgatgatcaagttcgaattccttctccttaccctatcggcgactttattgtaccatcccttgagcatgaaaaacagttgctcaaagaactcaagcctgcagcgaatttgtttgcacctccaatggacgctctacctatggcgttcgagtccgtctctaagcctagggaagagtcgtttttgagcacggttcattcagtcgaacttcctatcgtgaaaacacggtctcttactgaaagcgctctcaaacctagctgggaagaacccatttttctgcctgccggatcaggtgcaggctttgctaatggcgggcttcgactttgtgggcctcgtgcaaaggttcccaggcgatcgattgaggagatggcgttggaagctatcgaggtagcttgtacgtgggaggagccagccgagtcatctgctttgaagagagagagaatttccctaacggaggcgattgaggctacgaaggaagctgcccgacaagaggcgattagaaaaacacgggaagagaacgaaatgaagatgagagtgctggcggagatcgaggtcgctaacagtaggatgaagaatcaacagttgaaggaggaaaaggggggtggaaagaaaattgtcgaagttaaagctggactgcctggacgagtcgtctcaggagcggcgggggatccatcaaagtctaaaaaagaaagctatctaactctgggaggtttgaacaagatgttttctgaggtaagtatattcttcgttgtagcactcagttttgccaagccgatcttgatctgtttgatggttcggttttatgatatagcctcccttgggggtcaatgtttcggatagcccccttcatcagaccagaagggtaatctctgaggtatgtcattcactttgatcaattctctttgggcagctttttcgaccgtgctgaagattctcaaatgggtgtctctcgttcgttttcgacagcctgtctacaaacagaacttccgatcttcttctactgcccttatgtctggactgccgcagaaacccgctgtcaagtcttcggtaggttctacctgtctcaatttttgaccagtttcgctgatgagaagtatactgacataactatattcgttcgtgacacaggcgacgactccatccaaatctaaacttcctgtgagggctaaagctttacctgtatcaaagaccagtgattctgacacggctgggtcggtcgagcacacggctcgtgtatctaggaagagcaagaattcacggccatccaatagagctcaagtctcaaaacctttttcctctgtactcaaataaatactgggcactaaaactcttggtatattcagcttcttagcattccttctgtttctgtgtatatctcactctatctctaccaggtgtattcatgtatccagatgtttcctcgccggaacttcagtctcatgctgtttctgctctgctttatagtctcctccttttgccgtgtatgttgtgcgctctgtgtattcatctctcttgggtctcttttcatctttatatagcatggttaccttctacctcattcttttctatgtgaacatgttgaatctctttctctgtggagtatcaatgaaagttagccacctacgtatcagtatacgatgtctcgcgtagatgaacggacataaccagacaagccgttgattgctggatacacagtcaaaacacgaccagttcatttttatacatatgtctttttgatagaatgcatgattaccacgtttgtagactctccttgaccaacccaccctctgttcccagaggccgttaccaggaactgagatgttggatcgataactgttgccaggcgaaacccccctcgaaacaaccgcgaggagacgcgtggtcagagccagacaacatgaaaggatacaaaacatttgttctgcaaagtcacaataagaggaacgaaggagaaagactcgtacccattgaggagatgattccaccatgatgaccgggcacgattttgaatggaacgcccgaagatcgatggctcggttgattcccgaataagtttgacgtcggccatagtctgatgttatcactcgaggcactatcggaagatgaagcatattagaaaggggaattttgaattagtgttacttctctcatcaaacacagagagaagagagagaagggggggactgaaaagagcatgaaagaaaaagtgaagaagacgaaggacaaagacagcaaggtagaatgagaagcaagcagagcagaaccactaaccaagcaatatgaccgccatcaggaaaagcaacgacgcaactgacagcgcctgaatcacttggatttctcaaagtcttcatgacatgagaggctgagagagacgcagaggtggtattggaagccgttcgtctgacgtcccagacctcgaccgtcccgttacgtctacctgcatacacttgagaacctgtagctgagaaacaagcctgaagattgaaaagaagaagaagagtgtgcggtaggccgatttcggtgagaaaataattataaggcgcggcaaaagggagagaaagagacgagagactgacagacatacaccactttggtgttttctctcctccctccagtctacccactcctttcgcacccatttctcgtcctgggactcgtcgatcccaaagtgtgacgttcccatctatactacttgtcatcatcacatctgatgaataggctgaaaaagttgctggagatagagaaggaatgaatcttgatgttggtggtggggcggtgacagtagtagaagccataaatgtcggtacgttcagggacgagaacaaggagcttggagaatctggtgctgtatctgtagatttcggaacggatgaagaaccattggtcaaatcgttgttggtggtggcagtggtggggccagcagcagtgctgctacctggtagtgatagagtgactgccggtttgttttcgggcctcgcctttacagaggcagatggatttgatgacgaagaaggtactgcagtagaaggtttgtcggggttagatgttttggaagtttgagactgaggaatgagttcatccatgaattcatctccgaataaatcgtcttcgatctccccttgagcatcttcgtcttccccctcggcgtcaagatcggatatgtttttgggtggatctctttcttctttggaatttgagtcattattggttccattcgtatttatcaccaaggctagtggtttatctaacccgttcgttctatttaaacctctgttgccctcggccgattctttctgggtatgagcgtttgatctattggtatccgattcatctagttgtagagcgaacgctctataggaaatgttgtttttacgatgatgagcatcatttggaccactagggagaggctgtagagagagagaagagagttggacgccctgagtggggaacgatcggattttgcgacctgaaaataaaaggggaataagccttcaaaaagtgtgttggaaagcacctgaggaagcttgagcatcgtagaaatatttacctgtattgagatcccattccttgatggatcatcgcatatgaatacaaataactgtatcagcatcacgggatatagacgtctgctgatcttggcatacttggagactcactgcaacagagccatcccagcttgcagaatacaaaatatcatccgtatcgttgagcgttaatgcagagaccgcatctttatgaccgttctgaaggacatgttggatctgtcccattgcatgtcggatagtgaacaggttgatattgccgttctgtgtatgatggatgaatagaaggagcagaggtttagggaagaggataaggtgctatagacaaacaaataagcagttcgatatgagagtgagagaatatactgacagctgttcccgaaagaccccataaggcatctttctggcaagccaagctgtagactggctccctcttctttccctcaaccaccttggacccaaaatttgaaccgtttgctgctgtttgttctttaaagctagaatctagccccccttgtctaatctttcctccatcgtttgcccaccatcctctggcaacgccgcctttagtgacgctctctcctaatccaccaacagctctctgttgagccgtcatgatgcttcctccatttgcactcgcccagggatcccagtttcggacgaagccatcctctgagcctgtcaacaagtgagagaagcataaggatgaggacaatgagtgaacgggtgaatgtatcgggatagtggctatcgggtcgatgtggagagatttaggagtggtgagcgttagagaagggtaaaatagccgttgtcttttgagagacggaggaggtgaaggtgagcgacgtggtgctgtgaacgaacaaagaagaggaatttaacaagagcatgatggattcagaggaagaaaaaagaaagaacttcagttgctggaataaactattggactcaaggaaagggagtacctggtgaagtaaccggcgctgaagcatcgcgccttggctcagatttcggtctggacaagatggaggtcgagccaggtgagagcggaagtggtgatagcctggtgccatcgaccttcgtttcttctaatatccttctggttttttcaggagatagaggtttgtcgatgtccattgactcgtcttcttcatcctcatccgcgtcgtcctaagaaccaaagagtatgagaagtaagatgttactggtcagactgatacaaacgtgaagaggttggctagaggattatgtagtatttataagacagctgtgaaacggatatcttcaaactaacatctgatgagttggccccgtcgtcttgatcactgtgggggttgtatgaaagaaaagtgaatagtaagttgatggttctttgatccaaagtcggatgacttgcataggaagactcacttatcatcgctcccatcatcacttccgccatctccatcattgtcaccgtcaccgtcaccgtctccgtctccatcgccgtcttcatctccttcaagatcctcgtctccttcattatctctttccaagtctccgtcaccttcaacctctccgtcaccatcctcgtcgtcatcttcatcgtcttcgataccctctccatcatcaccgtcgccatcattgtctccatccccatccccatcgtcatcatcattgtcgttgtcgtcgtcgttgtcttgacctccatccgaatcgtctcccatcaggtcttgatcgccgtcgccgtcaatatcctcaccggcctcatcttcaaagagaaactcctcctctttgcctggcgaaatattttctagataagcctcatgaaggtcttcttcaaagtccatcttcggtgagcgaagtcggctctgtatctaatcggtgaggcccagctgatctgtatagagacaaggtcgtcaggttgagttgagactgtgtttcacaggcatagggtatgagtgagtgggtctaccctccaacaaccacccccgatatgcccaagttgggaatatcagtcacgtgcaatttaaagataagataaaacggtaatgttacctaagcttcagccgataacggcacggatctccttcggctatctacgggaaactggaacgacggccgagattgtccggaaattcccgaaagtggccggggcaggatgtccgagcgaagactccatcggtcggtcgactctcaacattaaaagaatgaacggacgaaagtttggagggaagcccatggggaaggatggagagctcgtgtggacagatcgatggtcatttagttctcagctacttgttttatcttttaaaaagtacgaccacgaaaagaagagcatctcttgaggtttaggtgcatgtgttttaaagactcctgcttaatcccttatacatcatcatcatcatcatcatcatcatcgtctatctattcttacctccaaattgcctgggtttacatccctttctcttcttctatagaccaacgcccacagagaacaattttgcaagagggtattcctctcatcaacccaaaatctatccgtcggccatgccttcgctcgctcatgtccttaacgccttcacgtcagtagccgatcagttttcttactcactccaccagagaagacagaggccagaatttttactcgtgaccaccaagatcacgagtctcattatgaagccgattgaacgagtttagtgatattctatcatagctaacgacgtctcgaagttttcgatgcatcattacaccagatcccaaccgtcctcatctgcgaaaaagcgcgagtaagtccgaatatgtctgcccgatcctcaaactgtttcatgttctgatcatcgatatgtcctcgatccttactctgtgtagatacaagtttttcgatgtccctcctctgggcacgggaggctttgctgttgtcaagctagcccactggaagaagcatggattggaagtcgctgtcaaggtggtcgataaacgagtggtcgaggataaggaaaagtatctccggatcttgatagtgtaagtcctcagtattcctttcgtggtttgatggcttgtgcctgaacagatcggacaactcggctgatcactctttctttcgaataatagaggatggggacaagccttggaccaacggcatgaacatatctgccccttattagagtcagcctcacctctttcgacttctcagtgtctttcctttacctttcgtcaagagttggactagcaacatataacgaccgaacttatatatatttctccagttggttcgagacatcacatcattattacctgacattccccgcactggagggcggcgagctcctcgacaagatccttgacaaacgtcggttcaacgaagaagaaagtcgacgggcgatgttggtcatcctagtcagttcataccatttccttttcttcgatctttcttctcttggtgatttctaacatgtgttctgttcgccctctctggtctctatcaactcaatgattacaggatacgttgagctatatccatcgccaggttcgccaatcttgcaaacatggcgcgcatcatacaatttataaggggcgcgtgaacccagcgcgtggcgcgtctttctcttttgcgagtatctgattggtcaactttttttccgttttcatcttgtctcagggtgtcatccaccgggatatcaaagcagaaaatttcttgtacaagtcaagagatagccagatcgatgactttcaattgatcgattttggaatctccaaggtgagtttgctccgttcctgatgggctatagagatcagaaatgactgcaaataaagcaagcgcgggacgaaaaggagatgaaattgtgatagtatctgaataactatctggtgtatttcttgtccgggccttccattttcttctagatcttagacgacaagacgaataacgatccgaagatccaaacagaagtctctggcacgcctggtaaagctctttcatatccgtgtccataccgcctgaatgcgtgctgaacggatgagttgtctctcttgcctcttttttaatcaggttacgctggtgagatctatttggttcaaagaaagagaatgtttcgtatgtagtgctactgttgagacgatcctttatcatttttccgctctagccccagaggtttttttgagatcaggtaagcatcttaaccgtttgattgatttcaaatgaactctagagccgaagctgaagtcttgcattttggccctgtaggatatgggaagaatgccgacgtgttttcggcaggagttgtcttgtatgccatgtaagtttcaactctttctggaatctttttcggacatcttctaatttgtgatagtccaacctttcaagtaattctgcgctgatgcctaaaggcgaatactcttctttcctccaccatcatcatcatcatcatcgatgtcgtcgtcggtatgatcatctttcttgaacgaaccgaaaactctcaaacaggctaagtggatcaacaccatgggattcaaaagacccatgggacttgttgaaagagacaacgcaaatgaagcatgttagttttcaaaacaggcgctttgacggtgtttcccaggctggtgagtttgtattttctttctttcttgcttgttttctctttatttctggttttggttcaacaggctgatgtgtacgaatgatggtcaaccttggtggggacaattcgggattttagcgaaagacttcgttacgttgtgcatggaaccaaaccctcataagcgaccttctgcagcagaagctctcaaacatcatgtccgtgatcatttttattatttatatctgacccgctcttaaaactagctttctaaatcattgatgtttctctctgtttcttcctatcatgcggaatgttttatctttccttgaccatacacatacagtggattcaaacgcccgtcctaccatcctctactcctccgtctagaccaccctcgcctggaccgaacccaggtccatatgcccatcctccggaccctgaccatccgatccaaatcctgaagagacaggagacattaaaaattttacctaatggcgctcagtcggagttgagtagacgattgaccagagaacctgtaaactaatcttctcgtctttctgtttgcgcgcatctttttctttactcgccgatttcctctatttcgtccatagctgtcataaataaaaatgtattctcaccttactcttatttcttatcgtttctcatccttggttcacctctttttcgtcaacgagaaatccagctttttcttctatctgtttatgctcctctcctttatgtgcgcgtattgagtttaatttcctcttgatcaagtcttatacgtcctcatctatcacacaatagagagagaagggcaggcaaagctgatctgctgggaattcaagacttaagagggggctcagccaaacatgaatcgaacggtcccttcattcctacccaacatcatccctgtttcctcttcattccgccttctctcctcctcaactcctattggctggtttccgtcggatgagtctgtcggatttatttttggatgggtcgatcgcatcgataaccttgttatagaacccccctcactcctactctcgcctgcatgttgggagtctctctctgaagcgcgtaacctgagggaaactttaacggagataaatgtattggaagaagtcacttccggatcgatgttgagtaatgtaggcgggtaaaaagttgaggacggcgagatggccgttgtcgtcgtcgatgttgttgtatttgtcgatgatggggaaggtgaatgtgaggaaagtgtcaagctcggacgaggtggaacatcggataatgtttcgataaacagatcgagcaggatgtgcacgatctcctccaagtctccaattcgacagaggaacctatcctcccacgttccccttgatcctagcatttctactaaagctgtacaactcgctcgttcgcgttcgaactcaaatccgtcttcgactgttggtttatcagctggatcggtaggtcgagtagctagcaagcaggctagataaatcgatgcaagcgctatctgatgtggtgggtacatcaatggaagtagtgttcgatggctatgaccattgggtcggcagaaggcatggttcatttgagaagaccaggagtgtcagccaggcggatggaaaacttgaagcttgattggaggtcaagaaacgaacctatcaacagctatacgccaagctgcttggattaatagtttgctcgctacgaaacaggttgggaaactccagatgtcagccagatttgctgcatttcgcattttcatgaaagagtggcagattgctatcgttcctctgttcaaccaatagaaactatacggacctcccaagactttgccaaactttatcacgaaggtaaaaggggtctgaaccctgaaattgaaacagaccgtctccagaacaagtcgttcgatagacagtaattttgtgcgatccgcttctagcatctgtagagcccaacgcgtgcgtgaatcagttggttcgaggttaattcgaggaacaagtcaaaaggatgggaggaaagaagaggggcacagacaccgacaagggataagatgatagaattgaaaacggaaggagaggactcactgtcgggtcgatatcgctctcgctcaccatacccatcccagctcctcccttttttccttttcctttgcttataagtagctctggatatcgaactgcataagatgctaggatgatatctcgaggtttcttcagtgtgtcatgaagcttgcaagatacatagagtaccgacacgatcacatcctaaaccatatgatgagtgttcaagcccaaggtcagcggtgagcaggtcagacagagagcaaaaggagagaacacatagcaacggggagtatatagagggacacacattgaagttgaagtctttaaaggggaaaaataggtgaaatcgatggtataaactctgggcagtagagattgttcttcggggactgcaggcgatagacaaacataaaagacaagacggtggttggtcaaaactcgggccagacctgcttgagtacaaggatactatcgtccccatcccaagctcttccagttcaaacttcgggatagagaaagcaagacgtacaagccaaggtttgcccctacgctttctgcatatgcgcaagccaacgctcgctgtctgctctcctgcttcaagctatacggacccctctgtttagcccggagtgtctcgacttcttccggatcaaagtaatggcggtgtcgcttgacaacagcctgactcggattgcctgtcgatgcagaggatatagatgacctaggaggaaacatcggaagctctgctgagtctgtataatggatatgctgatccttgacgagttctctcaaagatcttgggcggccgtttggattggtggttagggttacgcatggctaaacacgctacgtatgatactaaccgtgctccactcttcactccacttcctcctccactctgagacactgccgtcataaatttccattcattagtgacttgcggggatcatataagatggatagtctaacccatgattagcttcctatctttcctgctgccttattaatcatccgtaaataccgcccggaaactctaacctaacatgccttccttgcccaagacttatcgagccgtagttcagaggaagaaggatgaaccatactcaatcgaggatgttgagttgaagctgccagaggaagggcagattcttgttaaggtccttgccaggtcggtgaaactttcttctttattctctcgtgttcagtatattgtatatcattctcataactcgttttgcttctgaagtggtgtgtgccactcggactctatcgtcaagcacgagatcatgccagtgcttcctcgagttcccggacatgagatctgtggtgacgtcgtggccgttccagacggagagaaggactttaaagtaggagatcgtgtaggaggcggctggcatggaggtaaacgtttttttgacatctatccgtccaggattttccagctgacgtcatgttgtccggtgcgtaatctcaggacactgcttcatgtgctcctcctgccgatcgggagactttgtcacttgccagaaccaggccatcaatggaactactatggatggcgggcgtgagtgctaggtactacatgccttttttgtaatatcatcatatctctgattctttttctgtctctttcttttattgaaaccgatgatctagatgccgaatatgtcctcttgagacgagaggccatcgtcaatattccaacagacatcgaccctgcagaggctgctccgttgctctgtgcaggagtaactgtcttcaactctatgagaaaccagaacgctggccccggcgatctggttgccatccaagggatcggaggtgagcccttcatgcttttccgatgtctcgacctatgaacatggtcgtgattaacacccgatcaacatcaatttaaaggactcggacatttggccattcagtttgcatcaaagctgggcttccgagtcgccgcactttcttcatctgacaagaagaaagatttggctcacaagctaggggcgcaggaatacgttgacggaagcaagggcccccaggacaaggctctgtgtatgttgaatcttggactgcgtcttggtttcattctacgcgttaaaactcgtgagctcatgttgaatgtttcggattcgaaacagcggatctcggaggagccaagatgatcgtctgtacggcgcctagcccagatgtcgtcaaagaactcgtcaacggtctcgccgtggacggaacgttattggtgctggctcgttagtgtctcttttcctcgaatgtcaaaccttgcgcttgttcttactcagacaacactcatcgacgctgctcatatctatgccatctctttcgcgacatcagcggtgaatgagctttcgattccgatgatgcctgtcattcaaaagaggttacgagtccaaggctggccttccggtaccgcgaagcactccgaggagtgtatcttgttctctcaacatcaggggattaagaccatgatcgagaagtttcctcttgaacgggccgacgaggcttatgagaacatgacgagtggcaagactcgattcagagcggtgctcattcccgggttgaaaaatgcctgagcctgccggatgagagtttacggtgtatgaagattctactttctcccttccttatcttctgatctttgtctatgcctgtgtctgtattctatgtctgttttgtttttttttgttttttttttgtgaaactggcaaaatcaagtcaaactatgtttgctatctgccactttagtgcgttgtccctgtgactcaagatcggcaaacatgtagaaagcgagtttgattgtcaagatacaaaagaagaggagtgagatgtgggagtgggtgatggtagaggagaggataggagtgtaaagagaaccagaagaaggattcagagacaccaattggcccaaatcgactgatcatttcacctctcctccacttttttttttttgaaagaaaataaaaatccgtttcggttcgttcaggccttttctcacggctttttatccgttggaggaggtgttgttgatgaagtaccgtctgctgcagaccaagacgtagtcgacgccgaagcatcaccatccaccggggcttctgaagacgaaggtgtctcaccatccgccaactgagcccacaacgcgtgttctgattctattctctccaacgctctgaacactttcgactggaggtagtgggaatgaagggtctgaatgttcttggcggctgcacgctttgctttggccgtcgccggagtagataccggcggaggtgcgtccggatcgggtttgggaggtgagttggcggcaaagaggtgttcgtagttctaggatgcagacggattcaagaggaatacacatgcagaagaaagagaggagtcagacctgaagatgaacgacctggagagaaaggaagcaaggagataggtaaaggccggaagatcagccgaaaactcacggctttgattttatccagactgtcctcatctttgacgttcaagatcaattgagcttccgacaaggtcatctttaatgaacgcgtcagaccagcggtcgtcgtagagttagtgtttccgtccttgtcgaccgcactcgctccttcttctccggtcgcggcctcggcaggcttgtactgggtatctgaacgaaagagcaaagaaaatttaagaggcaatcgagagagagagagcaccaaaatacagaatggaacgttgagccgggttaaaacgaagcagaacccaagacgatatgggcaggaagagaaagaagcatacgaggagaaggacgaactcttgtaggcttgtcgaccggcttcgtagaaagctcggccaagaactttggtacccgaaaggaccacctgagtgacgatcttgggaaggttggactggagagggaagagccgaatagaagtgcaaagcgtttaggaccatccagagaatgcggagtaaaaagaaaagaagaaaaaaggaagcaaacgaaaggagagcggtgcgaggacgaaagaaaagagggtgtgtgtgtgtgtgctcggaacggttatctcattgactgaccatgatatgttggagttcaactgtggggtcgatagactcagaaagatgttggctgccagctaagaactagtgatctcgaggaaagacttgtgtggttgtgtatggtgtcgtgtgtatgagtggactgttgagggcgagtggtgagtggattgtggaaaaggggatgctgggatgaacagactagggaaagcgactggagaggtgtagccgagaggcctggaagaaagactggaagaaaggaatagggaaaaggaaagagactatagagagtgattaggaagagtagataggaagagtagctagggagagtagataggaaaagagactaggaaaagagactaggaaaagagactagaagaaaaactagaaaaaaaaacaaaaaaaacaatatcaagttgcaatttggaatacaaaaagaaaagactagaaaaatttgatgtacaatcgtaatggagggactgttgaaaaacgccggacgagactacaaacacagacactacaaaaagatactagaaactcctgtattcaatagatcgacgtggaaccgaaagaaacatcacacagtcctcgatccaccttcttttactcgttcttcttcttttccgtgttgctccttcttttcttgcttctccttctcctttttcttcctctttctgttctctctcccatctctctatcgtcacacgcacacttcaatcctcgagcccttcttttccttcgtccttgtcggaaaagaatcatcagggataccaacatcatcctgaccgaaacaccatatacgataataatcaaacccactcttttttcaccacagccctactgtctcgactttatcgatccctccatctctgagaggagacaatgaagatcagaagaggtccgaagaaggtggtgcctcctgtaagtcccaacggattcgtcgtttctttcttgctttccaatcagacgttcatcccaatcggacacttggcctttgcgtttgtctcgttgctgatgcttcgcgttcctcttgtaccatggccacaaacgccgacaccatactcggacttgcatctcttttcttcatttgttcctgtcgttcgacatctttccccttgttccaaattcatctctctccagcatcctgagatcgccaccctcatcaacaccatccttgctacagcagacaaagaccttccctcccttctttcctctgtggtcgagtggcaatggccccggggcgacctccatacgtggatcaaggttctcaacaagtttgatggcattctcgaaagcgttattgacgaatatgcgctcaagaccattcaaaccgtcgagttcagtcctcagaccaaggagctcgtcatgtctattctcagattccagaagatgctgctcgagaggtgtaccaatcggaagatgtatgcttcgtatgaggtaagtgttcgactgatgacggacagagcttttcaccttcctccccctttcggtttcttcaacacaaagaaaccaccaagtgactctgctcacctcgtttgtatctctctttcgtctttcttgtgcctttcgcgtcttgatagcgtctcggagatctcttgttctgccaagatctggacgttgttactcagacgctccgcctagttcaccggcctgctcagcaatattccttctcttcccatatcgccgaacttgctccgacatcggtcatcgtcaaacgtgttctcgcactctcccatggctggggcccttctcgtgaagccggttactccctttctaagcttgcgagcacgaatgaggatacttccgagatttccccagagccggccgacatcaccttccagttctatcgaaggcagacacacgaagagacgtcgcggccggttcctgctgtccccgaatccacctctgggatggtcacccccacagctgccaccccctccacagctggacccgcctctgccttcgcctctacagggccttcgacgtcgtcgagtttccaaccaccagccactttcggtcattccttgtccaacgtgggcgttccttcgacccctgccaatcagaccaatacattccagacgcccgctcgacctaaacctaaagcagtgtccgatctgaaggacgcactcaagacgccttcggcctcgccgacgactcagaacaccagtgtacccggttgtgtcaccacgcccgagggcctcacgaccatcaatcttggcagtgttgccagtcttttggcagagggaaagacaccaatgaccgtgttggccgaggcggttgagacgtacgacgtaccagaagtggaaagattcgaactcttgaatgttatcaaaatcgctatgggattgggtaacaaagatgtccgaagaaatttggtggagatcagatgtttggctatcgctgtctactgtatgttcttctctaaacaactgtttctctatcctgcgagtcccgctttcgatcgatacgaatatcaatatttgtttttctttccctcctttgaaaccacgataggttgccttgtgccggaaaacattgctcaaacggatttgttcttatatgaacctgacctcgtggcacatatcgccgagctcatccgggttgatgcaggaatcccatctcaaattcagagcgcggccgtcccggctctggacgcgatgtgcagataccgtcatcgaatctcagaagtcataagcgcgatgaacgctagtgcaaaccatggagtgctgatgagtctattcagatccatggtagccaagcttggagaagaatcaggtatgtgctattttcaaaggatctgaccacacagatgtaagctgatcaggctcgtgtttttacataccttgttgccttcttcagacgatccgccgttcgatcttgtcgattctttggtctcaatgctcacgttccttgtgagcactccaagttatagcaacatgatcgtcggcgctggattagtcccgatgctggtccaacttgttcagaacaacctcctctcgagggcacccgtaagtgtctacatctgcactgtctttgagttgcgataacttttggaacctaaaatgttggtttcgattttctgcttactcatttgaccaaaaattacaggccgtaacaaaagctatcaacctgatcgaccacgttatctattcgaactcgaacggtttcaccctcttccacaacgctggaggacttgatgctctcatcaacaagatcaaagtaaatacctattctcgtatttcttaaactagatgtacaaccattcaccgtttggctctcatttcgtcctccattttgtcagcttttggtcgaccaagcggttgaggctcacaacaaatcgatggacctgtccgataaagatctcgacaactcgtatggtgagtcggttgaaactcttcgttaaagtcttgagaggattggcctctaacgataaaatcaaatccctctcgtatcggattggtgttgtgacggtgcaaaacaggcctcctgccattcagacggttctctgcactcagagcagtggttcgatccatgaaccggattatgcaaagtacaggtacttcagaagggctgcgaaatcttattgattcttcgctgccaaagacgctcaaaacaataatcgagcatcgacgaatctttgggccttctttgttgtccctcgctcttggatcggttgccacctttgtacacaatgagccgacatcacttagtgtgctgcaggaactcaagatcccagaggccttctacagctgtgtagaggaagatatcgaggcttctgctgaagtcctcttttctatcccaaatgtgatcggcgctctgtgtttgaaccaggccggtctcgaccagttgaccgcccggccagagattctcccaaagttgatcaacaccatcatttctgaacgacacctcaaaacgctccaggaaaaggaaaacgcctctcaactaggtgcctacgtagacgaactcgttcgacatcatcccactctcaaggatccgcttcggaacgccgttattggggtgatcaaaaagattcaggagcttgggcaagaggaaaagactgacgaagaaacggtgtaccacatcattccggtggacaaatctactgagaccacgccccgaaccgatccttcgcccccgtccactgctgccactggttctggagccgatgtcccgatctctgctaccgtccctgatgtaacaaccgccaacgcgccctccacttctgctgtagtttcaacatcttctccttctggtactccacaagcagcatcgggtagtctggattctcccaattggggcaaaaaggagggagagccgtatactgataacttggttgtacagttcatcggatcaactgctagggtgagtctcttctgcattcgtcgcacctgggtgatctatgactaacgtcatgacttcttcggttgcgtccccatctgtattctacagttcctagaagggctattcaacaaccacacccactgcaaagacttcatcaaggccgatgggctttctctcttgcttgacctatacgctatgccgtgcatcccttacgactttgcaggttctcaggcggccgattctctctttgcccttttcagagcaatgagtgaggttaacccgaacgctgtactgagcgccctcttaaaaccagtacgaacctcgttggatcagactgccgagttttggagcactttagaatcaacgtccaagctctcaggattgactgatcttcctggtaaattcatgagagatcttctatttctttgcttatccacaggtgatttataaactgaattgtcttcaaatttcttctgcagctggtcctgagctcgacaaagcaaacgataccttccgaaagctagtctgtctccatggtcgaatcgctcttcttgcggacatgtaccgtggagtaggattcggtcacgccaaggtagccactggtttccttcaaatccttactggcccggaagaagccactaccttcatggacctcggaaagttacatcgagcctgtctgtgggagaacatcttgatcaaggctaccattccagaggctgttgttgctgtcaatccctcccaccaaggcggaggcgggaacgatgtcgctagaggtcaaacagctaccgtcgctggcgtaccaagagatgtgttggatgacattagtagtatgaccgaaggaaagaaggttgctgatctgtttgccgcgccgggaagcaaaagaatcagaaacgggaaagcattcaagtatctcgtcagccagctgccagcttcgttgaccaatttcaatcaaggtaagttgctgtcactcgtctgcctgatcccgttcaaaggatctcgcctctgggccttcgttcttcttcctttaatcatcagccagtttctaattcaacatcttctttatagccatcctcaaattcttggtgttcaaaagaggaaacgatgctgctcaccgcaaacaggccctcaagacgtcaaagatggtcgctcagatcatgtacgaccacatgcagtgggcgttgaatagtaagttgtcatcaggagactctacgtggttgtttacaaagaggtcaaactcaagtccatgggtttggccctggtcgtctgtctctttcttcatcatatcagccgatgagagtatcgatcgaacatgcctctatgcatatgggacgcttatgatcggattctgcacggtcatcttgttcgacggttagtatttgcgctcatcttcttattgacgagggtatttacgcatcgtttacttatactttgacattcaaaaatcgtttcgttcggttctcagagcgaccgataactcagggtagccttcaggttatgcttttgtcagctctcgaatatctcggtggtctccacagcataatccaaattggtcaacgatatagtgacgcatttggaaagatcgagcccggaactgagctcgctagcttgaataacgtccatgtatttagcggcttgaaggttactttgcgactgcttcaaatcctttctggctcaaaagcgctgttcgagtcttctcagacgaacgcgttggccacccgggacaaggcagccacgttggaagatgatttcgacccttactgtttcctcgtccgaataaggttgacaatcttaccgttcatccgtgacatctggcaatccgactggattctctcttcttcaacccccgtcactgtcagccggcctgtggtcgatacgcttctgaaaatcatggctgctgacgccgaggtgaaaccagaggcgcccacacttcccgccagtctgggtctaccttcaatcagcactttgcttcaacagaacagaccgccgccaccttcaaatttgattcagcaactggttgacatgggattttcaacacatgcatccaccatggctctcactaggtacaacaacaatacgacgctcgccgccaactttttgttaacgaacgcgggcgcgtttgccgagccggcggcaccggtcactcctgctgccaccgctgaaggcgccgatgctggtacggctgtgtctacgaccgctgaatctggttcttcttcttcagctactccggcagaatccttgacaggcaccgctcctgctgtttctactgtcaacggcgacgatatcgaaatgccggaagttgctgaaggaagcttcactgaaaagaaggaatcgcttccatctcgttgggaggataaacgaccagaactaaatgaaatgagggatactatccggcccgatttaggtaaccgggcacttcaacttgccgatcaacacgatatccttgctgccgatatcaagagtgctttcggaagttcgatcgaggtcgttgaaggtttgcttgaagagactcggtctatccttcccgatgcccactcggcaaactcatcgaagatgctcgtccgacttcggttgttgtcttctgttattcttgaaggatccttacctctgcttgagcacccaaagttgttggaaagcatgatgggcatcgttaccgacttggcaacgaccggctcatcttcaaccaaccaggtcggagccagtattgaagacagtcatccaaaatggctcgttcctcaattgcatatcgccgagggtcttttcatccttggggagacgattgctcatgtagagactcttcctgatgatgttgacgcaaagagtacagccgataactcactgttcaaagggccgttattcacttcttctcgaaagatcttcttcgaccgatgtatcgagcttctcccaaatgagtctctctctaaagatgaattcaaaaatgttctccgactgctggtattcctcactagagaccattcgctcgccgtcgagtttgctaaacgaggcgctgtatggacgatggtccagcaattcaagtccactaaacgggttctcactggtgcccagacattcatcgccatccttcttcgacatgtgatcgaacgacctgaagcgttacttgcgctcatgcaacaggatctcaagacttggttttctcaaccgagatcgaaggtggttgacgtagcccactttgtgaaaaacaacaagcagatcgcccttcgaaatccagaaatgttccttaaagctgtcggagaagggtgctcgctaatcgagtcttcctctgggatttatcacattagcatgaaacaacaaaaccctgagttgacctcttccgatccttctgcttccaccacggagactgctgcaccagcgcagtcgacagccatgtctgcagatccttttgaggccaacaaggaagaaagctcatcgaagatgcaagtcgacgcgaacttgccattgtttggatctgattttgagcctggatttgacgttgtcgaggccatcgttcatcatttgttaagtgaacttatgtccatcggaaagaacgctttggttgtccctaccgtcttggtcaacactcccccgactacaccatctacgaaatcaactgctgagcttccaacattgggtgctacggagaagacgacagagcctgctgggtctggtgcaacaacatcgccgtcttcaaacatctcgccagaactgtcagagtatgcgtatgcatgtttgctgatgcagaacttgactgaactgtttggatcttatatgagctgcaagaccgcgtaagtttccatttgtgttttcttcatgattagtatcctttccaaacaaataatccgtctaacatgtctttcgtaaatcttccgtcattctagcttccttaccaccgtgaggaagagcaactgtaaagacaactttgccaacgttgagcaacctcgattggctcttttgaacttcctcattcacgacctagtctgtttctccggtttggccgatcaagttcctcctgtcaaagcaagtcttaagaaatccttcaacctttcgaactgcgccatgtctgtcattgtcgctctttgctccgacgtaggaccagaagtcgatatcaaaggcgtgcaccctcatctgactaatgttcggaaagtcatgcttgagacgatctcgaaagccatcaaagaggcaacgtcatcgaccgacaacgtcgatatgcgatatggtcggcttcgtttgctcagcgagctatgcaacaggttgttgacctcccgaccaaacatcattccaaagggtcaggaggacggaactttgcacatcgcgaagatcatgttggagaagaactttgcggttgtattgacgaatgcattagcagagatcgacttgaactaccctgatgtaaaactcgtggtgaccgatattctcaagcctctagaacacttgtacggattctcttcttcgcctttttgttcaatctccttgattactaaacgtttccactcttcgtctttttcgtgcgcataggaccaaaatttcaatcaagatgggtcgagcctccgataagaaaaagaatgcttcgtctaaattgcaagacgtattggaggaggcatcctctgcgtcttcgttgatggatgaagacgacgaagacgacgttgatgaagatgatagtgacgcgccttctgaaggtacagaagagacacctgacatctaccgcaactccgctctaggaatgtaagccgaatgtctatctgcccttttgaggtggagagcgatatccataatctatactaaacaatgcttcttcttattcctgttttaggtacggaggtgagatggaggatgtatacgatgaggattctggggatgaggatgaagaagatatggagggttacgacgagatggacgggatgagtgaagctcctaccgactcgggaactgagaccggttcgtctgaaggcgacgagtcggctatggaagatgagctcatcgctgctgaaggtgattgggatgtggaagatgatgatgatgaagatgaagacgatgacggagaagacgaggaggattcctctgaggatgaggaagaagagatgctttacgatgtaagtcttttttggtttcgtactcgttgttaaccaacataagcttgattcactaatttcttttcttaacttcactcttagcctgacgttatggacggaggtgccatcgaggggattgatatcgaagagatggatgaaatggatggtggtaagtctttcgtattttgcataacaatcttgaacgtaacactaacgacaaaggtttctcgatcaacacaggtatccccatcatggatgaagacgatgaagacgaagacgggcatcctgatgacgatgaagaagaaatgtatgtctttttatttcattcctgacttgtaacctcatgtaccagagatttctaaattttgcgtctccatgccacatcagctatgacgaggacgatgatcttggattagaagtccagtatgaccttgctcctgagtccgataaccggatttccaattggggatggaatcaagctgtcggtgggggtagcatcgcctcggcttctgcaacaaccgcccctcgccggcgttacatgcgttcgttctcctttttcctgctatctcatacatataaatctgacattggcttctgctctttcacacacatagtcgatggggatcccttccttggccggaacatggccacagcgaatccagtcatcggtctttctccggctatgccggcgttcccttctgccatggatggagctgtacccgtaactggaggaggcataggcttcaatgctagtgcttctggacctgtgcatgacatcattcagacaatcgagggattaattggaggaggcggagctgctgctcgcatactcgaacagttggtttctggaggacgagccgtaggcggaggagagcttcgagtggacgttgctactggtcccaatactggccatatgctcggagggtttgacatcagcagtgacggtgtcgttattcagagagcatctccagcttcagtggaaccccagccgatcgaatctagatctccggatccatactcttcaatctctgacttccttcctctagccacttcccaacgatggcttgacgaggaacgcctcactcaaggccgattcgcctcccaacgagttgcggatctcacaaaccatgtcatcaacttgcttcttcctgacgcccgtgcagccgcgaagaaagccaaggaagaggctcaagagaaagagtcatccgagactacggtcgaacgtccttcgaacgaaagcgaaaccgatccgtttactgatagaatcaatcttaatgtggcgcgtctgagagcattggtcaacgctcgccaggatcatcaagaaccgtcagctgctgctgaacaatcctctgcacgtgctgatgtggagatgagtgaaaggagtgaagctgctgataccattcagggtaagaacctctcttaaaacatcttccgagtgccagtttgtattgacacccattcatgtttcttctatcagtctctgcttctgagtccgaggaacctccctcttcgagttctgcccctacagagacaacaccctccacaactcttgtcaacgacgaggttgtttccagcgaggatcatactcaacctcccagtacagagacagcacgggaggagacttcttctgcaccttcagaacgagtcgtcattaccattcatggccaggaagtcgacattaccgataccggtattgatttgactttcctcgaggccctacctgatgatatgagggaggaagtcgtcaaccaacatttccgtgagcgacggcctgctgctcgaatgaccgccagtgcacccaccgagatcaataccgagttcttggaggctcttcctccagacatccgagcggaggtccttcagcaagaagccgtcgaacagtcccgaagggatcgagaagccgctgctcgtgctgctgccgctgcgtcgggagttcgcccagctcagcctgccgatattgaccctgctagcttcttggctagcttggatccacagctgagaaacgttgtgcttctcgagcaggacgatggattccttcagtctttaccaggcgagatgcttgcaggtcttgaagtctaccgaggtgaggatgaaggggaagaagaggaagaggaggaagaacgacctcgacatcgtcggtttgacggtgctggcctgattggtgcccggactggagcacctgcttcttctgctactgctactaagaagcctcctcgagatgccatccaacttcttgataagtctggaattgcttctttagtgcgccttctattcttcccggaggtttcaagaaaaactatcgtccctcgggttcttgttaacctttgtgagaattcgaagactcgagccgagcttttgaatttactccttactgtggttcaggaaggaactggcgatctatctgctgtcgacaagagtttctctcagatgaccctccgagcaggtaaagcggtcagcactccaaaggctacccctagaaagaaaggtgttccggatacacctggtccggccaatcttttctctcacctttctgccgaaagcgtgccaaccttcatagcacagcgatgctttgaggctctttctcagatcgtcgtcagcatcgagcgagcttccctatttttcctcacggagcatgatgtgctggttggcttgaagcgggctacagtgaagaagggcaaaggtaaagaaaaagagaagcaattccctcagaccaagtatccattggtcatccttcttggtctcctcgatcgaccgacacttcttaggaattctagtatgatggactctcttacggctcttctcgtcacgatcacccgtcctctgactacgctaccctcgccgacgtctcgagctgagggtttccaggatgggttctccggactgagtgcttctgtgggctctattgtttcttctattgctgtcccggctgctgttccttcgatcgcgagtactgctcctactgcgcctaatgttcctactactcctgcagctactgcaactggttcttctactgaaaacggtgcttctgagatgccggcttccgctcctgaggatcctgtcctttctcggccacctcaagttccgaataatgttcttcgcttagttgtgaatgtcctgactgtgggagattgctcttccaacactttcaagtctgctttgactctcatccatcacttgtcattcatccccgatgccaaggacgtcattacagccgagcttcgttctcaagctcaagagtttggaaatattctgcaggtggatcttaacgacctggctgatgccctcaatgccgaaggcgaggcccaccgggctgcaactatcgcaaaattcaccccagcatcttcttcgcaagccaaattgctccgggttctcaaaactttggaacatgtattcactaccaagcccccagcagcttcgtcgactggtcagtatcttgctttcttcatattcgtacattcagccttggtcgtctggtttaaaatcttctaaactctcttttcgttctatttatgatacagttcctcccaacactgctcctgaatcaacttcggcatcagtctctgcctcacaggtcaaccggggaggtttgacattgtccttccgatctccaaactcatcgtctaccgacgcttccaatgctgaagttttgccagctagcaaacctgcgactgatgaggagcaggtccgagcgatctacaacagtttctcctttgcttctctgtggcagaaattaagcaattgcctagcaatcgttgaggagaagccagaactggttgacgtagcgactgtgctcctccccgtggtcgagtcgctcatggttgtctgcaaatatgctggtcaaaaaccgaatggcgagagggctgccacaggtcctctgtccccccgatctccctccgataccgccgactcagcttctgatgatgttttcttgaaattcactgatgctcatcgaaagatcctcaacgttatcgttcgaaacaacccagccttgatgagtggttcctttgctcttctggtggagaaccccaaggtccttgagttcgacaacaagcgaagttatttcactcaacagctcagaagacgccctcaccgagaccatggaggaacacttcaggtctccgttcgacgagatcatgtgtttgaagactctttcagcaagttccaaagatggagtgcggatcaaatcaagttcgggaagctgagctgtaaattctgggatgaggaaggtgtcgatgctggaggtgtggcacgtgaatggttctcgtacgtctgattttcttatacgtagaatcctgatccgtgactgatgggtttgatcctttttactccagtgtcttggccaagtctattttcaaccctgactttgcactggtacgtcgtacaactactggacgtctgttttgccggaaaggatatttaccatttattatcattactattattatgtacctctagtttgagccgtcatcgagtggcgccttgacctaccagttcaaccgattaagttcggtcaatcctgatcacttggctttcttccgctttgttggagttgtattgggttcgttcttccttcaagcgttcgtgttgagcagatggatactgactgaagttgtatattttggcaccacagccaaagccgttcaagatggcaggcttcttgatgctcacttcgtgagatctgtgtaccgacagctgttaggtgccaagaatatgggtctccaggtgagtcttcatgaagctcacgaaccgacgataatcacatatatactgaacgttattcatggttttgacataggacctcgaaattgttgatccatcctaccacaccagtctgaaatggatggccgagaatgtaagctttgatctacaattcattcaattcttgatacaatcctctgacccacctgactctttcatagtctatcgaagatattttggagctatcgttcgctgtcgagtcggatgctttcggagttcagcaggtgcacgatcttattcctgatggtcggaacgtccctgtcacagacgagtaaggaagttttttccagcttcttgtattaaagtttgccttctgaccatacttgtgacttggattcacagaaacaagatggattacattcagagaattgtcaacttccgcttggctgattccgtcaaggatcagagcaaagcgtttattgatgggttcacatcgtatgtggtcaagtcttgatgtcgtgacttctcacttattgcccatcgactgataccttgatctgttcctcttgttatttatcaccagtatcattcctcaatctctactacaaatatacgatgctggagaactcgagcttctcatctctggtctacctacgattgatgtagatgagttgaagaactctgttcagttgcataactggcgaaatagcgatgcgtatgtcctctatcaagtcagagtactttcttggagatgatactgactatgattatttctgccataaaaaagtgagattcagtggctatggcgagccatccgatccttctcgcaggctgagagggcatcattccttcaattcacaaccggtagtgctaggtgagtggtcgatgtgctctgattcttgcgtatgtccaccagggctcatcgtgtcttttttttagagtcccgcttggtggcttctcccagctggtcggttcgaacggcgttcaacccgttcaagttcatagagctcatggcgatcctgatcgtatccctacatctcgtgtgtatgcttcttatctctgtggtatatgactgtatactgatcagttctgccctcttcatgatagatacctgtttcaatcagttagatttgggatcatactgtatgttgatactcccttcctcagaactctccatctgcacatggtagctgacaatcttctcattactactttgtataattagcttcgtatgatgcattgcgtgataagcttctccttgcaatcactgagggagctaccggttttggctgtatgtctcttttcacaccctccttcatctgaattaggtcttgatgctcatatgattttctgtttttatctttttcaaagtcgcttaaaccatatacttttctcgattcgtgtagcatattcactcaagcttctgctatatctgtacatcagatcactcagctcagttttgtgcaatattttcccaaaatattttttcttcaaatcaaatcatcgtgtatttctgtttgttcacaatttctatagaaaatatgtctgtttctcaataatgaccagtgaacgagacatgtgtacatacttggcaggacagattcgaatcggtcgtttgctagctgcttggctcacgtgttcgaccctatcgttcatggaagagaagatctctatcgttattcattacatcattaagtcgaagagagagcaggactgggtgtacgggtattgtcagttgatgcagggaagggagaagccgatcaaggattagacagtgctcgtctgagtatgattaagattagaagccaaaaagtatgtgagtcctcgtttgacacgctggcttgatggaacagtattttcaaggaggtgcgagcggaacttaccgactgagtagagctctgatgttccgcacaatatcccgtgtcaaatgagtttggaatttaagatggtgaacaaaggatcaaagaatatattcagagatcgctgactagcaaaaagatggacgaaatgaataagaaacataccctttaaatcctctgacgtctcctctgagacctccgatcaggctgatgacctctctctctcctggtcctaagcctccaccccatgccccaccactccccaccgcgccagctctttccagctggtttgagagactatacgatccgttcgacgatactcttgtactgatgtttttcatagcaaataaggacatgacgtaagagaggctggaactcggcaagaattcatagcgaaagaagcagaaaggaagatacttacgtcttggaattgaacagcaagctttgcgaaacaatcgaagcgccggctccttttatggctcttaataatccagtcggccgttcttttggtgccaacatgagcaacagtgcatacagatcgcctaagtcgtccattggaagtccaactggatctttctccacagaaagtcccagaacagagtccgctctgatcaaactagattcatcctttccacttgaagcttcgattgtcaaggtatctgatggtgcaatctcggtctcggcctccttgactgatgatactaatggttgagtaagtgaatctgctgccagtgaagcctcaatttcgttttgagatccttctatgagaagattatcggtcggtagagcgttcgagggagagtttcgtacgaatcccacgtccagatatctgttcaggctgatccggagagaatctaggtgagacacatgtttctggaggagaatgtcccttgcctcacgagacctaatcaggcgaggaagtatgattttctatggagacgtgtttgtcatttcagtagtagaactcaagtcagactgacgagctgattgataccagaattcggtagagagagatatgaacaaactgtgtagaggtaagcagcgattgcagacgatcccaagagcaaggataaaagaaaagtcacagtccggaggaacctaggcaaaggagacgatgcaaaccgagtgactggatagtcccttggaggaaggattggcaagggaacattcatagcagaggatgtcttgcgatggtggtcgatgtttggaggagagcaggtaaagcgaacccggctaaaggttcaagccggatgatctgatctcagccggttactacccgacttttttggccggtacacttcagccaagtttcattttcttttctccttcaactccatccgacactcttcgatcgatcagagggaagatgtcgaagctatgcctgctcggaggggctataaggaacttgtctccacactgcgcgtcagtttatagggtttcctcggttcaatcaacatgcttttcggttattcccttcagaactttcaacacatcaggcagacgggcattgtcaagttctgtagctctaagctcagcgatgatccagccgagtcaatataaacaacttatagatatcacacaagctaaagtggaattgagaaacaaactagcagccgaggttcgtgtctaatgctctatttctctcctcaaatctgtcctgttgagcgcgctgttcgactgaccacatctggtgagatacccttctcacttgagttcagctagaggcaacctcagaccaagcaactatcatcaaactttccaagaagataaagcagttggatcccgtgttcgacaagtggcaggaatatactcaattggcttccgtaagatctgtgtctctgcttagctctttgctcacggacttttagactaacaccctctctcatgtgtgtgtctacaaaggctttacaagaatctattcctttgctctctgatccggatccatcgcttcgtgaaatggccaaagatgaaattcagtcgctcgaagcttctcaaattgaactcatatctcagactcttcccacgcttctcctacctccagctgctagttcgtctttatcttgcatggtagagctcaaagctggacaaggtggagaagaagctttcttattcacctacgaagttgctcagatgtatatccggtacgctcaaaagatgggttggaagatcagtatgatcagtcagtcccagatatcggtcgaaggtggacaagggtatcgggattgtcaactagagatcacgggcgaaggcgcgtttggcaaattgaggtgggagagtggggttcatagggttcaaagggtaccggccaccgagagtaaaggtcggacacatacaagtacaattgcagtgatctgtttgccgatagaggaaaacccggcagaagatgacctttcttatgtcaacgagaaggaggtcaggacagacgtgttacgggcttcgggagctggtggtcaggtatgttctatcgttcactcacgcgtctttcgagactcatgctacggatgtgtctttactcatcttgaaatttcataacccttcccaaaatgtacccaaattttgagtagcatgtaaacactacagaatctgccgttcggctgacccatctaccgaccggcatcactgtcaacatgcaagatgggagatctcagcatcaagtcagttcgacttcttccctttctttgagtagatgattttttactaacattttgtttggtcaaatgatagaatcgagaaaaggcttggactattcttcgtgggagactgtacgctcatcgactggcgatcaagcaagaggaagaccgaaagactcgaagtgcgctaatcccggggatgagtcgatcggacaagatccgaacatataactttccccaagtttgtctccctttctctttctctttacagtcatagtcagttctatgctgatgtttgaagtgtcacatatgtacctcttaggaccgagtgacagatcaccgggtacccgtgacgatgaacaacgtcccactcattctctctggagaagattttgaagaactcagcagtacactgtctgactggtatcttggcaaaagactagaaggcctgctggttggtgaggagtttaacgccgatgattcatgagcatttctctcgattcaaatgtaatgctgtacgaaccattcccaattgggttgacaaatgcttggcagaaacatgcgttattatcattgagcagagaagtttccgttcggaattgaccgatggcctggccagtcttgaaagaatcaaatcggggtcaagtttcctatcatccatcacttcatttgacccagcatcatgagctcctacctgaatacttatactgttcccccaaatgtactgtactgtgtttctgtatctaacaaagtttgtattaaaactgacttcgtaacataccataatggcataataggagacgagagaggtagatcctcataaggacacgcccaaggaggcgtacgatttgaatttcatgtttcctgtgaaggagcttcggacagacaaagtgctcgtctgcccgttcattgtacgttaagtatttcgcggtttggcaattcaaaaagatgttgagcgggttgtagtctgatctgttctcatctttgtcgttcgctcagccatccttgcatgctcaattatatgtcgacggaaccaacgagctggatgccgaagctactttgtaagatcgagtatcatcttccataatgaaagatttagaagccggcgaaaacgaagacgaacgcacatcgcaactgaccatgaccatactgccattctttcctctgcacaacaaagccattatctttcgtggggtccgtttcctactgtttcgcccctgctcactttcttggagaacctccgaagcaaccctgtttgttcagcagccctctttgcttcacttgcgcttcctttgaacgctcatccgtattgatattcaattccattatcacttctcatcgactagactgctgtgcttttcgcgttgtttgatctgacccgaggtcccgagcctgtatttgcaggggtcatgaacttttacaatacttgtcgacgaaccctggtgagtttgctcttctctaccttgtcttactgtcctcgtcatccagactgatatcttgtctattgcatgattactgataaacggttcgatgcagtctctagaaatcggacatgtgattatcttacccaaagtgcgcactcatgatttgttttgaactggtctcatatttctgacactcgatcaatgttctttatcaatactcaagttccgaagaacccatgtgctttcccacgcgtccggtctcctcatcacttactgcatgtcagcccctcctgaaggactaggtctccgccgaatccagtggacggtatctcctccaaacctgccttctatgaatgccgccattcgaatgggcttcaagcctgaaggagtcatccgtaattgctgggagtttccattatggaaaggaggaaatgatgatgaggccatcaactcggccgagcgaagagctagagtggaggatggatggaaaatgcagagcttgtggtccgaaggagtcgagagaaaggacagagggatcgcgtcagactgttggcttgcgtccatcactactggagactgggagtatggcgatacgaaatcagtcgttgagcgtcagatgtctagatagcaacacgcatcttctcatggatagtagggtctgactaggatagatgatcttggttgggagacgaaaagactgccaggtattggtgctcatgatatatagcaaagtgaagcataggttgctgatttataatttttagattgaagagcgctcaattgacatacaggttgagatgtgaatagatacagggaaaaatcaagagaaaaatacggacaagacaccgtcatcgcttgtgtgtcatgtacgattgttagaaatatatggtgctgtcgtacatctgttgatgaagtaacgttgatctaccagcgatctaaacatgttgattaccatcgatgaagatgactctacatggtttggagatgactcggagtaaatttgggtataaagattagcccgtccatttgcttatcgatttatcaacttatcaattcaaccgacatcacattcaacatgagctcctatttgaacacatttgtgctcccttcgaatgtacattattacatcttcactggatcggtataggaaaaactgactgacctctgtctccatttgaggaattgtccatataacaggagaccagagaggtagatcctcacaaggacacgcccaaagaggcatacgatctaaactttatgttccctgtgaaggagcttcggacggacaaagtgctcgtctgcccgttgatagtatgtccgagttgtcctgttttgaaggccaaagaaacacacggatgacttgcttatactgacatcgacgtcactatttagccatctctccatgctcagctttacttcgacggaacaagagaaggagatgttgaagctactttgtaagcagttgtataatctgtgaaggagtcttgggggagtcacccgttgagagcgcatgccacaattgaccttggcttgaggaaacaaatcttatacggcacacagtcagagtctccgatggggcccattttcatctgtctcacaggtttacgccctcctggaagaatatcgacgtgatgcagttcgtaatatatgagagagacctcatctcactcaacaccctttatctacctgacgccattttgcttccttttttccatgctgatagagttcagtgatgttcgcgatttatgacttgaccagaggtccagaaccagagttcgcaggagtccttggcttcatgagagccgatagacgaacccttgtatgtgacacccaacgagctatttgtttgtgttttgaaagctaacggttttgctcctctgatgaattttgtaaatgataaaacaaaacagtcactagaaatcgggcatgtagtcacattatcaaaagtgcgcgccatgtctgacacaagcttcaccttcttgtcactcgatttatgtaactgatcggttcattcattttcgttttgtctatttcagtttcgaaggacccatgtcctttcccatgcgtgcggtcttgccatcgcatattgtctttcagctcctcctgagggtctaggtcttcgtcgggtacaatggactgccagtcctaggaatgtttcttcgcaaaaggccgccatccggatgggcttcaaatatgaaggaatcgttcgcggcttttacgatttgccaaatgggaaaaacggcaatgacgaccaagctctaaattccgttgaaaagaggagtcgaagggaaggactctggaaaatgcagagcttgtggtccgaaggagtcgagagaaaggacagagggatcgcgtcagactgttggcttgcgtccatcactactggagactgggagtatggcgatacgaaatcagtcgttgagcgtcagatgataagagaaacgtaattttagactctgtagattgttgtcctgaaagaagttttccgggttgcctccatctagaaaggtttttatcacatgcgtgatcgatggactacacaattgtcagatcacgacaaacaactgaacatcaagatcaaacgaagggtatacaagtttccaaaaattccaagagactacagcgacatgaagagaaacacagtcaagactgaaaagataaagagtgtagtggcaaggaaaagatattctatcttcgtctgcgaactcgggagaggtcttgagtgaatttggcggtttctctacgcatccgtctggaagattggaaaacattgagaatgaggaacagttagcttttttttccttgagagaacggaaacttcaaaaaatgcaaaggtagagctaaccgaatagctctctctctttcaaattcttttctctcaatctcctccaaggagacctccgataaaatcggttggaactcctctgcctcatcccaacctctccaggcgccctttaatcccttaggtcctccatttggtccgaacccaccaaggatcgtcccacctcccaaaccacctctggctctctcccgatctttcgcgtgtagactccatccagggcctaggaagccccattcgaggcaatcttttttatgacgaagaagttcctcgtgtattgcgtgggaaatcaaagggatagattcatgaggaaggccaagatcagacacaagtgtttgagcgaagtgttcaggagtcagggtagaggaaaggtcccattcgattcgatcccggagtgtcaaggtagatatctgaacgtcgagctgttgaaatttgtgttattgattgaatatttcaaaggaagatggttagtgaactgataagtttggtagggaaactcgtctgtgtatgcgcgagaaaatccttacattgactatgatcctacaatcactttccgcctgactctcatcgatatcttcctcctcttcttctctcacctcttccacctcaagctcctcttccttcttctcgtcctcgccttcagattcttttttatctcttgtgtcctcctctccattggcctcgtcttcgtcaccctcaactacaacgccagtgatgtcctgcgtctcatccactccatccaattcctcggcgtctatctgttcgtcatctacatcattcatgatcgaaacgaacttcggctgattcatcggcttctccccttctgagctctgctgcccatgctgagatactccagcaagatgaatgctctcatcataagtcacatccacttcagcgatatctgagaactcatcgagttgtgctctgatttgtgtagcaatcgattccgcatgagggacgattggaaggtcgatgtcttgacaaaatattcgcgcaaattgttccggtgtcaaaagggattctgtgtgcacatttagaggaagatatcagtgttttgaccgattgacaagagattgcaacaaacaactttgatcaaacctttgaggttccaagtgaaacagtctctgatccgatgagtatccgtatcgacatccacgcggatcggaatcaagacttctttcgcctttgcagcttcacctaatttgtcgtcatcgctgaaaatcaatcgagcgcgtcagtcgtgcgttccaacgcgacacacactgaattgaaatgcattggcttacaagtatagatgcttggtctttatagccgttctcaaagagattttgtccgccgggggtctcatgcccaggtacgttctgggttcctctctttccaactctctctttgtcggcttgccagtcacacttgtcccgctatctcctctcttcagccttttcggtctaccaggccctccgtccgttccatcaacgtcttcctcttcatctgactttccatcattgagctccgcatagttgactggacctcgccttcgtccaccgcgatctaatccggggaagggggatgtcgtgccgggcgtagctgttcccacctggttcaagatgggttgcatcaacacggatactcccgttcgaagtcgagacgcgtaggaagtgaacgtcgcttgggcgttacgttgtcggttggtagccgctggcgcaaagagagggtaggcagggctcggaacgcctggttcgcctgacgaagtgaaggatggtgctgtcataacttcatcctccgtcgctgacgaaagtgtagaaagttcactcaaagtggcagcagcagccgcagggcctatcaagggaagggaaggaggcgctgggtgttgatacaatctgaatggatttgtctgagaaggcggaatatacggcggaggaagaacatgtgcaggaggtaggtactgtgcggctggcttgggaatgaattgagcggcctgagtgggcgtagccgaagaggtcgtatgtttagctactgccatgttaggtgatggaagtgatttggcagccgctgtcgtcaaagctgaggtatccttgggtttgctaggtccgggaggtcgtcctgggccacgtctcacgggtacggtcggctgaggcacgggcatcattcgttttccaaccggtcgatgttgaccagctgatggcgattgtttcgaggacggaggaaggggacggtcagattgcggattatactggattgaactcgaatgagtaggattgtaggactgggcaggcgacgcgtgttggggtctgaaagaaggcgctcccgaaactgcctgattataagaaggttgtggctgtcgaggttggccataccctgtggcatatgagcctggaggagcaggtggaggtggatgagaatagggatgatgttgggtcgacgagttcgcgtaagagaaagagtttggaggccgagcgtattgggcggatttggaagctggatacgcgttcgtctgaggcggaagttgatattgagtgggagttgaagtgggcgcttgtgaacggaatgttgggacgtgttgatttacttgatatggatgagaggcaggaggagggataccttgatgcgtgtgcagatacgagtgtgggagtgtatgtaggatttacgagtgagcccggagagagaaggaataaggagatttgagaaaagaaaaacatggctttcaggatgatgatctcgagaacaagaatagaaaagataggaaaaaagagaatcagaagagaacaaaatctgttctagatactcaccaagtcccagacctccatgaagctgttgtagaccctgaagagctccttccaaggactgactggccgatctttgaacagaggaagcttgggctgacgcggggttcattgaggaagaacccgtcggatggaatggttgaacggaagaaggaatctgagataacaccgagttcagctctgaaggaggcatctttctagagagatcttgaagaagttgagcgacaacactctggtctaccggttctgagagaggaggtcccgccatgatccttcgtcaattcagaatggaccggcctggttgaaggataggatgcgtgtggggaggagaaagaaagaggacgagatgtaaatgaacgtgatgagcgagaggaacagaactattagtaaattttggcaaagcattacaaaattttgtagtcttttttgcgagtttctctattcaaatcttgcttgaactgacatcagaacctgaccactaactctcaacaagttgaacccaatatgtcctcaatcatttctccctcctcagtatatagatcgcttctcagacagtactcgaaggcagtgagttttctggatgctcgtgtctgattcaatatacgctcgctaatttttgttctgctctcctcagtcgatcaagcctagaacggaaagaagcattcatctcaataaagcacttcgaaatttggtcgagacactaccccctgcatcaagtcccagcttcgagaagaaagcaaacgagcttcttaatctcgaagtcttcatgaggactcaaaggagctacagcgttcgtcgttcctatcaggtgtctactgacgattcgagaggaggaaaccttttaaagattaaacttgtacaatcgtctgatcactcatgtttcttgattcctcttatgccacgcttttttttcctttctacgattctttcttcggcctattataaacttcctgaatgtcctcgtatttgaaccatataggaattggtggagaggtataaccctacgcatgggatgtcaacccaggatcggacaaaagcgacggctaggagagtgggtcttgacatgcccaagtggcagatggatgagtgattcattggccttttttctctttttgtgtctctagaggcttgctggaactttcttcatcctgagttgtgaacaagatgacgtccaatctgaggtacacgacaaacatcgctcagtcgagtcctgatgactatgcacgaaagctttcaaaagaatcagactgcattttcaatcagaatcgatttcatcgatacatattatatgcatagatgaatccttcatggtcctataccgtccttacagatgaggtcccaccatgcccattcgctttgagacatcatctgaatccaccggctgtctgttccaatctttgccaccgaccaaactagcgtatccagcgtccgctatccgtttactcagcaccgtgcccggaacaaatccgtacatcctcatctcttgaactagagacttgagtctaccgtcgccttcaagcgcacatcgttcgatgagcacatcatatgttctgtgcgtcggcccgcctgcctccttcgatcgagcaagtagatcgaacgctccgggttcaaacacgtgatgaggctgtgtgcagaggaaagcgatcattcgctcgtacgtccgtggtgtgaattcaacggaggatgcggtcaaaaggtcgatcgcttgggagtatagagggaatgtcgtgtctggtcgaagcatgcatgcttccagtaaaagatggtacgattcgagatcgggggtgatgcctaacgtctcgaactctgtgtcggtttggacatgtatatgaagagcgcgatcatagagtcagagagtttcttggaagattagaatcggaaaacaggaggagaagaacgaaccgttgaaagtttctgtagctcttgagaagtctagaacagctaaacatgcctgcatgatgacatttgccgatgcgacatcaaccacgcctctagcctccttggaagcttccaaagtgaaccatgcctcatcaatcctctttgtgatttcttctctatgagcctcgaggcctaaactcaggcctgcggtgattccatccaagattggtttggctgcttccaatgagagatcgactccttcaagtctcatcaaactcaatgagtggaaggcagcctcgagatcaccagctttcatccacccctcaactataggagccatctggtattcctccaggggttcagactggatttcctttgtcaattggaaaatttcgatagcgaactcaggtagaccacacgagccagccaggttggtcatctcttgaaggagaccaatatcaggtgtcacgcgacctgtcttgacagctagatcccagatgctgattagtgatgagacctatgatgaaagggaaaagagatgtcaaatctatggcatcgacgagtgatgagagtatgactcgaaagaatgggtcttcgtacatgtttcttcctgcaaatagctcgcatcaggcctaaccaagcctcgtcactgagatcgttgagttctccgattccgacaaagtcccctgccatttcaaccgcagctctcgtccaaccaacagcaacaagtctagcagtgatctgctcgacaacttccctcctgggcactaatcctcgagcccgatgggtcgcgtacaacgagagaatcacgtccagagtagaagtcagatcttgtagtttcggttgaaggtaggttgttttagaatgaaggtatggggcaagcgcaagagtaagcgtctgagacgttggcttcaatcgaggttcagtcaatagggcagtgattcgagcagaaagcgttgggtgaatgtgtgacaactgacagaagaaaaggagaaagacgggaaggataagttatgtgtacaagatcatcacatcgacctgttatgcgaggggatagacagatcagtaaataaaagatgacccacttgaattaatgcatctaacccttctcgatcaactttgacacccaaagagaccgactccacataaagcgcccacccgatctcccactcgacacttccaaaccaaacacctgtttgacctctgactccatcagcatactcctttcctgtcagttgaacaagcaactctcttctggattccaaccagctctggttgtttgccttctcaagcgccatttcttcggtcaaactatcgcccgtaatcggttgaccatcagattggttagccaactgtctttgcttccgaactgcttcgattcgggataaatgcaagactcggtcagattgagcggcaagacagatacggatgagggttgagtaagtcgttccatcgggtgtaagtgcaagggattgcatatctgtcgcgatcgaaagtgcgctcgatagtcgattcgacgtgacgatacttggtgtttggctcttgggaccaggtacaatcggtgtaggtccagtgagaatgcggaatagtctctcgttacaatctaagagtaggatgaaatgacacatcagttgcagagctagaggatacgatccgatcgatgcaatgtattgacctacccctgagtgcttctttgtgttgaggaggaggaattctgggaacccgaacgggagaagggcctttcgaagaatcccacgactggtgaggagcagctaatttggcaatgatgggaccttgtcagttggacgagatgggtgttctttggtttcaaacttgagcagccaagtaatcgcaaggaaacactcaagggacgaactatatcttctagcccaggcatttgttgcgctactgatcaaccaactaggcgtataactcggtccagcttcgatgtctctctctgagacctttgagctggtgttaggcttctttttgttcttcagtcgattacttgctgtcgtaggaaagctccttgaagtggatctcgttcctttgtccaactctggaccaaatagaggggtcgattttgccgacagcctcacaggctgattggacggtgtagatccaaacgggcttgcttgaatcccgaacggaacttgattagatctggaagaatcactcgcattggacgatgacctgggtggttgttcagaaggagaaatggaagaagccgggactttgttggataaacgaggcccaaactttgactttttgttcgatttgcccctgaatgattgcgagatgttgttgctaagaacaacagggcaagaagtgatagtggcagatttggtagagagcagaggataggagagagatacgcagtgtcgaaaagacggcctggccgctcgaaggatatgagtgttgggcttcatccggcagctagttcaggtctgatctggccaacaagagaagatatatagggaattcgttctatcaaggcagatcgagacatcgaatcaatttagctgttctcggagaaccattcaaactcgacaaaaaagacacagaacacggcatgcataccaatctgattctaagctccgttatttgttacgtcagatatattcttgctgttcactctcttgatctatggtaggtttgaaggcgaaagttggtgaagttgacaacgagaaaagatgtggtcactgctgggtgactaaccgtaaccgatattgaacctggtcacaactcaacctccacggctcgagtccacattttgtcgtatacaatctcctatccatcagtttccacaaaccatcgtatacccgctctctttcttattctcattctccttcacccttgttgccatgtcccgaactgtcacgttcaaaactcttgaccagaaggtaatgtttggccgagttcttcctgttcgcttgcttgtggtctcgaaacctgatgtctcgccttttccttgatctggatggtgtctattgaaatcgcttgtgtttcaaagagctttacagtctctgttaacgatgacgactcggtcagtctacttacgattgttttccattataaaatcatccttgctgacaagatttacgggtttatgtgctgatattgtagatatctactgtcaaagagaaggtcaacgctctcggcaagcctgttagcaagctgatttactctggttagtctgatagcaagtatcctggtggtaatgtgatctcgcctcaaatgtgtactcaaaaacccacgccttgtcttgccttgttgaaatcaattgccactcaggcaaagtccttgatgactctaaaacggttgctgagatcgatatcaaagagaaggattttgtggttgtgatgtttgccgtgagtgtaactccatgatcgatggtcacctctcacgcgttctttaacttatgtatacgttgtttgttctgtcttgttctactcttttctgtccccagaaagttaaacccgcacccaaagccgctgagcctactgcttccgttgctactccctctgccaccgctgcttctcctgctcctccgacaaccgatactacgtccgccccggcatctgatgccccttcgtcggacgtctcgatgtcggagccggctgctcctgctgctacaccagcctcttcgggactggcttcgaccggtttgagccatggatctttccgtacgttttgaatgctgctttttggccacgatacacgtgttctattgtgtctcacttcaagttgtcgtgcgccgtgactaacctgtctttgtttcattcatcacacccacgaattccagtcaagggagatgcattgcagtctgctattgcgaacatgaaggagatgggatttgaagaggctttgatcatgcgagctttgaaagcgagtttcaacaaccctgaccgagctgtggagtatttaatgaacgtgagtatatgtgcttcgccatctcggcctgttctgtcaaacgtctgtttgatgcataccattaatgaaaattcaatcgtttctctcgtattctagggaattcctgaggagtctgaacagcctacttctgttgcgtcgattgcgccaagcgccccggccgctgctgtccctgcctccgctggagccgtcaccgatgactctgctcccacttcggctcctgccccgtcttctggaggcgaaccggagaatttgtttgctgtaagtttttacaatatcttccagggagaaaattatgaacattttgaacgaattctaaatgccggcttggctcgaactttttctttttgattggtaggccgccgctgccgctatgcagcaacaacctggaggtgctcgctcaggtgccagtgctgctcctcagggagctcagggtgcaggtgccggtcagctcgatctaagcgcgttggcccagaccccgatgatgcagcaacttcgacaggtttgtctatatacattatcatttatagttttgtagttctgcattgacctctcaatcactcatgacgtgttccgattcagatggttcgagagaacccggcattgattcaacctatgatccagcagcttgtccagtcgaaccctgctcttggccagcaaatcgcggccaacccagaaataatcatgcagctctttgccggtgaggacggaggtgaatttggagaggacgatggagagtgggaaggtggggacgagctcatggctgctctcggaggcgagagaggtgagggaggtgaccaccagaacgttgttcaagtaacagagcaggagagggatgctatcgagagagtgcgtcatcatattcatttttgacttttggtcttgccttctcaagttttgcacgtcgtcgtgcgcgtcctgatttccaatttcttttccttttcctcacccttgttttcgatcgttcagttagagagcatgggtttccctcgaaataaggttctcgaggcctttttgctttgcgaccgagatgaagagatggcagccaactatttgttcgataccgccggagacgacgatatttagagcgaatcccttatttctgttttctctcgtttgaaaaatcatataaccagcagagagaaggagtgacacggcgacgaggaaaggtctttcttttcgtattgaagaccggactgtatttttctttttgtttattatgagcgttccctcttggtcaactttattctgtcaaagtccgatcgccttctagccaaagatcttgttctttaggctgggtgttggctcagaacctgtctagatcattgggaagactcatcttggatattgaaggtagcaaacatctgttgccgggtatttctttggattgctaaccaacgaaaaagatgagacccgataaaaaatcggaccggctgagcggttcggaattggatgataaatcaatgatgccttcggtgtctatagagtgcaccattatacgagtcagtttcggtctagtcctgttttctccggcattattcatccgcgcttcttggctttctgactcatccgtaattgtttgcctttggtcgtgagccgatactcgtcacctacaacatgttcattggtggttggctgggtttgaggttcgatgcgcgggctcctttcagagtcctaccacgttcatcgacacatgctgctcattcttccgctgtttgccttgtacacccgcttcctgactcatcgtttacttttgctgaaggctgtcatcgctgaccgatgtttcattctgatctctccccatcaacaccaccatcggtcagcaacaccaaacacatcgcttagacgccttcaggagaattgactccgttcatgtacatcggttctctttaaaaactgatataaaaatgaatttatttcaatttgttcttttcattcattctttctcatttctacaacaactctagagttttctactttcctcctcctcgtccatttacccatactcacatcatcaaagacatcttaggaaacagtatacctctgcatgaccatcatgcctgaattcacttcccctccaacgtactctcaagatcctccagagtactctccttcgcctacaggatctccagtcttgctccctctttcgattgaaagcgaacctttgatcaaagcttcagaagcgagcgactttctcgtccctctcggttcgtcactcagatgcgcgcaaacagagaggcactcccgttacctacctcatatcatcgcttccgcccgatgcatctcgctcacaaagcaacacgtcaacctcgttctggccgagcctctcgtcttcatccgcccgccaggtcagggctggatatcctctgggctcactcctgaatcagaagcatccaacaccattggcagggacggcagactttctggagtcgttcatgtcgtctggaccggtccagccaagcgagtgcgtggtgtgaaggttgaggtaaagtgtcggtacaagctgctggcgccggtaaggggagtaagcgattgggaggaaggtatcctgtttgaacgaacggtggaactcggtagcagcggcgcgtgcgagcagggtgtctggctcgagaagggtctgaacaggtacgtctgatagccctagatgttgttccttgcatcgcttgcgcgaagcgcagctgaccgggaagtaattattgcgcatcgcgcgtctaaatagtttcgaatttggagtcactatcccgggctcggctccgacttacgagcgatcgttctggggaacaacacactacaacgccacggcaaccgtgatgggaactgggtcctttctaaccaaggaaatgtcgacatctcagaatttctacgtggccgcttttccttaccgggaagataacagtgagaatgattcacactctgttgttttcctcacatgtaaccaccaacgtgctgactattctcctgttcggtttacttctcttctgaaattaagttttccaattccagtttgtgaaccaaggcgtttcgtcccacttcgatacgttttcttctacactctcgtcaaacgaattcatcgttgccgctccactctccgcctcactcactttactctccgtgccagccgatctcacaatatacgcgatcaacatctatatccagcaatacgtcaccgtgcgccaaccaaagtcaggcttgtgcgagactgtcgcgagctccaaggcttcgattgtgcaacagggcgcaacaggtggatatggcgccaaaggctttgctaaggcagcgcgagagagaggcgatatattgatggacgggcgggcgcatgctggagaactctggaaatggtttaaaattggtcgtctcgtaggtcccgtcttcattgcgtattgtgttcggatgcgaaaggcaatctagctgacgccatctgttgaatcatgcattccagcctacatcggatatcatccggccgacgactctctcaggcacagagtcacctatcagattttcctcagagttggctttcgaagtcgttttctcaagagatgaccctaaagtggaaaacccggtagtcaacatcatgacattgcacaacaagccagtgatgatcgcgtcgtacgtctggttcccatgctctttgaatttattcttgaaatggttcttcactgaccgtgtcatcaatcttctttctacgaacgctgaaccattatagttgttgttgtatgagcagtcatttgactctgcctatctattcagagccgactccagagattcagggtaaagatcgaaagagccgagactgcttgggttgcatgtgcgacatggtccgtattcttccgtacctttccttccttgaaattcttggttctataggtgcacagcagtgtgctaacagtctgtttgcgtttgatatgtgacacagacgtgggaaaagttagaacaacgagagctaaatctgttcaagaaattcgaggcggagacgattggattagtctcttccgggtctcatcaatctgatgccgaagcaaatcttacagacaatatcgactggagtacactccgtcaatcacccgggcagtatccaaaaaccctgacttgatctatcaagcttgtgagcatcaaaacatattacaatcttcctcagaggaaacacacttcatcgaacagttgtagagtttgttctgattaattctctctcatttgaacaggtacattattttctgtctttgattattttatgtcaatcattgacttggaacatctcttctcgtcggactgtgaaccggatatgggaagcagaacgaaacatagtcggaccctttccttcttttccgttcaatgtctatgtctccgtccttcggcaatgtgtttttcgcttggagagctgggtatcagtatattggaccatgccaaagagtacactatttcaaccaagccctttctcgtcatctgttcgagttttccctgctatacaaacttattcgaggggaaacaaccaatttgcgttccgaatcgtttgtgtatttcttttccgggcatctttgctttacgtcttgatactattcttctttctcgactagaagtcttgtactgtacctctttttctggtgatgtcatgagcgattctgtgtgagagccggcgctgttcaaaatcgcgatgccgaagtggcgcggcaatccggaagaagacgcgtggaagctccgaaacttccggtggctattcaagcgatatttgaccatcttaggaagacataaaagagtagttaaaagaaggaagacagtcactcgaaacacaccatatcgccatcttcttgatatggatacatcagacatccctagcgacaaggagtttggggcagatcaacgagaattcagctcgaccgatgtctttaccgtagatcaccactctctccgagctcgcaagaaaaccaagccaatgcggttatgttattttcttggcatctcgctcgccggtctggtcgtccttattgtctctggtttctttatctacctcacttatttggtggcagagcatttctggcttaatttgttcgaccctcatcggtcggctacagcttctgccgatcatattgtcgtccagagttactacggtaaacgtgttcccaaatttgatgttgttgcgagcgtgttcgtcagactgggaggagaactagctgaagtaaaaataggcgagtatggatcatccgcccctttcctgaacgagacggagcaatttggacaatggaagtcactctacagtcagcgagtgttctctcaaatcgatcttaactcgacagaaaagattcaccacaagaaggttgacctacctattccttgggacattttgtgcgttctaaaacctacactcgtagtgcatctttctggctgacatttaaaatcgactttcttaccttatgccacgagcagatcccaattctacaagccccatacctactttcctcagatcgtcaacactttcgtgatcgtcccgtccagccccgatcctatcttcaattcttccagttcagacaacttaacgccattcgatttagtaagctttgcttactctaatctcactgatactccatggacccgatcagttctacagaacctgtcccgtcctctcgaacccgaccatgacgtcaagtacacaccagaactcgacgcattctacgatacttcagccgtcagagagtttgccctacggcctgtgagagataaatggacaagctttgatttaaagaattctacttctcaaggtttgaatcatacaaccaaacttcaacagcttggagcaacaacagatgatgcagaggaacgacaaggcttgcgtgtcagacgcaatgcaaccatcaaaattaggacaagaagccacctctcgatggctaaggcgaacccggactatgatctgtttgcatacatgtcaggacgtgacactgctgctaagagcgacgttcgtctcttccatttggttttgtggagactcacaattgctatttaattgttgcatctcaagccttccattcctttcttacacagccgatcttccatatcgatcctttgaacagaggaggtcctcagattggtcgcagaatgttcaaaaaattgggacattatcaatctcatattgtgcatagtcccgaaatggttgagactgatgcccgcgggtctttcttctacggaccttatacaacacttcgtacgtgctcctctcaaatcatctgctcatacacacgtttgccatgctccgttcttaagttcttcgcgtccaacatcttggcgtgcgttctgtcttgtagacagccatgctgccggaggtcaggattggttcactttgcctcgaatcaatgagtcttccgaaagtcaatccggtaagtacagtgaagcatgtaaaggcaaggcactattctgtcctcactcactcagtgctctcctcatctcttctgtttatcaaataattatcacaccagacccggtggtagttccttggcacatcaccttcgacctgttgtcgaacgcaaagttgggcatcattgatgttctcgacctgtttgatggcttagttgagggtgaccaacctgtggatgatcatcactcgaccaaggctgcttttttggaggctgagacgctcgaatatgcggatttcaaaagtgagagctagcttacattccttcttggtcatagtccttcctttgagtccaaggaaagtcgctgatttgagaggtcagccggtctcatatctccgctgatcattcaatgtttttgattctcagattctcttgtaggaaacaatcccacatcttcccagcgatctattcttcgtcgagtcttctttttcatcggaggccttatatctgaacccgtggcatggatccttcagctacactacttgtacactcgatcgacaagtacaggcattggtcttccttcagtcattctcggatcgtctgcccatctcgccttctattcaattttgattgcgctagcatcactcgacgctgagagtggcctgatcttcgcaataatattgtttgtcatacctgccttgataccttttgttctacaagtaaacctttggctggggttagagttcgcatggcttagttggaacggtataccggtcccagtagggttcaaaagattcaaacccagtcatgcagagagaatgagtcgaagaatcgatcaacaattcacatggatccagaggggcctcgtacgtcttttttcatatttcttggcgaccctggcgttttgatacgagaacgaactgctgaacgaaatttcatcgttttcatcttgatgcctatcaacggctgcctagattgtggtcctcttgacagttatatacatctactctccccacgtcatctcctcgccccttcacagctcatcgtcctcgcccagactctcgctgtcctctctctactcgacagggtcctcctggtctaaactcttcggagtggtgtcacatcgttacggatggtcgttgttgacttcaatcacgctcatgtcttctctgtcccagatgcttctcaatatgaggctgggtacgttcggtggtatgtacaaggtccacgtatggacccagatcattggtttcatctgtacgtctcttccttcttttaccccttttttttcttttcttctttctccctctccctttctgcccacccccctcgtttgatcgcgctccatctgtctttcatcgagcgctcgctaattctgtttcgctaccccttgaatgacggtatgaatgaatcactcagtcttatggacgcctgtagtcttcaagttcatattcggcaaatttgaaacgacggcccctctggatctctctgagttcatggtctttgcattcaatttggtcctattctggcaggctaatacactgcctaatgtaaagcaggatgaggagccggatgagtaaaccatctagaatgagtgaagaaaaaaaggttcagtgtacttaatgacaacctctgaatcgtcgacaattttcctttactaaagataggtaccatacttcagaaaatctcatgatatatcatttacaactttgtttcacgaatcgctttgaaaagaaggaaagataaagaccgatttcacaaaacaacaaaatcgacattggaagaaaaaaaaacctagaaaagccagttgtatatcctgtcggaattaagccaacgcgccaagaggatcgtaagcagggaggacgacaggatcttgatccatcacagccacgagatccttgtcggccagagacctgaaatgagaatgaatcgaatgcggatgggatttgtcaacatcatcgtctcattaaggggcacatatcaagcaaggcagcaaatgagagaaccagacatacttgtgaacgaccacctggtagacaaattcatcgaaccatctgtcggacattaccatgaaacctttctcgccggccgcatcggaccaggaattctcaactcgccatcgtaccggcttgccgttgtcatccaagtggacggcggtgatgaccatggcgtgggctatcgtgatcgtgaacaagatggaacaaagccgagaaacaagataactgtgagactgaaagttataaggggaagacgatagatacgaagcagagtataaatggtagccatactcattgctgaatcacccatcattaaccgctcagccttggtcattccaaagtccagcccgattgcgttcttgtagtcgtagagatcgagatccatctcacccgttcgggtagagaatgctccgacatcgcaaccaaagaagacggcctggttggctttgatgcttcggatcgcactctcctttagcttcgagatttgagtgttgacgtctgtttcatcatcgacgcggagcagataggtgagatccaaagctcatctaacagtttcaaaaccagatgtcaccaaatactcacagagaacttttcgtccgccccagatgtttcctagtcggtcgacggtgtaaagcttactgtagtcgttctacataacaaagagcgtacacaagcttggtgagtttcatcgacaacccagtcgagaaagctctgaatgaggacgcgctcactcttggatcgtgaataagtgagaagctttcagtgtaagggtaaggtcccttaaacttgtctgcaaactcaagtggagtggctttcaagctgtgatacttgccatccttgtcgttgtactcccaagtgaacgttacgtcgggcttgggaggcgtccccaaagcgatagccatcgtgtcgaaaacgtgctgcatgtattcttctttcttgattcggacagaactcgaagaagctcccgaggcgatgagctttcgaagattaagcgcggattgacgaagataagagctgatagaacatgaaaccaggagaggtaagctttgaatgcgcataggtgacttgtgggtcgatcagaaacaaacggaacgaacgtgaggagcgagttgagcttcccagagttggaactatggtacgtctcggggaacaagctcttcgggatcagcccgtacttctcaatcagtcccttggccatatcctgctgtccgccatctccaatcggagattggctgaggaaggtgaccacccggtcgtcgagaggtgcctttgcgagatcaatggagttctcgaggtaatagttagccttctcgagcttatcgtagaagaacagataaccctgggagagctcaaagtcgtcacccagcttgagagactgggtgacgttgatccgatagagatttgttgtagcaaaaagccctgtaggagaagtcaggaagaggttcaaccgaaagttacatgtcagataagtcgactatagatgtttgcggagaacgccgaagaggtcaagtaaagaagcgtacagcaacggccagaggacatttggttggtaaccttgacgttgtcatgtgcgatcttgtgcgagtaaacatgagggtccctgatatgggtcgctctgcttacgagagcggttgggatatcttgcttcgagagaacggtctgagagagtacattcttgggatctttgattgttagggttgatgtatatcgccaaacaggttcaccacggttaagggcaaatgatcagctgttattggataaatagaaggcatcgatagatgctacatgcaagaacggatagaacaaggtccgtactcttagaaaactctgcgtcccactgctggaccttgggaactgataagaaatcggtggccttgttatgggtgttgttgtcgtcagaggggatagtcggcgtggccgaaatgaacttctcggatacagtttgctttgcggctgaagatggagcagactgttgagatcccattattcttgcgtgtgtatgtatgtgagagaagaagagagtgtgtatatgtatgtgtgtgtcagaagagatgggagtgagaagaagcacgacgaaagagatcgacgacggataaaggcaagggacggattgcggacagtggaggtcgtgtgctgctgactaagcgtgttgccatatggacaccgccggctatctcctgtgtaaccatggttgcgttcacatttcagaattactctcaaaaaaaagtttcatagacattcaacaggaaagatagcaaagaaaggtaagagaagcaaggctgaatgggacacagattcaaacaaacaaaacaggaaacgtgtcagcaaatcgttttccgatcaatttcttttgtttacaagaagcttgaggatggggggaagatcagaaagctaggattgcattatccgcattgttataaaggcgcggggtcttaagccgctgaactcggaaacacggaccaaagcttgatattcatcatgtcgagaggattcgaaggtatttgtgtttagaaacagaatgaaacgcttcttactaacctgatggcaacaaaacagaccaagctggatggtgagtaagtatgaaaagaaaacaggaagggagaagaaaaacactggctaataaaggattcaggttgactcggtcacgtggatttttaaaactccggtcgaccctaacggtgtgctcaacaccgcgcgctttgtataggttcagtctccttgaaaagaactcgtatcttctaacactcgttcggatgaatgatccaaatggttagaaccagctcagatagcaagatactcaacagtagcgatgattgaggtagagcgacgatagatcgacagactgcactctgcaaaaatcgtgagttgtttccagcccagctgattacataagcatgaaatttcattccttgccaaatccgttgacttcttattcgttcggacgactctttcttttttcctctggaagacacactgaagatcaaccacacaaccacgaacacacaagataaacaagaatggctcccgctcagctggctgccaactctctctccacgccttcgacctcagcaattgaggctgcttccactttggcctatcagcccattcagactccggccgaccaactttctgtaacgtatgatttggaagcaactatcgcccgactggcttcaatcgaaccgccagcaaagaacgtcgcgcttcagtttccggacgagctgttgatcgactcggttgagatcttcagagctatccaaaaaggtcttgatcaggctggcaagggtggaagagcttgggttttggcggatacgacctatggcaggtatgattgccctttccaatggcttttctacgtctcaagtatcttccgttgcgacgcccgagcaaggactgacggctatcctttcctttgtttcatcggatcctctctttctttgttgtattgcacccaagcgtagctgctgcatagactccctttctgctcttcacattcaagccgacttcctcatccactacggccacgcctgcctgactcgttgttcagatccatcactcgttgaccgaattcattatgtctttcctcgtcggtcactatcgatatccccttgtgtggacgagctactagaggtcggcagtgaagactcagagctcgacggcaagggtgtgctagtgatgtacgacgtcggttatcattgggcgctggcggagctaaagcaagaggtagaacgtcgatgggccaaaggcaaatttcgagaagtcatcttttcgtccattgagctcggaggacagaaccagggaaccgaaaacttcaagggaccgcttctgtcgggcatgaaacctttagaacaaaatctaccggtgatatcagacacatcctgtcgatcgaacgaccttgctgctgctgttcctccaacaagttatcagtcttcaacagcaggctgttgttcaacttccttcccagggaccgcatcaagtggttcgtgttgtggctcgacttcttccacaatcccttctccaaatactacctcctgttgttcctccaccactcctttggcatcttctccatccacatgttgtgcttccactaattcatccatgcccgacatatcacaaccggtgaaagaagaagcatcggcatcactacgatcgtacacactaccagaaggaaagaccgtaggagattatgtaattttctacatcggtcagggtgagagcgtaccaatgcgaaatttgttggtgactcattccaagaactatgtacgtttcgccttcagtcatgtgctctctgcctatctccctgatctaacaaagaaactaatcatcccaaccatctttctatcttggctgattcacaggtttactcctacacacctccttcaccggaggacctggattcgaattcagacatagtgcctaccaaacctgttctccagagttataagacctcgaaactactcatgcgtcggtatgcagtgatgcagaaagctagagacgccgatgtattcggactcttggttgggaatgtcaaccttagtacggatctatctcttttcgttctctttctgccagtctcatactgactcagttgtgatgactttacaactatagccaactcgctgccgcttctttcaaaacttcgtgcattgctaaaaaaggccgagaagaagatttacacgatttctgttggaaagctgaacccggcgaaactagcaaacttctcagagattgaatgtttcgtggtgatcgcttgtggagagaattcattggtcgattcaaaggtccgttgtccttctgttctagccttcgtttttgtttttgtttttgtttttgtttttgtttttttccttctttcttttttttttccctttcatttcctttctctccttgtttgagacaaaggcatacctgctctcggcctcccgctctctcctccccctaagctcgtcctgcccttcgttgagccttcgactcgatggaggatgaggacgccagcgcgaatctctcgatctgaacccccttagggacaaagagaaagggaccacgcttggttgtagcccagggggtatattcacccaggtctctcctctttctctttcccttccaggaaagagaaggagaagagatgaagtctattcagcccttttcttctcctgtagtggagaatggggtttacttttacttcgagattcctttccatcttttctctattcttcttgctttctcttgtctgagaaccgtcactttactttgttcttgagttgtagacccgttcgactgacagcttacttttcttcgcaactgatgaacaaaaccccccaatcggtcaaacaaaaaacaggacttctatcaaccgatcatcactccgttcgagctcgagctcgctatccaatttgacccagactggacaggggattatgtccttgatttcactcgtcttctcggtgctgattccgacccctcttcatccacttccgcttctaatggcaccggcgatgccgatgccgatgtgaatgaggaggaagatgaggaaagcgaaggaggagaagaatacgacaaggaagacccactttctcgacctgttttctctacgattacaggtacataccgacaacctaaacggttcggtaatcgcaccggtcaatcaacgacctctcaatcactgacagttcgatctcaagagtcgtccattgtttctgcccatgcccatgtatctaatccgagtgaacattttcaagcgagaacttgggtaggattggatcccagagtcgggctcgataaggtcagcgtgttagaggaaggaagagccggaagggcatggggttatgaggaggagaaagaaaaggagaagaggggggagctcggggcttgaacatggttgtatttgggaaatctttctggatgttgatcgaacagtcaaaactaccgtctcttccaaaatccacatctactttgaataaaagagcgaaatgcatgaacaactatgtcctatccaaactcctcaaagacaaatcttattatatgaatttgacaaatgaaaagggtaaagagaagaaagagatgttgaccgtcgggttcacaaaactttatagaatagagaatgaccaatgatcaagataggaaaagacaagaggttttggccctccctcgctccgcctcatcagctatcaagtaaagcgattgcctgttgatgtagaacctccaacacagtacccacgcattccaccgtacacaccagaccttcttccggcccaagcaccaccacaggcgcggccactgcttgaccttgcttatgaccttttggtctgatcaatcctttcgggtacctatcgaacgcagtcgatcgggcttgttccatcagatcaatcaaatttggtatcggcgtgaatctaggacgggtggttggttgatttgacggaggcggttgatggcttggctgaagcgcgttggaagaaagagtggatggacgagaagaatcttgaatcagatatcggcggtcttgacgattggggagcacggcgtaagtaaatccgtatctaaaaaacattttaatgtaaactcctttagttgatattacgcaaagagtacgcagcagatggagaaaaggaagagaattgagcaaggttgacacgcaccggacattgcctttttggtacaggaagcagaaagttgaaattgatcgaggccaaagcttgatctgaagacccggcttgggtgaagggacagagagaagtttatcgcttgtctccaagaagggaagtgtcgctcgaagaagctatcatcgagaacccagagacaggaacagtattagactaaaagatgcttgaaggcctacgctagacctcgaagatcaataagacgtacaaagaagcagtctgcaaaccggccagactcattcaagcgtcgctcgaagaaattcgttatattggcatgaggattctgtttcaccaagtgttttgtcgagggcaactcggatttgacatcggtggtagaaggtgtgggcccggaagagggaagcgtttcgaaggaaaggttgtaagatccttgcgataaactcggaggcagaccaaccttccatccaacagaaactgcaaggccctggaaggttcgatcaagaggggaaatgctatgagcttattgatgggcgggagcagataagaacaaagatatgcacgtacaggggcgtaaacgaaacgagcggtgtgtagatcgaaatgagtcatctgaaggtctggcatatttaaaagtttgactagagtcaaaacattatacgagcccgaacatcagctttgtacagaaacaacgcaaattggaaccgatgtactcaccctcatttgctatcgctgccagttttcctatcatactgaactcctcaatgaatgaatccacacaacgatcaatgtcctcggttacgatgtttactactgaacttatcgggtcgataaatacagtccccaatgaatgtagtttggtttgggtatcttgaggtaagcccagacgatggcgtaacttgaagctggtgataatctgtgattacagaagcataccacaaattagatggtttccccaaacagcacacaaaaaggcgggtctccagtccaaacatacggagaaccagataaaaaaacaggtgaataatggtgctgacctgggttttttcatctttccaccagttcgaaacttggaacgagacattcggcatcgccacctcagccgaagacaggttgcttcgcagaaggtcggatgcttgaacaacgatgataggaatgacggaatccgaagaaccagatttttcatctgctcgtctctttcctttacgggaaggcaggctagatgcatgcgatggtctagacgccaggtcgtacggtacatggcgagctttgagttgagattccactcgatggctagtcactcgtgcactacatagcagtagaatggtgtcaggttcgtgcacagacagaaaaggcagcagtcgaggatgagacttacatgcaatatcgatacagcctacgcaaatcctcaacatccacgttgaatctgtttaaacgagctcgcagaatcgagaatgatcagtgaaagaatatatgaatgtgcttcggaagatggaacgaacctggtcggctccacagtttgaagtcttccaggctgagaaccggttcttttcctctttccaagtatttcgctcgccggaaaatcattcgcagaatcgtctctcattcggcttactatattctcccgatcaaagaacccaatttggtcgacgaccatccatctctgcccaccttcgaccacagtccgaacggagacgagagcgaatcgaaaatcggctggagtcatgatcgtgacaaagtagtggttcaaagcgcatgggaggggcacatagatcaagaactgaacggcagttccaaacttgatgagctctgaggaaagatggaccagatggaaatggaagaacgaatgttaacctcatatgaaagagagaagctagaagaaagtcttacctccttgcttcagaggtaagtttcgcacaatcgcgaatcctaggtactgaagcttttgcgtcaacgtatctcggattgtcttttcaaaaacacatgcgtctatcaataccaacactaaactttcgacaggataccatcagcaagtatgaacaacgaaccgaaaacttaagcctcatcaagacatcatttaaagctgaaggagtcgggttctcgttcaacctagctgtcagttgctggagagttgactcgccggtggaggagatgacatcgtcactatctcttagattgattttcccagatcgaggatcgacaaatacgtgaatgaattgtttgccatggattctgacttgaagaattaacgatccaggatctaaaggacatgttacagacgaagattatgttagttgaccaaactaaaacgctcaagccactcggttattgagtcaagatttattgaaatcccttaccacgctcagccaaaacgatatccccgcccggaagatcaaagatcacactgttcatcgggtgatcaatcaccttcttatgaaaggctttgattagatggttcgcatgtgtcttcaacgagtccaacaacgttttctccaaatccaaatttgtcggatcaatcaacgcctccttcctactctccaacacacttgccaagtcgaccccaccgctccatttcttttccatctcccatgtcgtctttagaccgacgtccagaaccttgtcgctcactctggctgtgttccgtgcatcagagtttatagatggggatagagccgacttgacattcgtttctatctcgtttaggactctgttcattgttgagcgagcggcaagtgaagaggagacggtaggcgaaagcatgggtgtaagaactgaacttgaacgatgtggaggagatgatagagaggataaggaaattgtgagtgttccagcgatggaggtggtaatggttaggttggttgttgaagatggtactgccgtccttcgctgtcgactatagtattcaaaaagtcagcatccaagacgcaatcacatacgctaggatctcgttctattcattgggaacattagatccaagaagacagactcacggccaataagaaattttgaaagatcgccgatctttatccatctccatgttgaagcagtccacccagccaagagactgaattcgttgggcctgatgatacaggatctccagctgataagccaaactcaaagaatctatgtgaatgaggggccgaaagatatagtgtgacgtccattacacatcagtctcgatgcggaagttctcattccaccagagatacaggatatactcacgcaggagattaaacaccctaactaaaggcgcgtccaacactttctccgatttggtcgacccgttctccagtccactcgacaacacaacttttgcctctgaccctcctgacccatcaaatgctgaactggtaggtgccggagaattcagtccattggatagttctgatggaacgaatggacctccagatatgtcgacagatgaggtaagcaaagtagatgggccggaagagggaagggagtcgggagatggctgaagttggagtatagcagtccgacgaatttcttcgaatgttggcttgccagggtttgttgggaacactgtgggaaagaaaagttatgttcaacacagacgattctattgcaatctctacatctctgatctctgatctctcccctatctgtggctttgattgatgcgttgtcagatgccaaatgtgaaggaatgaagggaccaacattttttgacatcttccgctgaatccctccctccaacaccaaaggaaaactccaagtctagagggtaccactctcccccgttctttccaagctcattttttataaatcgctgctcatccgagtcaatctcgagcgggagctgagcgcctaatagacaaaaagatgcttgaaaagatcctggacacgtaaagtagaccctcccgtccgctgttacaattgcccatagaaacgcgtgttaagtctgtcatgattggggacggctacatggctagagcaaagtcaacacacctattcggtagtttttcatttgaataggaacaacctctatggccttgagccggtaagcgatcagctcgttcagatctgtcagaaccgtccgtatggtagccttcgataacggaggttctggctcaaagtccaactgccggaagagtacagcgtacatccgacgtttatctacagttgagcataattctactgttctcaagtaaataataggacatgtatacaaacctgataccgcttcggcaatcttcgatatgtgccagtggacaaaacatccaatgccgtcaaagtgtccggatttcttaacctgctcgtcaggtacatacacaatgagtaagatgagtgttcaaaacattttgaccgggaaaaaaggtatttagttccatatcagtaggttgtgcttcatcattcagctttcatgatcagacaggagcgaatcagacctcgttgttcccaagccagatttcactgcggagagttgcgagatagattgatcgaattcgttattctggcggttgaggaaaccgatcacgttctatcggaatgaatgttggtcccaaattcatgaagaccaaatttagtttgtcaacagcttttcattcgtatataaggtccagcgccttattgaccatgtgcggccggcatgaactctggaagtctgacgatcaacacaatgagataaaacgaaactcaccaagcatttcgcgacaacctcagactcttgactccacctgacgagggctaacagtttgacgatctgccttctggcatacagtgcaaactggaaaatttctcccgccctcgcaccgtcatgaagtgatggaaggacctctccaagttccatcatccgcttgtacacatccttgacgaccgcatctaccacctcggccatagggaccaaatctgcagccgtgacgtccggcaactcactttccaaggtccgtcgatatgctagaagatcatcatcagcgagtgtgctcgacacgggtggcgatcgtgatggatgagatataggtatagggatgggtgaatggaaggacaagttgttggccgaaagtttggatgaggactccatgagcggcggagatgggtaaccgctatcggtcggcgagggcttgacagccgatgcgttccggttggcgagagggatggccgagctggcggtaggagtaggaagatgatgggtgtcgatgacttgtgggtggttagagtgactatatgattgagctgccgacgacatccgagaagaaggccaggttgtcgcttcctgtttgacagccggacgggaaacaagagaaggaagattggttccttcttgattgatgtgacgtttttgttttctctgcgtgttaactgatacaagtacttgtcgatggatcgatggttctaccgagaatgggagaaaagaacggagacagatataatgaagctgagaagaaaaggattgagtgtagacgggaccgctagagggaggatgagatggaaaaagagtctgacgctgtagggatggaggggcctggatttggcgagaggccgactagacggtcctgattgacgacgatataaatggttcgtcaggagaagactagtgaaagtttctccttggaagtctgaagagattcctgaagaatgtggtatctagatcaaagacaagaaacaacagaacgacaacaaagaacaacagagagagaagaaggggaacagggattcgggtggtgggtcggggtgaacagatcggagggtctaagaagctgaaggttaaaggtgacgattttggaaaagagaggaaaactacaaatatttcgtagtctttagactacagaagtttttcgttttcctaatgaattttctactagctgtgagcttttcttttagtctatcgacatccatccatcctgttctgccatccatacctcgtcctcgttcccatcatcactatggcatcggcaacagagatcaaggccttcatcggaatcctccaggaggctgtcacgtccaaggatgttgcggtgcgttctacgtaaccgagtggctgcttatcatctgcattgtgcaagaccatgaggtgttctacacttggaaacttccgacgatccttctctatgtttgctcattcttttcgttgctttctgccttaacggttcaatccaacagaaagcagttgaacagctcgaaatcatcaaggataaagtcattccgacagaggagcttctccgagtacgttcatcctttatctgtatatcactcttcgcgactgaccaggcttgggctttcatgctcaccaatatcctctttctatttccttcgcgtcattcttcttctttctggctctatcaaaacctcttaggaaacaaaagcaggtgtagccgttggaaaactacgaagtcacgcgtccccgtaagctcgttattctcgtttgcgagctgcaagaaacgcgtcggtcgcgtgcctctgcctttgtctcgaccgctatccatttgtcacttacattctgctctgctcaactcttcttgacagagaaatccaaactatcgccaagtcgatagtcaaagtatggaaggacgcggtcgatgagggaaagaagaggaaagcagccgcctcgggagcaggagacgaacctgcttcatcttctcaggcgaaaaagaaggcaaagggcgagaagggcagtgcacctggtcggttcccttcgcttctcactctcatcagtatatcagtttggcgctctgatgtaaatgtcctcttcctgtactatcggtactctggtgcactcagtctctactcccacctctccctccagcacgaattccaacacaaaatcgacatcaagtcaagccggcaattcgaaaaccaattcatctcgtccgattgcccctcttccctccaaaggcacttcttcctccacatcttcctcatccgcatatggcccatcccatccgtcgctgccaactattgtctcaccctacccggaaactccaagaacttttaaagcggacaaacctaattcacccggtttgggaaacgatgtcagagatcgatgcgtagagctcgtgtacgatgctctagcgggagacagcaatgtttgtaagtttgattttccggcacaaggatattcctgctcactcaaagaagagatagtatacaagattgatcatcatggatctctaccgtttgtgcggcgcgtattcagccaaggaagtgcttctggagaaatccaaggctgtcgagaaaggcttctaccaggcttgctcgacaaaaaccgataacacgtatcgttccagttcgtaaacgtttcatcgtgccccatctccagagcaactgaatgtctgacaatgaaaacgcgcttcttgttcacttagaaatgaggggaatttgcttgaatctgaaggaaaggtcgaacccagatctgagagatgctgtggttcgaggcgagatcgaggcttctaaactcgctactatgtccaaagaggtgtgtcactgtgttctgttctggccgggtaatcagcttttctcatttgtatctatttatttgtttctgttcgtttgtaggacatggcttcatcaacccttcaggctcttaacaagaaattggaaaccgagaatctgttcaattctagaggagcagaagaaattaaggtacgttcttcttaaactccaacctcttttatttctcaattttgtatggttgacgtgagtttcattctttgttgtctcttttactcgttctctccgtcatattcttgtatcgatcaattgaacaggccgagacggatcagttcaagtgcggaaagtgccacatgcgcaagacgacgtattatcagatgcagacccgaagtgcagatgagccgatgactgttcgtctttctctttcttttgctcgaagagatagattctttgtacctgatgcttcaaggttttggtttttcttgtcatacccagactttcgtaacgttcgtttcttccttcttttcgttttttttttcttcttaaagactgaccttgtttacatgcatgccattatgtaccgcttcatagatgtctgaactgcaacaacagatggaaggtatgtcgcttatgcgtatctttctttccgttctcgacatgtctgaataacaaagttttggttattccatcatcatcagttctcataagcgccggtatcccgtatagaatgtgtttctttggttgtcctcaaagactatccgtcatatcgttctgtcgtttgctttttcctctacgtatctctgctatcgccattctcttcctgttgctcttactctcctcccttcttttcgcttcaaatgttttgctttcttctgaaatgtattgtggatgtatgatgatgcggaaatccccaacaacgttttggaccgagctctgtaaccctaacgacacaagttccctttgacgatctcccacgttattgcagcagcaacaacaacactatcaccagaggcagcatcatcactgctagcttacacatccttttgttcccacctcttggctgtgtttcctcgtcccaatcgagctgggtcaagagtgtcatgaacgactccatcgtcgacggctcgaagaaaaatagttctaagagcagatctctgcccgtcaaagcacgagacagcctgcacaatcttctcgatagggagcactctgtgagccctgctaggcgaatccttcccttcaacagggagactgttcggcagatatcttctatccggccgttcttcgacgattcttcaacgtcttcacccaaaaattctgccgaatgtgatactgagggtcgggaggcgtcgacctcatcgccaactggaattggacgtcccgagtcaactggtctttcgggatcttctacaaaggagatacttcacctcggccaagcaatagcatcaacatctactgcgccatcaacgaacatcgatcaaccaaacattgccagacctggttcttgcaagataccatcagctcctgtgcctacgcccgtgccaacgaggaagaacagtcgaacgttcttctctttcaaaaaggaatcggttccgcccctgctgagttcttttagaacgccggccaatctgttctcaaatatggactcgaagaacaaggaacgccaacagcaggctcatacccgacaggaaggattgaacgcttccaggagaagagatagaccgtctaataagtctgtagatatctcgtcgttctcattcccccaggggtgggacgaaacaccaggtagaggtggtatcgatcagagaaagggcaaggaggtcgaacatgcaaaaggagaagaagttttgtcggtcgatggagcggacaaaatggaggagattggaaaaccgtttgatgtttgtcatgttagttttgattccaaatgttccgctacctggcgagtgccttctagtcgtgcaagttggtattgatcttactcttcttgaattgttaggctttgcatgtagagtctgacgatctagccgttctaccgttagaatgggtggacgccttaaaggtatgttatagtcccaatctcctcacgctttcttctgtctcttgcttttctctattttacaaatcaagagtatgcgcaaaatgccaatctcaacattttctgttttgattttcggacattaggcccaaggctcaactcctgccgagatcctccagttagcagtctccaagtcaaaatctcatatacttcgtcaaaattcaatcaatctgccaattcctatccgccctaaatctccaccttcgccgcctcttcctcctccttcaccccttccgccccttcctcatcgacctgtttctccatctggacgacattctcgatcaaattctctcgctccagcgcgctcttggatccccttgtcaggtggaaggacggagaacataagatcgagattggcgaaacgaatgaccaaatcaaattccttactctttggaagttctttactcggaggtccgagagccagttcggacttaccagcatctccctcagaaactgcgctgaactcatcgactccgtctgcatctccagacgtcactcccatcaagataacctctcccattgttgtttctcgaaaatcatgtgtactcttatctccctcttttgtttcttcgccgacgccgtcatcggcacctcctctatcgtctcctcaatctcctccaaaacgcctctcgcctcatatgagaatgtcgagtatatcatcgatgagccctcgactctcgcttgatttcgacgtcggttcatttcaagtccccatacctccgtcaagtacagaatattcgaccaatgaatctgccccggataaaaacaatattccactagaccctcaagatgatttaagcgagagatcggcattccttgtggcttctcaccaacttcgctcatccttcttatctttctcctcctcaatatccggttcattttcctcggaatcgtctcctccatctgtccatctatctactccaggtcagactcgttcgacagcggcgagtccatctgttcagacatccactccttcggtcttttaccagacggatacatcaggttggcctcaacctgggtttgccgacgtgagaggattgtcgaaagtaactttggcagagtccgattctgcagtaggttgggaagaacgatgggaccagggtagaagaggagagaagagagccgacgttgaggtcgatgaggagatcgatagtgctgacgatgaagaaggtcgtacagaaaattctcatttgccgagccgacaagatggcaacagtcgtctagaacaaggcgatctgttcatgtttggaaggagcttcagcaaaactcaaggaccttaccaagctgaccgctcagatgactccacacccattcgatcaggacgacctctatctctagcacctagtcaatctaagagcaagcgatcatctacccagacgtcttactcgaagcactcttcttcttactcaatcagctcggctggttcatctcaggaggcagtaatctctaaagcgattcttgtcaggaatacatttttggtctcggacgtgactgtatcaaattcttcaagcgcctgatctaggagaatttttattctttttacctcatttgacgttcatgatattggatatctccttcttctttacacctttctcaacatcgtttccacagataccaccgattccccacatctgcatatatagccctatcatacttgatttcccctttcaaatcaaaccgtagcatatcttcatctctctttcgcatcaaattttgatacacatcacgatcgcactagtcaatttggtctataacagtctaacaccacacgtcataactttcttgcttccattcatatagcatagtaaatacactctctttcacttttttttttcacgaacaattaaaagaatttacaataacaacagaaagatgaataatgaagatacaacacaaaaactgataggtaatacaaagagacaggggagaagaaaagaagagggagtaaaaaattatatgaggagaaaaaacgattcagactcgctgagattccggcatacccaggtacgaatccctgactcctcctgtgtcaatcacgatcttttccagaacgagcgcgggctcgatcccccaaactaaggaaatagagacgatagccaaaagcacgaattagtccaaacagcttatattcatatgagtgtacgtgaaaaagcagaacgtactagaaagcgtgtgggctccagcggagcttatgggtacatcagaccagtcaggaggatcggcaccatctgtcgctccgtaaggaacaggctgaacaacttgggccgggtcgtcatcaatctgaatagcatacttgataggtctgtcgggcaaaaagttgaaagacatccccatataaaggttgaccgtcacattcccggacgattggttgttgaaattataaaagtcatatctttgtgttacagtgtagagaacaacgaaagtaagaacgaaggatcatctcagaatcaacgtcgtgatatgatacatactcgactcttggaccttcaccggcagtgaaatttgtggaagtcactgggaacatagtgactcctccggagagagaacgagagctataccctgggataatctcccatgatgtcccattgattgagctattccgagacatatgagcggcctccatcgagactcctccgtctgcttcgacaaatccggtaaagtcactagggacgtcttctttgacgacagtagcgtaaatagtgtaagtttgcgcgatgccggctggtagaaagctggggtcgctcgtggttgagttaattgataactattgaacaaccaaagtttatctccgtcagcgaagtatctcaaccaagaagaacgcgccaagaatagcttacagccacaatgctggaaccttcagggacttggctccagtccggaactgtcaattcgattctctgctgccaggttgattcatcactagcgagaactgagttgccggttgtagatagttcaacgaacgtcacatttggtgcaacgacaaatgtgtatttggtcactcccgaaccctgtccaacttcgaaatatcgagatttgggcccatattgagtgagagtgggtagcataggaggcggacagttgtatccaattgcgcattctgataaaagagagaatagatctcgaatttagatacttgcttggtaacgccatggtaagaattcgatccttacgattagaattatctcctggccaagcacctttggatccctgtgtgatagaaacaaatgaagagcacaccgtcagcaaacatgttggtcagataagagagtttcaaagagatttactttcctcgatagtgagtctcattgctcctggcaaagccgtctcagacccttggacccaagtgatgctaggtatcgaattgatcattggttattgccagtagtaggagcccaagtgagtttggtcctgtcgaacaagaaagtggtgaaagtgatgagaatgagaagacttcatcagcttgaaaatgccttcaaatatcaccatcatatgatcccattttccatttgagaccgaatggtactcctagacgaaggaaaaaaagggtaaattcgagattagatgatcgtatgtgaatgtggtgactgaaacgaaactcactctggtgatcgccgcatcctcacggaacaaattgagcacatcttgggccttggtgttggttgacatgtgggcttgggtggcgcgcagataattctctccagctcggatattgctacagaagcgaaaacagatcaaggcaatgctggtaagtcatatgttcgatcttctaaaccggcctggataactatataaacctacaggagagtgacagtataaattgctcggcatgggtggagaacaagctggaaaaaagaggatcttttttcatcaggcaacccgttatagatctcccaggcgtcgtcagtgacgttcttccattcctcaatcaccctctcagccctatttatggttgtggtagagtggaaaaggatgaatgtaagtatatgctcaactagattcgcatatcgtttggataaaaacaactgactctcgatagtctagatatatcaacaatataatcctgtagttagtgccatgccaatggaaagatatgtagatttcatacactccatagacaagaggacataccggtaagcgagtatgtatcaggctctgtcaattcaggcttctgcctggagacgtaaagcgtgtacctcgaaacgacgctggcagttgcagcagccacatctttaccaaactctctggtggcccaaagttcgacgtactcgttaagattatctttattccatcgggtggtatcatacgagtagtcgaaccaaaaactcattgggagctgcggaaaacattgacgatgttacggcaaaagacactctgagtgagagaaaaggtgaatgaaagtcgacaaacctccataggtttcaaatctccgacgttaacgatccataatctgtttgctccgtgtgatatggtcaggtgtaattgctcccagatctgatttaacaagagtttataagaatacgatagcgcaatcacagtccatgcttctaggaagaaaccaaatactgactttgggaatagagttggtgttgatccacttgtagtttctggggtcatcgatcaccatatcgaagtggtagtacaatcccgaccctcctagcctcttcttttcatcatcggtaggaagctatcatcacaatgtacaataatgttggttagcgaaagtgttgaccaacaaacggagaaggaggaaaagacgctcttacccttcgaacatttccaaaattatcatcagtccaaagtaaggtaatctcttcaggagcctgaagaccttgctcccagtatgactgaacctctttgaacaagcaccatactctggaaattcaagagaacagtcgaaggaagccgtgtatcttagcaaatgtctagtgcaatatagagttttaagagcttgaaggatattactgaggtatctcttggcttgacttcccggtgacgttggtcagaatacgttgttgattggcgacgatattttcgacaagagggatgttggccccaggaagaggaagatctccattacctcgcatccctacacgcgcaacataaagttcagcgctatcgccaacacaacttgagtacatgatcaagtaatataaacttgccaactgtatacaaagtctcatagttcttcgatcgttcaactccttccgtccaaaaattctggtttcaacacaaaaaaaatatcacttcagtataaactgatcacctgctggaggtaatcacgcctagaggagcaacctacgtccaaaaaatccttgtttgaagtataattccaatctccctttccaaagttggtccattctggtgtgtttctggccatcggctcctgatgacttgtcccgtactgaatagtttcaaattataataatcgagtgagtgaaactctacgtgaaatgatcgatgtggaaggagaagtgattacaatgactccgtattcatcggccagaagctgatttaaaggatcatcctgtgatataatgtacgtgaaccattccgcaggttgtcagaagtggaccatgaagcgttgtgaagaaaataattgttggtttacaagagcgaacatagcagaccacatcgcgggccagaacatgtttcctttcaagcgaagaatgagctcatagacactctcatagaactttgtgcatcagatatagaagatagaaggatttgagttctgtttatgatcctgatacataacgctcttggttgaagaagcacttacttcatgcttgaaaacagccgtatcattgttaccgtaatatattttggcccagttggtcagcgcaggttgatcatcattcaagaagaatcctgatcaaacagtcggccgaaaagttctcaagcaaggattagtcttttaaatcgagatagttcacaaggaaagtataagctgatgtatatacctcggtacttgacactaggttcaccatggccataaccgtctgacgaggaaaagtagacttcttcttgagaaggagtagccacatcagcccaccagttccaagaagaaacccccatctgctcggacagatcatataacccgaagatcgttccccgtttacttgaggtttggatgaaacacacaggcaagaggaattcccgtgaatacgtgacggcgatctccgaagcctgcatttacaaacttactcgtttccaacgatgaccaacgcttggtctactgcatccatcggagagtccactattaccattttaaaggcttcccaaataccgtcgatgtcggacacgttcacctttccgttgtctatcaacatctttatcaagctagattgctccaggctacctatgatgaccgcccgactgtactcggatgtgttggcctctagagagaagtcgtctttgatgagctgtggcgtttgtccggtaactttgaacaggtcggaagcgaatgtgctggaagctcggtggacgccgacataatcatcagaagaaacgagaagaactgtcgcctgggaagaagtgacaagtggaaaagtatccgaagtagactcgaaagaaatcacctgtctttggccaattgagagagcaagctgggcgaggaacgtcaaagaggccagcagttgtatcactgataagtgcaacatgttgaacctgtcgttgtcacaatattatattgccgggtaaagaagagacagcgcttcttcaagcagaatagctgccttttaaagtcttcgtcttataaattccagcgctgatgatgggtattgtggaaatgaaaggccaagagtgagatttcgtgtcggagggacaaatccaccgatgagcatctcgtaaaggtcatcagtcggaattcacggaaaaaaaggatctaaaatccgtccatatacgaccaagaaagaaggtggcagggagatcacagaacctcaattgccatggcgtctgagcagtgataacggcgaccgtggactcgatcaatgtgctcctcggacgaggtcagggaagaactttccggatgttcgggccgatagaacgggcgaaagatttctccgaaaaaactcctaggctgatataggaagggtatcaagatgagaaaatgcaactgtataattacaccctaaaggattcgggtgtgatcgaattgatgactgcgatatctttcttgagcttcagaagatgtgaatgaggattagaccgtcatgtttgattgatcacaataaaaggggtagaaagagggttcacatcacatgcaaagcgatcaaacatacaaaggagtaagaggcaaccgtttacacagactgaatttaaacattaaacgattggactccggatgtatagtcgcaagagtgatcatacaaacccaacgaaagagcctgttatatcggcacatccatcactctttccgactgagaaaattctccgcgcctgtcttcaccgcctttacagaatctaacaaacatttgcccattccagcctgaccctccccgggggttaatacgacaagccctttaccgccctgccctactggatctgtccattctgtgcttggctcctcgtgttcgacattctttgcggcaggcgacgggtgatcagtcgatgctgtgttaaatattgactgatgcgctagaacataagccgggtagacaatctggtcgaagctggagacaccatatacacattaagtacgcgttatacacatgacaagggaaaacattagtatgatccagtgttgaggcttgaatatatattgtaagactaagaacgcaactaattcgggggatcttgccagacttctccggctgcggcagcggattgagctcaatgacagccattaaagtcagttttcgagtccagacaaatatttcatgctcggagaatagagcgagcctagagctgagatacatacattgagttacgtatgtacttcgagcttctcttctagacttcaaggtagcgtaaggaactcgaaggaatattcgcacgtctagtttcgagagcacatcctagttacgaagcgcaagagcatgagatgtgattagtgatcgtccgaggatgaacaagacaagcgacaggatttctgtgaagacaaacctcatcccaatagacaacgaacccatctagaattccccatacgatctctactccctcctttcttgacttctgttcaatcccattgatcaaatctttcacttcgttttttacgtcctctccgacagacacaccttcgagggtgttcagatgatcgtgtgtctgatggtcgtccggaagctgacccgtctgtttaaaatacgctagtgacgagcggagaagaggccagtctattgccgtggctggagagtcccaatcttgaacgtccgggtagagaggagaatatggaatcaagtgttgtgcctaagtgataggttgttcgaagaagcattggtcagcagtgttggaaaaagagaattgatagataacgaaatggacgaaaccggagcaaagtcgtctaggtgaatgatggttgagttcttgatcagtcgatgtagatacttggccaatgtcgtctttccagagttgcttgcccctctatgtttgaccgggaatgagaagagtatcgacaagaggaaaagatcaggtcagaagagatgtgtacactcagaagaccaacagattacgcacccgactccaattaatagcacccgtttcttgagagtaatttcgaccggattactcattgaaatataagacgagtctattctatgagtacgcttgtatctatattatgggtgcgtgtgtaacgaagagtttcttgtagaactagctggcagacaagacgataggaggagagaagtctgaagagaagattgaagatgttgtactggaaaaacaagcggagacgagcgaaggaaagcgtcgcttacataagccgaccatctccgcatacacacctcgtttgcatcgttttcagccatcctatctcttctcctctctatcaccatcagcatcatcatgtccgcccctcagacagtgtcaaaacctacaggacctccttcggattcggaagctgttggatccgatgccgactctgattcctcgtcgtctgtcgattctcaggaggaagaagaccggttggccaaggaagagtgggacagacttgtgtctcaaacgcagctacttataggtttggccgtgccattcatggccgcctactggggccgaagagcaggattcaagagtacgttttttcttttttgttgaagatttatcttgggtgtgctttattcgacaacgtacgatcactatgagttggtcaggtgaaggaaatacaccgctagctcgagatcacagcgattccgagagtttaccctgtccaatgaaaagatggtaattgagaataaaggagcttcgtcaggagtttcatacaagatcaatctatgaacgccaagaagagcactcctcgacctgcagagaaatcaagatagagtcgaagatggacatcgtccatcatatcctgacgaggaaaagagaaaaatcacgcgagtatatctcggcttcacgtcctccacgatttttcaatatcgcgtcatactcttgtctgaagtctacgcatcgaccaaatggacgattatcgagcctagcacttactttctttgaatctttcggtttacagttgttcatcgatatattgctctaggtttcacgaaagcattttggtttgggtggacgggcttactaggaagatgatatagttaagattgtacaaaaacagccttctgggcttcttttatttcgtcggctttggctgttgttctacacagctcttcgcctcttgttctcatgtcggaaggagcaaagatgttgcgtttctcattccttgaatacatccatatctaagacgaagcagtaagaaagaggtagcgagtcaaaacatcgaaagtagacagagaagagggagaggggtaggagacgtaaggcaacatcgagaaaaagctaaaactagatgacgaagaaacgctcaagaaatccagaagaaaggggagacgcaatcaatgggagaaaagcgctaagataaagaacttttgtgttgaaatgtgtaacatgaaactgatctaatacagagcgttgccagaccttgatcagatagggggcagaaagggtggactaccaagaagggagggaacaagtccaggtgggaagggaataggtagctagctacgatatacaaagaagcggaattcggggatgtctaaagaaatcttccgagatcggacgggccagccacaaaatagaactaatgaaacaagtcgtcgacgacaacacaggaagaaacgaaaccaaataaaggtcaaaagaaacaaatcgaggaaggagtatgcgttgagaggctctcaaagcctctcttccagagggcattgagcggtcatcttgctctccttctctgctttcaccatctctctacccatcctggcctgctctctctctaatattctcctcgcctcctcctcaacaacaccttcgccctcacctagcctgccgaccaaacctttgacaacttcggcctccatgcatcccaactcaaccttcttctcagcgcctgacgagccggcgacggccacccgacgtttcttcgagggtgaaagcgggatgaactgcacgagcgaactgtcggccaagtttgtgagcagggtaagaaagtccaaagggctcacgggcttgatgggagagtctttcgaggaaagcaaatgtttgtacgtcgagtgaagtgatgaggttgtagtgatctctagaccagcggacgaggagggagatgatgcggaagaggtcttcgtagcaggcatagatcggacggaaagtggaggaaggttgtacgagcttcgacgagagtgaacgagaagcgcgacgagaatcaatctggactggaggttgagcgcctgaatcttggatactgttagggatgacgttggctttgccttcgtcggcgtagtagggagattcgagagactatatcctagagctgaagtggtaggagaggatgagggcggagaaagagtcggggcaaagagtcgacttgcagacaatccagaggaagacaccatcgacttggccttgttgagagctttcaacacgtgaggcatgcctgctcttggagccgacttcgcatcgagagagctcaacattgcgttcacgacctgacttgccgaactgtccgtcgttgactttccgtccgacagatcgctaccgccgatgatagtcaacgtgcttgtcgagacatctagaccagccttgagaagagctttccttttctgctcaacctcgacaaactcgatgctgattcggcagatgtccaagcacattcggagatctccgttctccgcctgaacctttcgagcggcaagctcgatagccttatcgtccatcaacggcgtaatgacactatcgtccatctgctcgacgagcggaagaagtgttcgaagtcgggaacgaacgatagcggaaaggtcctgattgccatatgcagtgaaggagagaagacttggctgttggtccatcttggaaaggtatcgagtggcgaagtcgagggagttggcaatggtgatgattcggaggttaggaacacggcagggaagagaaaagatcgtctcaagaagaacaagggtgggtccagttggggcttgagtagagcattggagggagatcaatgagtctagctcatcgagtacgaggaggctaaggagcccaaataagaacgcgtaaggcggattccagaattaggacttgtttcttctcaatatgatgaatggacagttacgtacaaggtagactctgaacgatccgtcaactctttgatcaacaagtccttggcgtctccaacccttgaacccagttcaataccgagcgctttcgcagacttctgccatatgtttcctcctccaccaacgcagttcacgaacccgacctgccatccttttgcctgatccttcagtctgttagcaaccgaggtaaccaaagcagtcttgcccgttccgggttgtccggcaatatacattgttctgggcgagctctccgatgaggacgaaaggaaagattgaactgatcggcgctcgctatcacgcccgatcagtgtagaggaggtagaggtggatgcgtgggaggaacatcgaagaagggaacgagcaagagaaaagatagatggtaggggcgccgccttgtaaggggttgttttagaaggagttcggggaggggttgatgagcgagaagatgatgtagaaggctgttcggagaaagataatgttgatttggctgaaaaacgaagagcataaggcgaacggttagattgggtagattatcggtcaacattcgcgcgtcaaccaggaaagaagagtttgactgacaaatgttggctttgactgatgtcatctttcctctggagcgaggagtggcgacaagctcgtcaactgaatcgcacgtctttctcttctttgatgcgctcagaggtgggagctccattaccagcaactcatcatcagagccttcctcgtcaacagatatcattcttcgaagtccggccttttgggcggatatgctcttggttgaagctttctcggagcaactaaccggttgtattttagagggagtctgaggtagtttggatgtattgtatgaggtagaggtggaagctgtacgggcagacgacctggtcactcgagaaggggtagaggggatgataatagaggtcatagtgagggaggataagaaaggagttttaagcttcggggaatgaatagaggtgggttcgagcgtagaggaggagcaagggtttagaggagggggggtaacactgaggatgataaaaggagaaaaagaaaagaaaataaagagaggaacggagaagtgatagaggagggtggaaggtaggaagaaggtgaagcggaaagagtagcaaagaaacttacaagaaagcaagcaaaggggagggtagaatgatgctgacgcgtcttgttctgacgcgtatgttggaaggtagttcaacatgacgcgtctgtcatcaggctgagcgcagtctccatccaaggccgacatggatcccgtcccaggctgaggatcatatattgagggtcagctcctgggacttcaaatcgtgggctctgactctgctccggcggtctccagtgcggacgttctttttttcgccgtaaagtcctttggccatcaccattaccactccctccatcttttgatcagaacatacgacgacagtgctctcttcggttcacacatcctactcctcttgagcattgcccttggaatattagatcgttttgagcgttcgtcatggccgatcacgttgcttcttccgccttgtaaatctcttgattctctccaacttgtcaccttttttttcttccttctattcattgacgtttgcattctactttactcgatcccgttccttcagcacaaagatctttcgtcgctccaagtttgcctcgtaccaatcatcgataggacaggtgtacacttctccccgagcctccctcgttcgaggcgattggggtatcaagcataccgtttcttccaaatctcgaagcaacaataactcccgtgcaaggatccgtttcttgactattcctgaggttgattctgagcttgggttgcctgtctggaagattgcggacaaaagtgctcgatttgttagacagtggggaggtgaaggaatgccggccaggattgtctctggagaaaagtcaacctcgtgggtgacttacggagggagtgtaaaagaaccgtggaaggagcaaggaaacaggatcggagccgctcaggagtttgcaactctacaagaaacatcagcatatgggccaaacgaaaactttaccaaagacgatggtgataagatcttccgtgcgcccgacgtcgagctcatgactcaggatcagttccagacgtatctacaggacgtcaagagacttcagccagcctaccgaacccacctccacaagacaatgcttgctaactttgagcgatctcaggaagcctcgtcggccccgtcaaagatcaagaagaccgatcgggaataccatctacaggagcttgctctgtccaagaacatcaacccggtggcacagtcgaccgagttcctcaaccagcactacagagagcagcgttctcgagcctctagccgagacatcgcctcattcagacatcctaccgcaggtttacagtactctctacccactaagagtgctatggccacaatcaagccggtgactggataccactttgctggtggtaagaccggtacgaattacgttgccgttggtggtctgattaccaatactacgtcggatagccaaggagctggagcaatgagctctgtcgacctcggcatgagtgccaatggagaatggattgagggtgagcgtgacaacactcgagggcgacaccgtgttcgaattgccagcgctcagattgtagagcctcctcgagtggtggataatccgttgagcccgcctcctgctctcgaaaactcgtccgtcaacaatggacctagattcaaattcaatgcccccaacccgctctttgtcgatgtcaagtctgccaacccgccggtcgggaattaccacggaaacatcatctcgtcgaggcgaagttctcttcaggcggcagaaaatgaggatatcgtcttgggaagcagaagctgggttggtttgcctagacaggtgaagacaccgagaggatcgaaggacagtctgagcaggcgggcatctagcccgacagtcagcctacaaaagaacaggccagcgaacagggcgtttatgtcgcgattaggaaaggagtaattgaatcaaaatgaggtctttttctagtgtgctgattccttttcttgggagagtttcatatcgttcttgggactacgaggaaagaagcactgaaaaatcaaggaaaagaacgatagcagtgaaccaaatatctcgtgtcgcttggtactatcagtaaaaggagttgaaagagtcgacctatctgtttcatcgacgatctgcctgcttaggttgcagatgcaacgaacaaaattatcacgacgtaatcctcggactttttagtataatctactcctgattgaccaaaatcaagtgacagtaagatggccaaaggggagttgatcaagagatccctttgatacatggttttttgaacaaaacttcatttgtctgttttttctttttcggctttcgttttgacctttatggtaaaatctcgcgtgtttcaatatcaggcatctgaacaagtgacttgtattttatatgagcaaacaagaagattcattacgacttgaaagtcttaagaggatcctttttctttcgagcacctgcgctcgctccactccctggtcctgccatacctctacctctacttccacctcggccaccccttccacctcgtccacctcgaccacctcggcctctggatccaaccttgctaaatggcacgttcaagtccattccagtagacgtagtcgatccaccagcttcgacggcggcactagtaggatctccattgccagatgaggggccagcgattgcggttatacggggcatgaggtaagatggaacatgtttcatgtgagactggactctggtcggatgaagtggggcatcatgtcggaggtaggatagatcgttcgggttcatagcaaagtgggcctgttcagaaaaggaagagagaaggattgcgagatgcaaaagatcagaacaaggccaaaaacaatgacggacagagtgacacaatttgaaggatggataggtcaaagcttaccttgagtttctcagaattcaagagctctcttctaacttcctcccttctggcctccttgactgccttcctagtcacactccttaaagcatcctccattctgtacctgaaaccttcgacctcacccttccttcctccccagtcccactcctttatccctcctttaccaagagcagcctcagccttgatgcgctcaaacaccttctcatccctcttggctccttccaggctcaaaatcttgtcttttccccattcatcagcgggaacgacgaaagagattgccaaaccagattggtgggctcgagcagttcgaccgactcgatgagtataagatcgcgttgtcgtcggtagatcgaagttcaagacgcaagaaaccgagatgaagtcgatacctcg

SEQ ID NO: 971 - DNA, 1911 bp, Xanthophyllomyces dendrorhous
ctcgggacacgccgaactccttgtcggctcgcttggacttccctgaagaagatttagaacgcttggaaggttgggacggcgcggcgcttggagagagagctcgttttgtagaagtggagggaccagcagcatcagcctcagtgattgccttcccatcctcatcattcccccgagaagtggagatgactgtaaattgtagatagaagagttttatgtatgatgagtaaacgcgacaagtgacagatgaactgatgggaagggcgtacactgcggagttacgtcctcctcttccccctccccctcctcctcttcctcttcctcttcttcgtcctcttcatcctctgattgatcatccgctccgagttctccttcatcggtagcgatgatgtaatcgtagacacccttattgaactcctgcacaatatggaacctgtcaattcaacagcggtatcacaaaattttagttcctcatctcgagattcaacccactcaaattacacgacaatcgcttacctggagtttaaaggcaactcagaattcaatacacaagccttgacaccaaactgctccaagaagagcttgagtcggtaacaccggtcgacctcgttcacgaataagatgcatttccctttgatgagcttaagcttgaggagcacataagccaacaagaatttgtcggtctcggacgtcttgacatagtactgcgtcagcgacgatgaggccgcagtcggatcctcctctaatcgaaggatagcctgttgaagaaagtgagtatgcttagcgcattgtcatctacaacagtaaactgggagaggcaacgaacagggtttcgaaggaccattcctttcaagagttcgacatcttttgtcaaagttgcactcatcaagaaagactggtacaccttgggcacatatcctccagagaagatctgctttacatcatcagagtgaccataggacaggatgagatcggcttcgtcgattgtcaacgtctccaaagaagatagagaaagcgcctggaaagaggaaggaagaacgcggctgatgagctattgggatataactaaaacaatgagcgtgctgtgtgtaaacgtactttggactgaagcaagataagagctcgggagggggtggatacaatgatatcaggtcggtcggaaagtaagattctgttgcccgtcagaaaaaataaccagcataacacaacataggtcagcctgggctgaatgctcaagataagcatgacgattccagacgcaccgttgaagctgggtactggctccgcccactacgttcgcaaccaagacctccttttcacagtaagagatcaaacctttaagatggttggtgacctgctcggccaactctttggttggaaccagaattaaagctcgagtctgctgtcgagccgggtcagagagctccaaagccttttgacgttcaagtaatgcaatcaacagaattagctttcatagttggctgacaagctgaaacaatagcatgtctctttgcgttctctccctagaatatatcagatcaatatttgatgtacccacagctttagtggcaagaatcttctgaactgtaggaatacagtacgctccggtctttccactaccagttcgagccttagccaagatatccttaccctcgatggccaaaggaatcgctttggcctgaacaagagtcggatgaaggaacttgaagtctgccagagatcgaaggattctaggatccaatagatgagagaagtcggcgaacgagttggtagaaaggagttccgacatggtcaagactagttcaaaagtagtccctgttaggtgggatgaaccagaaagttagcagcaaggattttttgggagatttcgtcggggatgaccttaatcagaagcagtacagtattcaaatataa

SEQ ID NO: 972 - DNA, 6100 bp, Xanthophyllomyces dendrorhous
attcaaatataatatacaagaattcgagttatctcctctaccgtcacgtgacataacagctcgattagtttggattgctcaagaataattaaacccagcgcatatatatcatcaacttccttcgatccaagggttcccgttactcgctttgaacgctgctaccttgacaaaatcaaaatcatcatctccttctgtccaccattgagactgctccgaactaggaggaggtactgcagaagtagagatgtatagcaaactgagtcaacgtacgcttcatggatccaaccaccacaaaaaagaatagattcggaatatgaagcttacagcgtggaacgggttcctcgagggtgctacgaacagaccgtatcgaccgagacgatcgagacacggatgttcctgtaggatatgtcccaagcaacatcttgatctgatgagttatatctaatcttttggcctgatcaataatctggacatctgcctcgaatagagagaagacgggccggtggtcggacgtcttgagaggcgctcggaagtaacgactttgtctgagctgttaagtatgaaaaatatcgtgaagattgttaggttacatctcaaaaacatcgaaacgagatttatatcttaccctcgaacctctatatagaatacggtcagtccactataattcgaacaaatgagtacgcagttatcagctctcaagtaaattccaacaagaaaacattagctaaaatgaactgacagcaggaatccgagccttctcagatgtgtcgtaggtgtccgtcccgttgtcatatctacaaccagatagaatcagtcgaggcctgtgcgattaagagagacgcaaccctgtcaagtatcacgtacttgtaagtaggtctgaaagtgatatctccctcttggtagtcaggaaatatgtctgacttcgacatatgtcggtttagctttcatgatgagaaaagaataaagaatatcagcactgaatatgactacagccgagtacttaaaaccggtgacttacttgatccgcttctaggagcggttctagattgtcgtttatagctaaatccctgacatcttcgttactcatatcaattcgatagttgaagctaccgtaacgacgatgggtctggtaagcctgagaactacgttgtgaagctcatctcgaaagaagtagacgtactctccagcccagatgatgttcctgttcatcgtaaatgaagctccgttagacaggaaaatctaatcggtggcatatgtcacagatagcgacaaagaaacgtgactcactcatgactagatattgtctttcccttgagaaatcgaagtccagaatgaatagtccagaagtcggcgttcctctcagccacatttgagtggccagctgcaaaatgctgatggacccaaggatgacgagtaaaacaagcgaaaccgtatcagtagtgactcggacgtacccagcgaggacacttgaatgatgatattctcacagctgtcacaaagcagaacgacgaatcaaagatatccattcggatagctacccctcctttgtttccagacataccccgaagtccggtctatgcatttcggtcacgatcaaacagcaacaaaaaatcactttagtacgcgataaactgaacgaaatattgaaagaatgaatggagacacaaaccttcttggtagccccttcaactcgcctaactgaccccgccagacttgatttgataaagataagtagagccgttccgactagctagaagacacgtggacgacaccaatcagtacaacacgcaagtaagatgatttgacgagctctaagatgaacaagaacggacacacctgctcgcttctaatgaggatataatcatctttcttgtttggtctgttggccaaagtcgagatgatgtttctctcccaaacgagtctaaaaacacgttaagattattaagaatttagttagacatgcacccaaatcaactggttcgcctgaatggctattcccgtacctcttctcaggatcagtttggactatctgttgagcagtcaagggtacaatctcttggaatgctatagagagcacatcgggtctaccaattgaatgtatagaatagaatcagcagcacgtgcagcacagggcttttgtacacgactagagaactcactcagagacaccttcaaatcgcggatatacggtgaaaaaaggacacgcaacagtcaaaggtctagactcgattgatttttagtcagaaagatcgatgtgactgactggaggcagggaacaaccacggtatcaaggattctcttgggctcttcccattcaaattccacgttccagtgaagatatcgatttgtttgcttgatgaaaactctggttgtctgttgatatggtgtatacaccgaaaccagcaatgaacgaggcctatgggtcagtatctctcaagagcctattctaactagcacgtggcagacgtatatatatataaggctgacctttgatttaatcgatccttgagtaattgatttgcaggattgaatatctcgataggatgttgatctgccaacataccctgtcgcggaggagaaaccccaagaggagaagaaggtttaactcatgactgagctgtgtgtagcttgtggaatcagagcatagttgactaaccaagagcatatcgattgcaatctgtttcgtcttgtccgtaaatgtattaacataggctctgtattgatcaggaatggacatgagtcagttgacgcacatagcaatccgagccaaacattggcgttgagatgtaaagacaaacctcccgacgctcttcgatgcatcactcagcataccccccagtgttctctttcctgtccttgtgaatgacgtgttgatggcgccagttccagcatagaccctgtttgagcagtcaggaggatataggaagtagagtatcaagaacaaagaagcgataattgagtatattgatttagcaacatttcaattgagcctgagagtagaaggtgatatcactttgacagaacatctccgttattggcccagatatctgaatggcttgtccatagaagagggatgttactccagatagggttcacgctcttcaagaagctctctacagtagctgccgataagatctcgcccaccacctatttaatccatgcgtttgaagcaaaatcaaaaggaaaagcttgtaagttgttgcctgaagagaagatggggtgatgctggagcgaacagaggaggaatgctcacattagtcctgtccagacaatccaagcaattaattctcatgactcccttctgctcttccaccaccccccttccaccttttccaaagtccacaactgtccaaccgtcttcctctaacgcatttcgcacaccctcgacccttctgacaccttgtctgacagactcaactccacctactcgaacggcgccatggaagtcaaaatttgtgatagaagcaagaggtggaggaggcttcgaagcgttgtagacgcgaaggtggttgttgtagtttgtggtcaaaattacttcgttatctttttgtcccagcaggctatgatgcaagttaaaatgatgttgaaagtcaatcagtgactgccagctcgttctttactctgatcaacgacgattgtattcgatcaaaagagaagaaaactgacttgactgcatggaccgatccatacacatgcaccaactcgtcgaaatgtttttcgaacgccagttgagcagctgacatcggtcttgtgatctggattttttgtccaaaggtttggaacccagcttgttcccagaacaaaggaacgcttcctctaagctgtgtccatgatagggatatgtcatcgacagtaagaatagtttccgtctgtcaggatgaacagatcgaagatgttagacggatagaagttgcgagtgatagatcatgagattcatccacggagaaggccggagcgagggaagagtagaagtgacagagagtattagagcgagagagatacgcgtgtttactgtcagtttagaggctttttgacgcggttgttgatactgctgacgacttgcctctacaaaattggccacgttaccatcatcatcaattcctctggtgttgaacctggttccggctctgcgccaactcaatctagaaaccaaggcgagcgtcatcggtttcgagagctgtgggagtggtattgtcgccatctgaacaaatccttggataacgggaatctatgaacagtatgataggacatcgtctaaaatcaaaaccgggtcgcgctcgatagatagaggactagtcttagacattcatgagatgtcgaactacgaagaggtcaataggacgtaccaagaacccataacgatcaaattcgtctgcctcttcttcttctaatccatctctccattctcgcagcccacctaacatatactcgttccagacaaacctcctatcctcgttcataccctccttgccaccttcttctacactggtcccttccctctcattcctcttgaccctttcctctagtctactactcaagtcccagtcgcctctatctgcgaaaaagaatgagccagcttccaagatcttttttgttccctgaagagggtgttcgaaaagagattgaggagagggtgatggattgggagaagcgtatgagggattggtcgagaccgattcgtcgtatgggtccacatatgagttggtattggcgaccggagaaagaaatagttcgctatcccatgaagaagttgtgagggaatggaagaaaactgatgtgatcttggatacaggttcttcttggctcgtgctgcagttaaagggaaataagatatacaaaagtgtttctttttaggaagcgtttgagcagtccttgcctcgagaatatccaacgaacctagtaaccggtctgacatttccgactgatctgctccctgagattaagcacagaaaaatctctggtgttggactagaggttgtgctcgatccgcctccgcctcccaccaagcctatgatgccgacgatatcttggctccattgaacacaatcgtccagttcaagttctgaaacgggaataaactcaaccaccgcggtgtatgcgttggaatcagaaggatgactaaacacgagagctttgggtgcatcaaggctgggaagaagaatgagaagtcgatttggagacgatcgtttgatatctgaaagttggaaagacgtatttggtcagtctgatgcaaggaatgatcggatccaagccactacttacagagccgcatgatggatgtgtcaactgtttagatcagacggcgagacggatcgtgagtctttgatcgactgcagctgactgagtttggtttgaaataggaagctggtcgatggcttatatgctctggatacgatggatgacgaagaagaaagaagagaagagataacgagatgaatgataaagtagatagaaaataaaataaaaataccgccttagctccatcaaattcttccttacctatcatctcatctcgtctcgtgttatgccatgccatgccatgccatgccatgccgtctgatggaatgttgcctcttgctcacatgctcgccattacaaccaatgtttttcttggtcggctcgtcgagatgtcggtttcgtgttcaagagactcttctaccgtctagccgctcatcctgttcactgaacaatgtctcgcgaatattgacgcaagccagtctctcttcagatttactcatcaatctttcgtaggtaatcatttataccacactggtcaacccttcctggtcttctcgacatctggattccctaactccttctgtcttgcctctccgctccgatgaggtcaagaaaccgtatcgaaaaagtcgattgatcgagcattctgagcgtattcttcctttctcagggtctcctccatcttctcatcctttatgacgctcgcaactctctcggcctgcaaaccagcatcatacatgatcccaatccgtgcgacttgagcaattggaatccttgagtacgaccactgtgctcaatacatccagtgctctctctgctgtgctatcaaacaccaaatttgaagaaaaaaaatcaatcatat

SEQ ID NO: 973 - DNA, 22979 bp, Xanthophyllomyces dendrorhous
  misc_feature (11622)..(11631): n is a, c, g, or t
atatataatacgccgcttacctaatccgccctggatccggcacatggctataaccgagatcacctgttcaatccatcagctcggtcgattctgtttgctccttccgtctgatcttccatctcgtctaggatagacatgctatcacttaggtcactccgctcgaatatcaacaagactgttcctctcccaatccatcctctcgtcactaggcgtgtcaacattcgattcatgtcttcttactcagcttcaggagagtcgactctgcgtcctcctccagacgaggtcctgactcggatcgcatcttatatccaccagcctccttcgttcacgcctctagcctaccagacggctagactctgcctgttggataccattggttgtggtttggaaggcctcagagtcagtggtgagctaagagcggtgatgggtccagtcgtcgaaggagcggaactctcaaacggtgagcacaggtctcgtgacttgatctatagatgcatttaagatgatatctgaaagagttttcttgtgccctctcaggagcgaaggtgataggaacgaactataaacttgatcctgttcaagcggcgttcaacatcggcgctatggttagtctcatccaacttcttatagttgcgccatagtgttcaaatcccagctcacttcgagtcgttgcgctcgatttcctgtcagatccgatggcttgactttgtacgtcagatcttgcatcatactttcatcgcaatggacatccttcaatttgttgagacatgacatgttttgttttgtttttgcttttggacagaacgactgcttcttagcagccgaatggggacatccttcagactctctagggaccatcttggcgatcacttcttacctctctaacacggatccatctaagaagtttaccgtcaaggacgtcttggaagcaatgatccaggcgcatgaagtccaaggtggtcttgctttgctcaactcattgaatagggtcgggttggaccatgtagcatttgtcaaaatcgcatcgtaagtgatctcgcttctcatcgtctcgttctgggtgagagatcaagataatgactgattctgtttacatggagtatctctacagcacggctgttgcctccaaactcatgtttgttccgataagcacataaaagattgatcctatctaaaactgacaatatgatgattgctatctggcctctgtattcaggggttttactgaggagcggactatagatgctctctcgcaagccttcgttgatggacagtctctcagaacctataggcacgctccggtaagtacttttcgtttcaatcattcagcgtctggtaaacaatagtgacactggaatggatattggcggaaccttgctcgcttagaacacgggaccccgaaagagttgggcagcgggagacgcatgcgctcgagctgtctggctttgcgtaagccttttctcccagaatttaccacacaaggatgcatactcactgcgtcatcaaggttgttctggtctggactactaatagttgatggtcaagaaaggtcaaattggctacccctcggctctgaccgccaagaaatggggattctatgacgttctatttgccgtgagttacctcttgaacgcgcgtcccctgttctacataccagcctaggagatctgaatattgtttttggttgttggtttagggcaagccatttgagtttcaaagagaatttggctgctacgtgatggagaacgtcttgtttaaggttaggaatatgttatacgtctgtaaatcgcgcttcattcttgttcattcgaattcgctgatcttctttgacttctttttttttggatccgtgatagatttcataccctggtgagtggagtaaaaccaattgcaaatcattgcctcgaaactcaactgaccttgtagaacatgtgtgacagccgagttccatgcccaggtcagtctgttcttccgttcgatacattaccgccttgcgcgtatcactctaactcatacgtgcaagatgacatcgctaccgtatgtcttcttctggctatattcagactgctgtagaggccgcacacacattacatggtgtcctcaagagcaagggactctcttcagatgatatcaagtctgttaagatcaggacgcaagaagccgctatccggatcattgataagagtggaccacttcataactatggtgagttttactgctttcctctctcttttctactacatgaagcgttacactaaccggatcacatccgttgctttggcgatccaacagctgatagagatcatacgttgcagtatatggctgccattccactcatctttggaaggctaaccacagaggactagtaagtcataccgatatcctgcatatgtttctttatacgaatgtgattcatgaagctgaaattgagatgaacttgcagttcggacgatgttgcttcggatcatagaatagatgaattgagagaaaagatggtttgtgtcgaagaaaagcaatttagcgtggactagtgagaagctttgacctcatcgtcgcatgttccgatactgtgcccactgactatacttttgcgcgcatgggtgatgtatctacactctgcacggctttcttctttcgtttagcttggatccagaaaagagatcgatcggaaacgcgatcacgttgactttgaaagacggaacggtgttggatgaagttgtggttgagtatcctgtaggacatcgaagaagagttcgtccgatctatcacatttgtctccaacccttctgaccaaaactgagagatgatttcgttgattctttccttgtcttgtcttctcgtcagcgagatgaggggacccccttactacttgagaaattcaagaggcatatcgtccctcacttcagccctgctagacaagaagagtatggcctatctcgctttttcattctactcatccattgctcatcctggccccgcgctgatatctggccttgaaaacattgatgatgttgatgacaatgataggatcatggcagcgacagttgatctcaaacaactggagcagatgcctttgcaagatttcgtcgatctatggattcctgagaagtaaactgagcgttgagcgaccgagttgaggaaatgagtattcataccgttgtattgtcgttagctgttgttatttctcctttcttctctcttctttcttccctgtaccattgatgagtgttgtcgtcaagaacgttttccctcatctaatctctccggcatgtatcgtgaacggaaaagaaggaatgcaagacatgcaaggagaaagaagaagcgacataaaaatctgatcgtgtccggccgaccacagttgttgttccctccgttacctttgcttataccgccgcctcaatctctgcggcctcagcctcggcctcagcgaccgcctcctcttcctccttttgatcgttctccaaagcctcggctaccaactgttcggcttctactttttcttcgccttcaagatccttgaacgggatcaaaggttcttcagccgctttcaatccgatggaagcttccaacttttcttcccttctcttcttttcctcctctctcgccaaagcctccgcctgcctctcctggattacagtaggaacaagggtaggagatggatcctcgtcgtcgggtgaaccggtggcgagatcgtcagcacctccatgaaccggaacgccttcgtccctccctttctcaaggatctgttggccctgcgcatcggctgctacagccggatttgcgtcgaccttggggtcgaacacgttcggtcccggttcgatcttgacgttgaggctcccggccgttgtcgattgggactcgattggttccgggaacaagggactggtcagaggcttggaggtggtgatgtcgtagtccgatagggagtcgtgaaagtcggcacacgaaaagtcccaagatttcctccatttgccggtttcacatttcgtcttcgtccatggagacccgtagcttaacgggctatatcttctgaaaccgaccaacgtgatgatcacgatgaccaacgcgatcgccagtctagatttgggtctgatcttggaagtcgccatgtcgaacaggacgcagagtagaagaatggagaaccagagggcaggaaggtagtgatgcaggaagagctgtcgttgcatcagatagaatggaaagtagtgtaggaaccagccgccaaggaggaaggccaaggtggagtcatatcggacgatcaaagctgggtatgattagttcaaagaggagcgaggtatgaacgcttgatcaatagtcttcatcctgacctgtgggacgcgtgatctcggtcgaataaagagaaagtggacaaacggtggtgtaggtctctgaatcctctcttcgctctcagaatcaacaatcctctgaaagccatgtacgtaagaacggcgaaggtgctgccccaccaaacgaacggattaccaatcaaatagatttgtcggtgatccttaacccagaagttctgtacgtggtatgtaattagacataaattgtggttatcagaccccttgatcgcttctctttttttcttcacgcacagagtctacgaagaaggttgaggaagagggcaaaaaagaacacgtacaattcctcgacgcatgaaaggccaggacgtaggtcttgaatcatatgcgtgtctatcggtcaatccggcgttcgtccgccacatcaccgcctgcagttccaaaaacttggacaagaacccgggtcgctcgtagttgactcgatctgctccagatggtactgtttcgtttcaagcaacaacaaacggaggcgacgggtaaatgatatattgcatatctcacgttggattcccagatagatgcaaactcacaaagagggttttcgtttgtctcgatataccacagtgaattgtccaaggaagggttcttgttgcaggtcacctcttgctgctcgaatccccattcgggtagcttgaccttatgagagaacaagtagcaaccggtgagcatgtgtcgaagtctaaagtgcgagcgcagtgttcggagttgttttcgggcagatttgttgggagagtgggatagttcaaaaataaagatgtcgtttctgtatcaagataatcacagcacaaagggacaagaggtgtcagagtgtcctacaagaattcaaatgtaagtatatatacgaaagttctgactaacgcatctccctcaaatccctcaaacccgtaaccgctaacttcctgctggaagtcgacctcactgattggcggtcggacatcgtgactgtggagtctcttttcggttcctttgtgaagaagcttcacctgatctccatcctttacgtatttgattgggccctcttgtacggaatgggtcgtgttgacgataagccagtcattgttgtcatctttgtggggatacaaggtgatctgttgttctgaaagattgcatgattcgttgttgttgttgtcatcgtcatcatcagtgttgttgttggatcaacctgggactacaaatcaaaggggtgtcggaaggacttacgttgagagccggaagggtaattatgcggatgggaatggaggtaaccgccctgagtattgtaatgtcggatactgacggtcgagccataggccacctctagatttgcacagacagagaatgtatcattttggttagcttgtccgtagctctgagggccctgccaaaaaaaaaaagtgagtcgtccaagtgaatgagttacacaccggcaaatgtgtcggccatgccgtgtcccctgagtgtgtgctggaactcggagctcatgaaaccatcaccttctccgctagaatgaaggagccagaaatgaactctgaaggtaaacatgtacaccaagatgggcaccatgacgagtcctgcaagcctggccacaaagtgtcttgcccacattcgcggcttgaccttgatgtctcccagaagtgtccataactggatcaccgtcgagaatccgacagtggcgatagtgaagaggcctacccatttacaactcgcgacgaaacctagattcagtccggtggacagaagccacctccaccacgatcgctggaaaggcgcgtgggcgtcttcattggagaatcggcagtatgagaagatggtggtggcagtgaaaaagatgagtggggagtcgagcaagattaatcgggattgagctacgagcgcattgtcaaatagaacaagcgaagagccgagtagggaggtagttgtggtgcacgacagagatcggagtgttaggtatgttaacgggacgagagaaacgcccaagaggccaggtagaagccgcatcatcacgtagggaacagaggcatcgtattctctaaagatgtgccgtcagatgaaagtagataaaagtgttggtagttcagcagatgaaaggaagaggaggacaagaagaagttgatatagctgactttgcgatgtccttaaagtcgtcgacacctccttggtagccaccgagccaggcggcgaaggtgatgagtagtttggctagcggtgggtgaacatccataaagaaggtatgtcggatgtactgcagatcaagtgaacagtaagcagtttggttatgttagggaccggcatgtaaacagctagcatgactatagaaccgagaatgattaccttggaagcaaatccgccaaagtgaacttcatcgaatctgaaggaaagcaaaagtaggaaggtgagcaaggctcagtatggtgtacacacagcagactgaggtgcagaagacggagaagcgaaaggaaagagaaagagaaagagaaagagatatataaacagcaagagatgaaaagaagaaggagacagaacagagacatacactacacttgatggctcccagatgttccataatctgactaccaacgagagagcgacgacggaagcgacgaggaaccactctttcctcttgatttgagaaccgaactttgctccagcaagcgaactggaagaaggcttgaggtatgctgacggcgaatcataatgatctcttgacctaggctgaagcagcctggcatcagcttcgtgtattctatttggcggaggaggtggtggtggaaagaacggcgaaggtttggacgccattgcgggttctctgagttgaggtaatggacacgatgggcaacgaggacgacaaagagtaaagatgatgtttagacagggagatggcaaagctgtgcaaaacgtgttaattttgggatgaaccggcctggttcgagaaacgaaccgctcattcgcttagtcatcacactccttgaacaacgaaccacccccaacaacctccaaccggaccggttcatcgccctacacgttagggttatccatcggtctgtttcgctggcgctttctctttttccgttttacttctgtttctttcttttccatctccttttcgacatccaactctcgttcatctttcgtaccgctctcgttgaacatttcgtcttgtctctcacatcttttgtcttcccccgttcccggaacatctacctttcttactcgtcaacggattaatcgctcatcggacaactatggcctctcttacagctgctgaacttcaaaaggttggtctgtcgttattcgtgatttttctttctttcgctcttctcttcttttctttttctcctttcgtttcgtgctcttgcgtctttttcttcttccttttcttctttctctttcttctttctcttttatgaccttgtctatctatcacttcatgcgtcaactcgctttctactaccttcttgttctgacgctctcttctctcctcttctctttcttcctctctcctattgacccttgttccttccttcctactcttctcagcgacacgctctcgaaggtgcccctgatcctttccccgcgttccgagaggaaacctcctctcctcgaccttcctcgtcccaggccaacggcaagaaggtcgggttcaacactgattcccaggacgccttcccatcgctcgctccctccgccgctccccaagctacggccaaggtccctgcttggggatctggcaatgcgaccaaggcccgaaccgctcctccaaagcctgttggcgtaactgcgtcggtttctctcgtcgtcggcacggtcactgaccgagatggcaaggtcctcactctatcgactgtgatgaagaaaatccagcaggaaacctcggtctcgctcgaggcatccactcagaaaaagacctcgctcaccactttcttcatcaagggtcccaacgccaaaaccgtcgaacaggccactaagctcctccgcgccaggctcagcaagatcgtcaccttgaccgtcgatgccccgctttccactctgggaacgatcatcggacccaagggagcaacccttaagcgaatcaccgatctcactggctgcagaatcaacattcctaagaaggacgacgccggcgctgcctcggcaccgcccacacaggctgatttgtccactgactctgactcggaagccgaggaggaagccgatgagcccaccacgaccatcaccatcgctggacctgagccctctgcgctcgaggcccagcgagagattcaatcactcgtcggagagcgaacttccaagacaaccgtccgaatcaaggacatccctccttcgttcttccccttcgtttctgccaaggttcctcaacttgagaagacttacggatcagacgttggaaaggagctccgagtgcacgtgcctccgccggcgatgctcaaggtattcaaggcccaggctgacttgttggagagcggagccggagtgaccgatcctctggatgtagagtcaagcgtcggtggtaagaaggacaagaaggacctcaggcttgttgtcagcggagacaaggaagcagtcggtaagaccgtccaggctatccatgagatccacgaggaccttgtgagttggttgtctctgcatgcaaagaaagattttttatttttcgtagttgaaagaaacatgctgatacataaattcttgcgcgcgcgcgcacacgctctggcttttagatctccaacacttccactcttagcgtccagatccctaagcgacagcaccgattccttgtcggagcgaacgccgatgagatcctgtctgcacatgggtgtattgttgagcttccttccatcgagtgagcatttggctttggtcctcgccctttttctcacttttctttgatgtcaccatatgcatcgagctgatgatctttcactcaaccaatcaaatagggatccctctgacaacgtggtcatccgaggacctagccagcagcttgctttggcactgggtgccgtacgtacctcttccggttcctctgcctgttttcctgtccctgccaacctctcttctttgctttcgttctccaaaggccatggtcaaagccaactcgatcgctgtcgaatctcttgatttgtgctccctccaccgatctcactcttctccctcctcctcggctctgccgtttgacccggtaacccatggaaagggattgcttcgataccttcaccgatccagcaagcttcgacagattgccgaagctaacaacgtgaagatctatactccgttcgccaaccagatcgagtctctcgatcaggtcaacctcgagattgttggtgaggacagggagagcgtgaaggccgtcaagaaagagctcgtcgagctcggaaagggtttagggccgggacggatggaggtgattgagatcgatcaacttgttcacaagttcttaatcggaaagggaggactcaagtcagtgtttccgtctatcagatcccttgctttacaacttttcttttgttactgacccgatgtctatacctgataccgatggatcatcaacaggatgcaaaagttctcttccgagcacggcgttggtgtaatcttccctccctcttcttcgaccactccatcggatgacgttctccttatctgccctccggtacccaatgaggcccagcccacgtctgctgccgatatcaaagctcgagacctcaagatcaaggagaagcttgcttttgtcaaagatgagctccttaagttggcccaggaggcagaggatatcaagacccgggtgttggacatcgagtccaagtggcacgccgcggtcatcggcaagggtggagtcgttctgaacgcgttgatcggagaggagaaggccgtgtctgtcaaggttggatctaccgggacgtctggtgatgatactatcaccatccgaggacccagcggcgaggttgacagagttgagaaggaaatcctcaacatcgtcaaggatgccaaggaggacttggccatcaacggatacaccgtcgagtttgcggtcgataaggcttacgtcggccacttggtcggttctgccggatcctccatcaacaagcttcgggacgatcttggtgtcagagtgaactttgacgatgcctcgcccaacggcgctgccgttgataacaagaagaagtcgactggagccaaggcgacgtgcaagatcgtcggacagagggctcctgtcgaagaggccaagaggaggttgttggctcaggtcgagcgactggcagacgagacgacgatctctgtggttatccctcgaaagtaccacgcctcgttgattggaagctccggcaagtacgctatccgattggaggagaagtacggagtcaaaattacattcccccgagataaggagtctgatcaaaagtcagacgaagtcctccttcggggtggcaagaagggtgtcgcctcggccaaggctgagttgctcgaagcggtggagtacgagaaggagactggacagtcgctcacattcacgattcctagcagggcggtcgcaaaggtgctcggcaaggccggttcccagatcaacgagatcaaggaagagactgatgctcagattgatgttgaaaaagccgagggaggggcgaaggagacgacgatcaccgtgttgggaaccaagaaggctatcctggctgccaaggctgccatcctcgctatctctgaaactgtcggagaggagatcacgacgacggtcgagatcgataaccagtaccatcgaacgttgattggacctggagggtctcgattgagggaaatcgtcgcttcctgcggcggtccttccgacgctagggcccagtcgggtttggtatcgttccccaagggcgcagaaaatacaagcgctgtccgacttcgaggtgagccttcgctgatcgcaaagatcaaggacgagcttgagcgaatcgtgagcgagctcaaggacaggatcatccttggtgtttccgttccgttgacgcttcacgcctccaagatcggtcgaggaggaagtgccctgaacgatctgcagcagaagacaaacacggtgattcagttccctggaagcagacagtacggctcattcggcgagcccgaaaacgcttctgaactgaccgaggctgaccctaagacaattgtgaaggtggctggttcgaggtcggctgtcgaggctgcgatcgagcagctctctgtaagttgggatcttgtcaaatttgcttcaaacctctttctcccgcgtatctgacgtttctatggacttttttttttctctctcttnnnnnnnnnntcgggtttctttgatataatttaaacacggaaaaaaaaagattcaaccggacgctcctccttctcgcacccgaaccccccagccggatcagttgtcggagacagtgtcgatcccggaaaagtacgtgtttgcgatcactcggggattccttttcaggaacttgcgaagcgcaggggtgattgtggaaaacccgcctgtagcggagcaagaggatttgcctcgaccgactaaaaagtctgcggagggatctgcggaaaagggatccacccgagacgagcgacctactggtcggatcgaccaggacgacgacgacgaagcttacggagcgtacgaatctgagctggactaccaattcgagatctacgatcggtatgccaacaaggatgagacctcagtcgagtgggtgttgaagtcgagaaaccaggcttctttggacaaggcaaagaaggtgatcgaggaggctgttcagtctgctgagcaagcccggtatgtcggtatccttgccggtttgccccagtcttctttgtaagtagagacataagtctttcttcttcattttctctctgtgatcatcccagttttctcgagggggtctctgattcggaatttaaacctgttgcagcgctcgaatcgtgggaagcaagggaacgaccgtgtcccgacttcgagccgagagcggagcagagatcattgtcggtaagggtgattcggatatcatccagatcatcggcggttcgtatcttcatttgtcctatctctttggcttggcatgagacgcatcataatctgatttggtctacaattctcctttgtattttccccttttatccctggtcgtctaacggtgaattagataaggagagcattttgcacgcaaaggaggcgatcgtcgagatcgcgtctctgcccgaccgatattaaggtccaagtttaactacaccatttttctggattccttctatttattttccccctcacaaatcactctattttcgtacttctatgttaccctcccctaaaatttgtccaataccctagttggatttatccttcttttctttgggcgcgcgttttctctctctccttttttatactttcagtttcatatttcttttccttgcaactttctgggcttttccttcaacctctccaagcttctattctgcctcttgttctcaaaagaaagaaagaaaaaggatttaccaaattttctgccttgtttcttccatctcttcttcctttttatgctcttgttgttttcttctttcagtcaacaacttttcttctcagtgataccgactgggaaagaaaacaaaaactcctccctctaagaagattgatctgtactaggaacaaaacaaagagagaaagatagataaagagatagatagacagatagaaagaataaatagagaataaaggaggaaacaagagagaaatcttacaaaccccgaaatcaatgcttgctctccccgcggctgttcggtatttccatccgacaaggcggacaaataagctgcacgtttgaacccacagaccgggttcggctctctacctttggctcctaggccctgattctgtttttgttcctgcattgagaagaaaaggaaggggcaaaaaaaccatgtgtaagtcagatgccgggcaaaaagcgtcagccgcggacaagccgacgattgtccggggaagggcgggcttggccgaactctaaatttcctcatttattttggccaggcccgattggttctcagaattgatagagaaagaagaaaacaaatcgagaaagaaacaaaagaggaacggctcgtggaaatccgtagcgttggggggagaaaaaaatattggagcatcagacggcctgatataggagagaaagagaccagaagaaggccgggcagattcaaggctcgggtaccttatcctaaccgccggtccgtagcgggaggagggattcaaggggagagggcatcctaccggacgggcgctgatttggctcccaaggaaattcaaagagagagaaacccagacttgctgaaccgttcgcgaggccgaccgcgcatttgaccgccgtctagggcaaggttcatacagaaacagctattgttcctcttccacgtttgaccgctatgtccggtttgtactcaggtctataggtgctggtgcgtgtgtggctgactattgattgcctctctcataccgcctcttccgcgcctcatcttttgctgatcgcccgcttctgacgtgccgcctggcctccatgaggctcgctatcaagtttgcagatcaatatctatgtttgtgctgtcacccgacggcttttccggcgctccgggtccctggatgaccctgtgcgcatgaagtgcaatgggcgctcagccttctggtcgcacaaattaaccaaatcacaccacacacacatactcacatgctgcttgctttccgtacttcgctcctctcacagtctctctcatatacgctcagaggactcactcactcatccacccccttggtcttactcagttgcaccctggctcactcactcacactctcttctttcacgctcctctcatccgtttattttttcttgcctctcctcctctatttccgttttcttttcttcttcttcttcgccttcgttctttttttccttcttccacttgaatttttcttcttctcgaggtctctcttctctcttggatctctccttgtccttatccgtccttttggggagggttcacggtaaagctcttgctcgcaccttctctcgacacggctcaagatccatatttcccctactcaatcaccactgctagtagcttgcccaagccttcatccaaacccatcatcttgggcgataagtttcccagacaaagaaacgttgcttcatctctctgtctctctctgtctctctctctctgtcttatcgatcgaatcggccatccaacgatcttcacctggttaggtcttccgttcttctcttttgggtacgtacgttccttcttctagtgacccttgagacgcgttcggcccattcagccgaagtgaatggacagtcaggccaggcggatccggctcgtttcccacgccttcttgtccgttcactcaccgcgcttatttccggcgaacatctctactgttgtctttcatgcatcctcaaacaaaatgccgttccactcacttcaaagacttttgctttctccttttattctatcaatctttctgttctatggccctctttgtttcgtccttctttttctttgccaatcatctggatggatccttccacaggcatatcttgttcccggtttcaactcgttcaaacctgctttgaattctctcccttctttctggttcccgtcttgcgtaggcgctgtcttcaagataaaacaagagaagaaaggttactatcggtgggaaaggcaatcagtatcgtctagaaggtagaactagtcgtgatgaggcaatcgtcctcctcgactgcgttctcatttttctcgtcagaagcaaactcagcctacccttctcctcctgctcttccttctttctcttcgcatcaacaccatccatcgactacttcttcaacacaaccttcccggccgtcttcttttcgttcgtttaaccaacaaccgaccggcccgatcagtctacctctcttgccgtcaccaagaaagtttgaatgcatcgaacctgatctcgatcctcgatcgacatttggagatacgacatacgtctactcgtttcttcctcccggacacgtatcctctctggtaccggcttcatccggttcggttgccgaagcagaggcagaagcagcagcgacagccgttctagattcgataccttcgagttcgacagcgcaacgcacgaacggaaaccaatctatcggttctgatgaggacgaccacgagaaagactcagacatgtcagaccatgaatctggtcacggatcgagaaaccagaacgctcaatccatcgagtgtggccaggatggtggacagacaccggaagatctagcgcggcgtttaggggatggctcccagattgaagtatgtacctaatctgtctcacatggtcattcgactgagaagagacttacacaacccgtcaaacttcttctcgctgcttcgcatccatcgccgtcaccggcccctcccattagataaaacatcgtcgacgaacaagccggcttcaattcaacacgttggaagaaacgttcttgacaaacccaaagcctacaggcacacagcgaaaagagctcgggtcaaagctcgatatgtcccctcgggcagtacaagtctggtttcaaaaccggtgaatccatcatcacctaagtctgattgagtttcggaagctggaatgaaagaagaaagcaggacaatacgttacctcgttggaataggttctgagatcgaggcatggttgtggctaacgttcgcttgtttacttatttatcttctctagtcgcgccaaagtcaagaaccaagcaaaaaaggcggtcgagcttcaagcaaagggtctgttcatgcctctgttgagagagacaccttttcctcctccttcttcctcttcttcttactctattcatccgaccgagtctttggcaggacggtcggggaagctggctgtgggaccgtctcctaatgaaatcgcacaaaagcatcctcgatctcgacatccttctgaggcagatgcgtactcgttgacctcggcccggacgtccatcgatggcaattccccaagcacccctggtagcatgcttctcggtcggatggatctcagctcaaacaacaccaccggcggctcgctcgccaatacgtaccgacagcacaacggcgcgtcgcctcaactagcgagtagtagcagcagcagcagctctagcataggagcatctggtacacacattggatcgatatattctcccattatggatcctcgaaactcactcgggattaacaggagacaaagtgtgccctcctatgagtcgacggatagtctgatatgcagacaggaagaagcactttctggctctattctagggcttctcaaagtcggcccgaccactcaagcagacacataccgcagttcagccgaagaggataggtccttcggagaggataagtcttccggaggatctgccgctcctttggacaggacggcaacaggaccttcttcggttgatcgtctatgcagaccagagagcggtcaactctggaacggactatatccggttacccctaccggtctgccctcccagaccagacaaagcgaacaaagtgatatgcttccgccgccggttccggtcggttctcatcgtcgaccgtccgttgggtcgacgacgacgacgacggcgatgagacatgcaccttataacccgtccctctcatcccgtcgcgcgtcggtccccgcaaactcgacttccgcctctgcttctgtccctgcctctgctccggcttccacctcatttcttccaccggtctcgaccacaggaaatatgtcttggaacttgacgccaatcgaagaccacgagggggcagaagtttacgctcagattcctcccgtaccgcccccgctatcggacttttcacagccaccgcgtccgccgccacctttgcaggttgatccatcctacaccttcgatccagaattatattctatacccactcatcaaccgcattcgtatcaacaagcccaacacttgtttcagcctttgcccatgcaacgatcacaacaaccacagcattatctacatcatcaacagcagcaactctaccaacagtatcagcagcaacagcagcaacaacagcagcagcaacaacaacagcaggccgactcttcatatgcattccaatcatcatcagtcacactggttcctcaatttcaacagcaacgacaacagcagcaacatccgtcttcgcgacctctcgagtccttaccaaatggttctctcttgtttgggtccactacggagatggggcgtgcagtgcatccgtctgaggctcgtgtggatggtatgggtcctcggaggcttgatggtccacgatcttcaggctctatccaggggtcgggaatgaactatggctatcaggaacacgcgcttgagatccaaccttcgacggagttgacaaacgacacctggcaccatgcccaggacaaccagttcgctaggagagaatctgcgtgagtcccatggtcgtttctctgtatctttgtttattgttgtctcgcgtgaattctccattatgctgtacctaaatccattgtttctatgtttgttttctggctggtcagtccggcgcagtttctagacgacttttcctcgatgagcgtgttagctatgcgggacggcaatgcttcttaccttcaggattactcttctgtcgggaacccgacccaagggacgaccgctcagtcattagcgataacggcggcagcgcccttctcgtatatgcagaatccagctacaggaccggtgaatcagaattcaactcccaattcacagttgcaactggttcgtctatcgtgcgacgtttcttgtagcatcagtcgagagttctaatctgtgaccttcccccccccccttttctcctatcctttcgtttgcaactttgttcgggttcacctcaacaaatatacaaacaaaccaaaccaaaccaacaaaacccgattttaagtcattaaagcaacaacagcgggatgacatgaaccaagggctttcgaatgagcatatttcatcccttcgttcctaccagcatcctcttcctcattcgcaagcgccaggatcggagcaggaaacggatttttcctccggaggttacattcgtatgaatgaggatggctatccgggctatccgaacttgcagagaatgtcgaccttggctccttccgataattcatatatagattctatctcgccaaagcagcagcagcggcagcagcagtagcaccaactgtcttgtccaggttctgaccccgatttgactgtagattctggctctgctttggaaaatgattatcaatcctgggtgcccccttcttctcctcttacatctgaatttcgcttttcttgttctccttcttcctcccttctctgatccttctcctcttttcatctcgtcatctatttattcattctgtgtctttgtctaaattccttctcgtgccttcctcttccattttattgtgatttatttggattcagccagtagagtctctcccgtttttaatgcctgttatccttcgtgttgatataagtcttcctcctttcctccttcctctttcacccttggttaatcctactacgggtattttcgtcattgcagttcctcaaattgtacaatcgaagtgtatccctgcgttctctcagatttactacttttcaaaatggaaagaacaaaacgttttttggtttccctttggtcatatcaaacaaccaagaaggaggtgagattagtgtatcttgttcaatagcgccgaacaatgtgtttacctcgtcactgacatcccttctttttcaaatcgaaagcggctgatgagctctggagcattggcagggccgagtgcgacggcgcttatcttgtactgtggattggtttgctcatccccatcataaacgaatcacctcgcgccttctctttgtgccaggagaacttattgtattgaagggacagacatttacctgtagaagaattgtatcttaatgccatcgccacaaattaatttcctctctgttgctgtatatcgtatcttctgtcctattcatcctggcacgtatgccagggctggtctgatgatatcaaaggctgatgtggattctttagctctgcccaagcatactaaaggtggagaccgcagcggcaggaaggcgctgatggatcgtttctgcttatattcatgccgttatctcgtcgtaaggtattactaattaaactgtgacgacggaccgcaagcgacagatatagatagcgtccatatgtgacatttacgaagacgcgtgtcgaataactaactaaaaagaccagatatgtgtcttcggttctttcaacagacggttcgatcggcatcgcttcagactcatttgatgttttgttcaacgttcgtcttgcgactgatcctctgccttactctatctagagatagagaggatcagaatgacagagttgagccaatcagccatcattctgtttctctctgcttacctctatctgatcggccatgtctacaacctttccgggcatgattgttataattgatatcactcttgcgtctttggtacaactcgatgtatgggcagatgacactcccagtcgtacaggagatcacatgtatatctcatttaatttcgcatgagaaattctgagcgtgggatggtcatcgttcgaccactctccaggtaaagtactgattggtcatatcaacacaccgagccaaggtcgagaactgccagtgaataccacttggtttgtttcggtttttgagatggctagatctggtttaggaaggagaaaaaacgccaccataaagtacacgtactctattgtagatgcggtgggggtcactcattcagacaggaaggaaggtgcgataaggaagcgacaaaggagaacatgacatccctgatcatctcgtattcaaaggctaagatctccttcttattaccaatgaactgctttccgaaacctctttattcaagtcccattcttggttctgaaggatgcctctaattgatacgacacccagagctttatcttatcggttgtttggacgagcaactctttgaaccccaaaaattaaggctgtgcttgaccgtgaaacttgacactcacgtgaaaaacctaagagtctcttcgcaaaccgaccctaacgtaatcgggatggaaaaaaatccacctttattggagctcgcgtttccctctctttccttctctctgttacctcagacttcaaggtatgtattcactgtttggttaactttttcagttgcctacgcccttggtggcactccgctcggaacaggagcatcccggttgctgtccatccgccctggaaattctttgttcatgtctcgtcgtccgtcggcttcttcctcgcccccccgtctgtgtcctgggaaagagccaaactcggagattagtaaggagcggacagatggagagcaaggatggtacttgctgaatcgagggataggattgggactcaagtcaggtggagaggacgacttttgtgttgagacctagaccatcgtatcatgacatattccctcgagacgccgagacatgaacatcgaattttttggggactagataaaagcaactaggacaatgctccacttctgtcgggtgtaggcttctgttcattttcctgaagagaatacaagacactaatcgcgtggacatcttgtcttccgttttacttgcttctttcacaacaaaaattccttccacctctatcgtcgtcttcaaatttttatcgcctacccctttggcttcctcgaccctcaccgatctacattcttccttccctcgcatcatttgttctctgtttgcatctactagatgggaatctcaagagactcgcgacacaagaggtcggcttccggtgccaagcgtgccttctaccgaaagaagagaaagtttgagctcggacgacagggtaagagagggtgactatgagtgtatcccgtgtttttcgttcgaatgctaattcatatcgcattgttgttcagccgcttctaccaagatcggacctaagcgaatccacaccgtccgaacccgaggaggaaactgttcgtttttttgaatcaagacaaaaaatacggctaggcgtcataaattgactttgccccccttccctcctgctatgttttcgtttcgacgttatacgtatacagtgaagtaccgagcccttcgactcgagtctggaaactttgcttggggatccgagcactgcaccaagaagacccgaattgtgggagttgtgcgttgaaaattttccttcattcatttccttccagacatgcatggaatcatgttactgattggttttgatccttttcttattttctgttccatcgtcaaactcgccgcccagtcttacaactcctctaacaacgagttggtccgaaccaacacccttgtcaagggagctatcgtccagatcgatgctactcctttccgacagtggtacgagacccactacgctcagcccttgtcggccaagactgctaagttgtctgctcccgctgaggagaagactctttccaaccacgccacccgggttatcgccgagcgaaagaaggaggccaagctcgaccctgagttcgccaagcagttcgccaccggaaaggtcctcgccatgatcgcctcccgacccggacagtccggacgatgtgacggttacatccttgagggacaggagtacgagttctaccgacgaaagattctttccggaaaggctaagcacgccgcccaggcctaaaagtatcatccttgtgtctctgaaacttatggtcatgaaggttgtgtaatagatttgttctcgtgctttagtcttgtctcttttttatcatctcgggtccaatatgttgtttcttcaacaactcaaagacacaatacgttaaatcacgggagagaaaacaaaacatgcttgtctgttcagttcagagattcttaaccaaatgagcaagaaaggtcaatttgcagttgggcacctcttgaaggaattagtgaacgaaaaacaagaggaaaaaaatcattcaagctttcacatatgtgtatgtatatatatcatatatgtacattggatatatgcatacttttcaacccaaacgtctccagtcagttgtctctttcttcctcttcatctttgtctccgtccagatttgatggataccgcttatttcctgaagacgaactcaaggatatatagatgtagagatcacgagctttgctctgtcgataagatgatgtacccaaatgtaaagagaagagccgagatggatagatgtaagattatcaagaaatcagatcgaaggaggagagagagagagaggtaagagttcgagagggaaagcggaaagaaagggatcaaagaggtatcggcatgatatgagaatgaagagaacggcagcttcccgactagagactctcatatcctcctctgttggaagaagacgatgatctggaagttcttcggaagttggaagtgagatggttgaatagttcgatgactaatccggctgttggttttttgtttttttttattaaaaaataaaaaataaaaaatcaagaaggacgagatagtgaacaaagtcaacagattagcgaagggaaccaagatgattgaggttgaaa

SEQ ID NO: 974 - DNA, 6498 bp, Xanthophyllomyces dendrorhous
aaatgaaagcggaggagtaaaaagaataagactcgtacggaaatcttgccagaattgtctacagtgaggaccaagagaaacaagttagcaaacaaaaataagaagacaggcgacgaagaatcaaaggaaggacaaacctgtgagggaccatatcccaacctttggcatcgtacgtcgtccggttatggtagatccccagaccgaggtagatcggaggcacgaggagaagtctggaacgtgggagaggagaacattcagctctaccacagaatcaaggatggcgaaagcataagagaagaatctctcacaggaagaagaaccagccccaaaatccggaagagcgcttcttgttcgaattgccttcatctgaggaaccatcatcgctgtcgagcgcctttgggcaggcgtgttccgatcgccagatgagggatagtacggaatcggagtacgacagaaactcaggttccttttcggattgctcggaaggaacacaacggagggcgatcgagagcttttgacggtggcttttggatgacaaagtacaacagatatagcagcgtttagcgacgaaacccgaggtatgaaaggaaaagagagacctctggacgtacttgttccattctccgccggtatagttaccgatgacgtcgtagcatttctttcccttttcttgaccctgtggacaatctatctggtgttgaccccagatgacttgacccggaagatcgatcccggggatatttgagcctgctatcggaatcaccgagatcgtcctgctcctcggatccgagtttaattttatgttctcgaccctcagacagacggtcgttcccagtgggcactgaggtatgaacacaagcaagatattggtcaagaagccaaggagccagcccaggcagaacggcctgtatgaaagaaccaagagaaccatgaacgaacctggtcagcctgctcgactccatcctccaactctaagcctttgccctcgccgccgcagaggataagccggacggtcgagagggtctgtgtaggcggtgtaggctctgtgagtcctgcccgatggacatcctggccgagaagactgagatcatacgtgtttgacaggccggcactctttgagatcacacaggacacatgggcctgtgcgtttgcgaagagtgccaggctggagagaaggagggcgcttgtcgggaggagaagcataggagatctttgagggaaaccctaaattaattgttctagacccgggatgtgtcggtggcttgggagaagagtggttgagtgaattaagggggggtgaatgagaagaggataagtgactctgagaggaagagtatgaaggcgaaggcgaaggcaagggcaaaggcagaggcagaggcagaggcaacgtcaaagagagaggccactgatgagggagaacgagagagcgaacgtcaaagacaggtacatagagattagatcgtggttgccctgacgacagccaggcgtacggacttgtttacgctcgcttgctcgcgcacccactcacccactcacccactcacgcgttcggagcttggggcactgcggatcgatcaggcacgataaccctaacacgagtaccttttctctcccctcgctcaccgctctataattcgagcgttcgcgtccgtacaccggcccgcttatttgtattctctctattccattctgtcgaatttctctccccctcgtcgctgtcgtcgttgtcgtcttccttcttctttctgtctctatccatctctatcctctagcttccttgtcccctcttttattcgtcctcttccttctctccttcatcactctctttacatcaactcgctcagatgggggccggtttatcaaaagcactcggtttgttaattcaacttctccttctgctttctccctagcccatctttcagacactcataactgacaggactcattctaactcggacgtttgcccgtttgataggaaagctgtttgggagcaaagagatgagaattcttatgctcggtttggacgcagcaggaaagacgagtgagtcttcgtccttctcccttctgtcgacccactctatcaacaaagtactctcgccactagtgtcgtcagatacagatcgaaggatcgccgaatccttggcgtgttcatccttctctaatgtcttctctggttctcctcgtttcttcttatccctttccacttccttccgatctcctcacagctatattatataaactcaagttgaatcagtcggtcactaccattccgacggtcggtttcaacgtcgagacagtcacctaccgaaatgtcaaggtctgttacttttgtcctttgcgttccgtgtttttctaatctgactgtgtctccaaacgctatcgttctcgtctagttcaacgtatgggatgtaggaggacaggacaagatcagacctttatggagacattactatactggcacccaagtcagtctcttctctcctgtgtgcctgggcggttgttatcgtgtccgcacacatgcatacaccagctgaactcaactctcccttcctgtttctttcttcttctttctcttccttccagggcctgatctttgtgattgactccggagacaagtcacggattgacgaagcaaagattgagctcgagcgcatcctggccgacagagaaatgcgagactgtctcttgctcgtgtttgcaaacaagcaggatctacccggaggtctgtcttccttatagattcgtctctcttttcatcttcagattcacgcgatcgattctgaagcctcttctatattgtattctcctgcgacagctatgagtccggcagaggtgacagagaagctcagtctacaccggatgaaggacaggagttggtatgtgcatcctaggtacgttctcaaccgatcctttcaccttcggatgttcgaagaaacccatgcgctaccgcgttgaacgacactcattcgaaattttccccggtcattccagttgcgcgacgacgggcgagggtctgtttgaaggacttcaatggctgagccagaatgttaaatcgaaatcgtgaggatcaaattggcagcagaagaaaagaagaaaatgcattgaaacgcagtctgggtctcctttttccttttgggttttgtctatatcgtcttgatccctttgtatttctctttctttgcggttcttgtttttcttcttcttctttccctggctttccttgggtctctgtgagacatctcggcatcccttttcctttatttctcttccgagtccttgttttcaatactctccgggctgtcgaaaagacgtagacgtccgtcctccgagtgacgtgatttctttctacactctcttcctcgttgggcacagttattttctttcattctttaattccccctctctttccgttctgttctgttctattctggtattcttcctccttccttctctcgttccctccttaccggataatctatataaccaactctacgatattccctctttctcattttggatctgattgatctcgtcttgtctctttctgtttttggcaagagtattcataaagagcgagtttttttttcttggtaggaagaaagaaagatccattcacaagatgtctccttccttgctcttttgttttggagaagttcagtccgagggatatcatacaacctaagaagaaagaaagagggagaagagagaaagtagacggacagaaggatgcatgggagggacggaaaggagcagatggttgaacgtaagaagaggagggagagcaacgaaggtagaagagggacgacagcggacgagggtgcatgcacaaacggtctattgtgaacaacaaaagggcaaacgatcgagaaacatggagagagaaacgaaaccaaaaccaaagccttgctcctttccccattggccccagcaaagaaacaatcccttctatctgacctatccgctcaccaaccgaatcgtagttcactcctagaatacacaggtggcttccactgtaacttttccggaacgatcctcctccgggtcttctttcgagctttgttgaaggtgtcgagaactccttctgtcaggacgatcaagtgggaacccttgtagaacctcagcatggagtatgcttggcagctgtgtgttgtggtattgaaagagagttcagccaggattcgtcaggatatcggagcagggaagaacattctgcaacatggaaaggataggaggaaggaagcagagaaagaaaggacgaacgtatgcataacatccgcatgggtaagcgccgtctttgaagcgatttcatctatactgatctccccttcggtctgtaacaatagttcaattatcgtttccgcccagtacgctcgataacttaggagacctagatctgataatggtttctccggactacccagctttccctttttttttattttgaaggaggaatacaaagtgacagaaaagtggcttttagtatgtagcgaattaagaagaagaagcgatttggtgggtggatatttacctcaatcttgctcagttcgtacctgatatacaaagagaacataaagacattcaggttctgatcagctccatgagactaaagaaagagaaaagaaaaagggaagactgacgaaaattcgatgagaagtttaccgaagccatgcctttgatgttgaggtagcgtcaggatacaagcgacgttatacccatctgccgattccttttcttttgaaaagtatccgatcaagtgacaaccagtgtcgtccctaacggccatgcagtaatataagaacggatcgacatcgtagtagagcgtcttgtgatcgaggaaacacttcgagagtagacacaagttcctgcaccatgtcttttgtttcttgccatcgatttcgtagaaggaaatgtcttcgtgcctgtagatctcgttccctggaggatgatacagcccgcatttggtccgatgtcgggatagcatcagtggcgacggccaaaaggacagacacatctcgcagatatacaacaccggaagatgggcaaattcggatggataaggggaaaagtaccaagcctcaacttcgtgtttcccaatttggagtttgtttagattcttcactcgagagacttctccgtgagattgagtcattgaacctgacgtccgaagcttctcgatctcttgttctttcgagaaaacctccggaccggtctgaccgttcagaggtgcggacagggaaccttcagccagaacggattcagcaggtgaggccacttcttctacctcgccttcaccatcctcgtcatttccatcggcagaggtcgaacctgagccagcaaggccgggtgattctcccaacttgcgcttcttgccatctgtgcttgctggtgttgacgtcggcgtcgacgtcgaagttgatcctcctgtcgccgccgctgctgtcgtcttgttggctttcgagttcttcgacatttgcgacaacgagctcgcctttgtcgcctttttcaataacgacggtgctctcgacggcgaaggcgcgtttggacctggcgaatccgagggtttccttcctctcaacaccggcggagcaggccattccatctctcgagtcaacacgagccgagaggacggaacccattcatccagtcgtttgttgaactctacataatggacgtagtattctttgagggacgtttcggcttcagtcgtaccagctcccgtcatcgcggcggcggcttgttgttgacggcgaccgtagattgatgttttggcatctctagcagacaggatctctgcttttcgttcttcgagctgaccagacgccagcggtttctgtacaaaaagtttgttcccaacggctacgctctaaagccgaagacaaagacagacgagggacgatcagtaatcaaggagaaagccgggaataagcgtagaagatgaagagaaatgaacgaacgtcgagtgtatagctacctccagccgagattgacggctgcccgctaggcgtacggccgtccgaactaggtcctggagtggaaggagccatgatagattatgcagacaagagcaaggacgcggtgatagaggtgtgtagctgaagaacgcgtcaagaccgagtacgggataatgaaaggtagccgttcgttcttatttgtattagcaagaaagaagagaaagagaccttgtcaaagtaagaacggaaaggtgaatcgatcggccttcttgcttacgagtgtgtgaaagttgtaatgtgcttacaaggaagaagttgataaggtcaacctaaagctaggaattaaccggtggcggatggtgatgattagcgatttgacttaagctaccctctctgaaccgttgagagaccaatatgtcaatagtgactatgagaactttccgatagcttttgtgagcgtgtgagaaaactgttgtctatgagaagatggatggatgtaccaagtatatttgtgtgtgtgtgtgtgtgtgtgtgtgtgtgtgtgtgt

SEQ ID NO: 975 - DNA, 5243 bp, Xanthophyllomyces dendrorhous
gtgtgtgtgtgtgtgtgtgtgtgtgtgtgtgtgtgtgttctaggcgagttgagtccttccagaaatcccaaaagtggaggaactttttttttgccttgagacttcttcaacctcactttacccaacaaacaggatcataccatccttcagaaaccattcctacacacatacacgaacacacacatgacattccttacgccccatcttcatttcacgtcatcttccatctcttcatccgctcggtcacctctgccgccagcagccacgacggtactcctgtcggacacgatctccgctccggctgatttcgtgttgcttcattttgtagctactcagttgaaagctacgaagagcgtcttgctcgtgggatgtggagaaggagtagatcattacaaggccatatccaagaagatcgttcgtccgcttcccgttctttttcgtgtttgctcaatgagtttgctatgctcatcattcagggagaatcctttcttggccgcaacttagggaatttctttggaccaacctaactttaaatttcatgacgcgctctctgcccagtctcaatcgtccgctccgtccgatctgaggaacctgtttgacagtataatcagcttagtcgaacggcagcagaaggagaactcttctccgtcagatggaccggagagcgaggtgatggtggtgctcgatgatctgagcgctctcctctggatgggagccgagctggagactgtgggtagatttgttagggcactccaagcatcaagccggaaggttcgtcgtttaattatgttttgtgtactatgtgaagacattcgaatcctgatagaggtttcgtatcttgtatggatctttcctcttgagcagctcaacttcaacattgtatatctggtgcatacgattccttcgagcgcgtccgccgtaccagaagatgaactcttcaggctgctacacccctcggcagacctatggattcgtgtacaaggtctccagagtggtagaagtggggatgtgtctggcgaggttggtggcttctctcttcaacgcattcttaatcaagtatgctctagactgacacttgtccgttgccaatcgactcgaaaatagttgtcgtttattccttctcctcttctcgactcggatgaagggttccctcgcacagagcctgggaaggagcttcaatataaactcggagatagtggtgtgacgttcttcccgaagggtacaggtcagggctttttgtgaaagaagtgtctagacaacataaagatgaacttaaacaactatcagaaaagggtagtgcggtagttcgcactgaatctgttccttcatcgcctggctttgagcccatcgtcgactgcatgcagtgagcatgtcatcacgatgagtgaatgagtctacaatagttaatgatgactgaggcagacaaaaggtgcgacaagcctatggtggaactttcaacaaacccgccgaaaaccacctagtcttttcccatcctgcctggagagatctcgctctctcctctgatttattgctacatcaatcgtgtggtgctggtgttcgctgatgtgagcgggagctgtctggccgggttgggtgtctggccggatctggaaggtttctctaataggcggactacaaagattcctaatggatgttctcgattgttggtattacagatttctcggacgatgactacaaactcttctaatgggcccactaggaagagctccagacgaaaccattagacaactttgtagtacgtcgaatacaagggtttgtaatctctaagatactacatatatcttctattcactttcaaaaagcattagagatttctgtattgcacagcttttttcctcctcggcctcccgccacacactcacctctctaggtcttccttttttcccgttgcgttgcgtgtgaaaaaagcctttagaaaaaaaagaatcatcctttccctcccaccaacaaaccctccgttcttctttgttccctgtttctgcatagatcgcaatgtctcttgctcgaacccttcgactctcttccatggctacctctaaggtggccattccttccgttgttggcgccggaagggcctacagctcgcttcctaccccccaggccagcagcaacggaatccgacataccgacaacgctaacgtcaggaatatcctcgtcaaccttgaatccacctgggagactatgcctcagactgagaagatcgaggtcaacaagatcctcgaggaggttcagaagggtgtacgttctcttcttctttatctcttgtaatctttaggactttttttccttgtcgttttctcttgtttttcctcttcttgggtttcagtcttctcttgctttcttttttttcttttctgatgagctgattggccacatgtttctcttattctacttgttgggaacctttctcacttacctctgatccgatggtcccatccaacaggattggaggcagatgaccgttgagcagaagcaggccggtacgttcatcgcgaatcctcttattctatcaagaaacgattcttccgagttcttccagctcctttccacacatccatctgccccgatcatcgtccctatttcgacctctctccctccggaagaatctctatctttgaacgagattttgctcgtcttgaagtgaacacgcagcttacatctttttatttatatgacatgaaatcacgcccttttgcatctcttgctcgcccattggtcgtcctccgaaaatagcctactacgtcgctttcggagagtacggtgcccgacgaaagaagtcttctgtttatgagaccaaggtcgtcttcatgatgattcttggtggtgtgttcactgctgctatcggatggaacggtttccgaatcatgggttagtactcttttcttccttccctcgttttcctccggaacctcttgatctgaacgagaccttgctgacgacggattttacctctctctcctttgtttctttttccctttctgtgttgtcttgtatccgcctaccttgttctccatcgccttgtccttctctgatgatgccacacagcccctcctcctggtaagacctcgaccatcgagtaccagcgatccatgaacgactatatgaaggagaagggagtaagttttgaatgcttttcacccaactcttatgaccgggcgggagtggatacggatggtttccaacaagaaaggattagagcgtgatggatggggatagagagagtcagaggaagagaggaagagaagcattgagatctgaagcagagtaatgaaggaagaaagttgaggtcaggtctggggctagggctagggctaggagttctcgtgtttcgacctttgcaatcgtgtccagacagacggacagcgttcttgtgattcccgaagagagaccatccgattctgctactgcaccacgtgtcgttgtttttcctctgggaaacccgattctgaattttgctgacatctacgtttgtgaattggaaaattatcagcacaaccccatctctggtatcagctccgaaggatacaagtatgttttctttcctttttttgcattcatattgtgcgagtgaatggtgagaacagacccgctgatacggcttctcctcttttcttcttctgtctttttttcactttttgcttaaacaggggcaagggaatgatccagtaattggaataggaagattgtatcggagcacatgcacaaggacgtatgaagatgtttggtttctcttaatggagtttttactccgccccttctttcccctcttgttttctttctccaaggaagagaaggcctgtgtgtttttgtttttgttttgtagatgagagaactatgcatttttatctgtccctaagactaagagggtatgtgtgtggtcagagatcaggacgagagaacatcgcgtgttccgggagttcccgttaggctgaatggactaaacggggccaatgggctgtgaacacgcacagaaagagctacttccacggtcaaacagcatatccaggtagtctctgactacttgtagcgcaaccggtcacagatgctgttgcgtacaagctttacaaccgagagcacatcctctgcaatgacagacatgcctccttcctagcgtcaaccctgttagatggaagcgactggacagatctactgaaagactagtgttagatgttagaactcgccgaacatggctagtaacccttacagagactttttcccttatacatacgtcatagcacatttggtcgatagtcttgtgagggtttcctactttacaacctgggttcttcttgctttgtcctgttcacaacctatcaccttctccattcaactgcctgagattgctttaagccgtctctcgtttgtatccataaagaagtctcgaaagatgacgacgcgtgttatgcaaagacaatccctgttgaaggttcgtccatttctcgaacgctttctgcttctcccgtcagactgcctgtgtagaaccaactattgatgaattgaaactttatctggtaatggacatgtaaacaacgctgatctagatcggatcggttcaagcgatgctatccggaagatcagtcatgatgggtcgtataggatatggccacaaatccggatcgcccgtcatccagagaggatacgctctcatccctcaagctgatctctcaacacccatcggatctgctacacctttgatccctggtgcatcggcctctagtccggcaccagcttcaacggtggtaacgccaaagaaacgagggatcttgtacagattgattagaggaacgatcatcttgaataccacactgtttgtcgtgggtctcgtgggtgccggtggtctctgggtttactatgggtacattgcacccggcctgacgatctataggaggacgaaggaaggcgttgtgtatgctgtcggggcttatgaccgtgggaaaggatggtattcttgtaagttcgagggtacagagtttcttgatttctttttgtgtgctgtgctatgattctcttcctacttcttaccatgttcgacatctttgtttcattctcgctctcactcccactctccctctactccagggggccgtgagaagtacggatactttttcagaggtgaatccgaggatggttcggtaggctcggagtctgaccctgtagtcggtacgaaaaggggataaaactagggttgtgtgtctatgtatctatgtgtgtgtgtgtgtgtg

SEQ ID NO: 976 - DNA, 17415 bp, Xanthophyllomyces dendrorhous
gtgtgtgtgtgtgtgtgtgtgtgtgtgtgtacgtataggatgtaccgtctagaatactctcagagtactccaatcattcggctgttcttgcgccgtctcattcaaagagcaggaaagagcacgagaaggcatgctagaaaatcacaccacgagtatcccatctatctactcattcccagtttcaatcgcaccaccactccgtcgtctgtgtcctgcgcttgtgaacaccttcctcgttcctccggaccatcttatccaacaagacccaagacctctctcactccctaatccactctgaacgtagaaaccaacactgagcagaacatacaatgtccaaacgcgagctgtgcagggacagcgtaagaacaaatgaaaaattccgtcttggccgactcgccgcgggcagagagataacaagaaacgattaggaaagtttccaatcttctagtccgacggctagtcattagggaatttgaaagatttcctcgcctttagtctttatcgcctttccttgcccggccgttcaaagattgttataaaggatgaggattgatccatctttttttccctttctctttttctttcatcactctcttcaacacaaacacccacacgctcaccacacgcccctaaatcaccttcgtagtacttactctttttataatggttgctcccggatcaaaaggacgagtgcttcttgcttactccggaggactcggtacgcctatctcttctttttccatctcttttcagccttagtcggttgtctcttgctcttcttgtgtgcaacaggctaatcgttcggttcattggcttgtccgctacagacacctcctgcattctcgcctggcttatcgacgagggctacaccgtcgtttgctacatggccgacgtcggacaagacgaggttcgttcatttggagatctcccctggcctttttcttgcgctaaagacaagagcgcttatcggacatctcccatcttgttctttgttgtcgtgtcaattttttttccctctttgctttcgcctgattcgtttaggactttgagatcgctcgatccaaggccaccgcctgtggtgccgagaagtacatcttggctgtacgtccgactgttccttctgcttatctgtctggagctcgtagcgctcgcatcacactcccatgcttatctcttacgcgaccgatcaacaggatcttcgacgagaatttgtgaccgagctcatctaccctgccgtccaggccaactgcatctacgagggtgtctaccttttgggaacctctcttgcccgacctgtgatcgcccgaggaatgatggaggtcgcggagaacgagaactgtgatttcgtggcccacggatgcaccggtaagggtaacgatcaggtccgattcgagcttgccttctacggtctcaagcccgagatcaaggtcatcgccccttggcgaattcccgctttctacgaccgattccccggtcgatccgccttgcttgcttacgccgccgagaagaacatcccggtcacccagacggctgccaagccctggtcgacggacgagaacctgttccacatctcttacgaggctggtatcctcgaggacccgaatacgacccccccgagggacatgtggaagttgacgaccaacccggaggacgccccggagaccccggagcacatctcgatcgagttcaccaagggtatccccacaaaggtcgaggtcccatccaccaagaaggtggtgaccgaccctgtggagatcttccttaccctgaacgctctcgccagacagcacggaatcggtcgaatcgacattgtggagaaccgatttatcggtgtcaagtccagaggatgctacgagtctcccgctgcgtccatccttcgagtcgcccacatggatctcgagggactcacccttgaccgaaacgtccgtgcgctccgagatcagttcatcaccatcgctctctccaacattctctacaacggatacttcttctctcccgagcgagagtttgttaccgccgccatccccgcctcccagcgaacggtcaacggaacggtccgactcgccctctacaagggaaacgtcaccgtgtccggcaggttctccaacgaaggcctctacgacgaaaagttcacctcgatggacgagatgggtgggttcgagccgaccgacacctcgggcttcatcgccatcgagtccatccgattgaagcagtgggcaaagtcaaacgtcgccaagggccaggcggccgttgaccccaagtcggtgtacggtaccagggagtaaacgtccgctcctcagtctccctttccatttccccctcttcttgaattgaatcaacatttcctcctctacctctaccttccctcttttctattctaaaaaaagtctaattgtgtgattcccgggcttctctcactcttatctgtgtacatgcgttctctgccttgttattcctctacttgagcattttcttttctctctgttcctctccctttatatagtctcgactcagttttatcaaaaagaaaaattgacatcgacttgaatgtgtgtatgcatatgtgtgcaaagagactgacatcaagatcaacagatcggaaaccaagtacgaaggaaaagatatgtagggtatagtccgatcgtaagaagtaacaaagaagaagaggagagaccgaataggacgaaacctatagggaagcaaagaaaaaggaaggagagtagatcatgtttgattcaggtaaagtcgaatataaggtaacatgtgagataggaaacaatgaagacaatgaaaacagacagtcaaagacagaaagagaagaagacgaaaaagaaataaagaaagaatgaggaaaaccgtgatggacagacgaaggaagaggaaatgaaagaaaagcgccagaagctagtgaagaatacgagaccagtccggaatagaggaagaagaaagcttttttaaagttgtgggagattaaaatagaaagagagagagagaggggacgtgtgctggagcaaaagaaaatgaagactttggtgaaaggaatgttgaacctgatcgacccgatcaggtgattgaactcgagaaaacaagtgagatgagggatgagacggaaccaaggatgagcaataaagaattcaagatacaggggacctgaaggtaggcatctatggccgagcacaaggcaaggtgtagaatggatgaatagaaaaccaaaaggaagagaaaaacaaaggaaagaagaaggaagaaagaggaaagaagaaggaagaaggaaaaagggctcaaccgagttcactcgtgactccctcttgcctcgacttttttgtctgtcttctcacatcccgcttgattttccattcgacgagaccataaagaatggcatcgacgatacctgaagcaaagattccccatctagattgcgcacgcgcatatacgattatcctctgaatgtcagtttactttgtaaagaacaatgtactgaagagtagaaagaagaagaggacaacgctcacctggagaacccgctgagaagagggatagggtgcgggtggaccagatcagttatgatcctggccaaggagagcgtaaagaggacgacgtaggcgatcttgaaaatgcgcagagataagaatgtgagacgagaagacttgcacatggccacgaatgacatcacgaggaccaagaaaaagagaaactaaccggaaagagaatcatcaacaggctagcttttcggttcatgaaactagagagtgattcctgattctccctgctctgaccagaagcgaggtgagcaccaggggaggccgagccatccaacatgtctttgaagtccatgatgcgatcttggtcgtcatcgtcatcgtcatcgtcaatctgttctgtccttttatgcgaccctgcaagttctgcctcgccgagctctgtcgccgggggtgtcgctggaggttctcttactgtggatcgtctggccgggttggcggatgcagaagggatgtagagatccagcggtggggcggaaagtgagtcgacagtggagatagtataatgcagagaggtcaacgaggacgaagcagaggcgcgatcggacgtgcggtcgggagaaaaagaggaagaaaagaccggcggttgagacgtatgggtcgattgcggagggtgttgagttgatgatgtgggcaataagtctatcggctcgcccgacgggtttatcgtcgatgacggcggtggtggtgaaaagagaggggggtgagaagagaaggacgaccggcaggacgtctgaggaactatcggtcggcctaatggtatactgtccgacgggccgccggaggcaatggctatcgacggcggagaataagtttgctctgttgattgatgaatcggatggagacaagcataggaatcctccgaagatgaaacgctcggtctgtgttggactagtgctgtcgatgtgaataccgcgattgaaggcttgtgcaccaaagtggacgggtccgattggatcgatcctgtcccacgcggaaggatgggctccggcctgtcacaggacggtcgacgactttctgggacggtctctgggatgtagagatcgagtttctcccaaggagccgaattggagtccttcctgctggcataggttgaggaggcaaacgaggcaatgtcccctcgaagttcgatttcttgtacatcttccgattcccccaccttatttctgtgtggatctgtgggtgtgaacgtcgagggcaagtcatccgagtggacgcccctttcgattcctactcgacggcctaaccggctaccctgcttccaccacggcctcgaggatcgtgttccatttgaacgatgagctcccggtccgacggtatcaacatcggttgtcgtacccagcggtcgcgatctgatctcgtctgattgagattggctcgagccgaggtagtcaagtttgtctggccgtcggagaaagtggaaaaggcggccgtagaggacgacgatcaccagaaacacgacggctctagggcaaagtgcgctagagggatagatcgttgagaagaaagggggaggtcgtaggagaatcagggactgggaaacaaggaggatagaaaggcaaagactaaacgcaaactgactagtagtctccaaagaacgctggccctttatcaccaatgtagcaaaaaccagaggtaaaggtgaacccagtgactcgccagcagacaccagcggcgatgagggagagtccccacatgataggagggagccacatccagtatcgctgaagatacctgacataacgggagagaggatgaagtaggatgatgtaagttgctacgcagagcacgatggcgttgatatattctggttttgcgttcgacgaaaaacggcggattcacaaatacaacgaagcgatcagaactcagcgcatatgaggaggtgtggggtctgggttgaacggagagcaagaggaacaagacgttgggacatgagctaaagagaaacttacgggtccatatggatgttaaaaggagaaagccgatagccgaacacgaatctggacctggagacttcccggtcacgagatagtatgttggcgagagaattccaataactctagaaaagagtgtaatcgaccatagaggagagaaagaaagaggaagaagaggcaaaggaaagggaccagaagtgaggaaaaaacgacaccgaaggaggaaaacaaggagatttgatcagacagtgaacctgttgtacttgacagaaagaacgaaaagagacaaaccccatgaatctgttgggatcgaaattgaaaatgtggtgggcaatggcaacgaggaaattctgttcaacttgcgaccagagacggacaaaatcagggcacagaagaggaagaaaaaggggagactcacaagtcggaaaacacaaggaacatcagaagtctcgttctgaccgtgctcgaccttgctttgaactctctcatgagtagactgatcaagactccagaggctggaggaagggagaagggaattagaagcaaacagaacgaaaggagaatagagagagagaaacctgtcagccgtgtacgtctcgccgtgccttatagatcaagttcgttcaaaatgtggacggttgagacatacacccaagaatggtcagaccaaggacgatgacatcgatgacagatccaagttgaccgagtgatttggagatcggtccgacggattctctagtgtgaaggtttgtgcgtgcgagcacactcatctatggaggtgtctaagtcggacgggttggagtcagagaaggagcgaatggacgagaccagagtcgcgtcaagccggcctatggaagatgtattcccttcttctttctcttcttctttctcttcttcttctttttctattattcctttcttgcgtaagagtctatctggatgaatgacaaagagtttgagagtgttctataaggctaaatgcactgtgagggttgaggaagggtacgagtaaagacaggcgtgggtgtgggtggtgagtttccgtaactaacgtggtcgtcgtggtggggaaaaagaagcggcggcgcaggcaaaaagccggaaaagggcgccagaaaggaaaaaaaaaggtgcacccgatggcgaggaaaaatgaaataaaatgaaataattaagtaaaatatatctcaccaaatgaaaatcatccatcgtgttctctctgtgtccttcgagaggagactgccatcgaagtatgtctatcgttcgagagtcagatatagtatgtgtgctaggatcgtcatagggaatgtcgcgctttcctctctgtctctctgaaatggatacggatctacttattcaacagtggcgtttcacttcttgggtcggtcattcttttccgggctcgataattggaacgacctcggttgattaccttggcccttccttctccctccttctctctctcttttggcccattctgtttcatttgtctcatctttctcttttctcctctcacttgtgtctgatcatcccttctttctttctttctttctttctttctcttcctacacgatgccgtattctgtctatttactctcagcttttacattcacgaaggtttagtcataataccctgtcatctgaagatttaacgttcattttgtttcccttaactttcttctttcttcccttctcttttccggcttcctgattttcattctcttgctcgctttagttctgttgttcgctttgttttctcgttcttatttggcaaaaggttgcacgtgttgttgatcgaggaccgcgcagtcggacgagacaacattcatccttccaaacgccgcctcaagtgatgcgttttaatgtttgttatcttcctacgcctaatgggtagaatatctctgattacatctcctcagcaacatcggatctatcttgtccctctttgcatttttatttattaaggaaaacccacatccggaggatagatcccaaccactaaagagagagagagaaagaagccggttaaggtttaacgctgtttcgataaacatgttgatgttcgatctacccagtcttcctaatttcttcgtcttgtgtttctatttttgttttgttttgttctgttttgttttgttctgttttgttctgttcttcctattctgtattccatgacttcatctacgtttccttggtatatacaagggctcagacacaaactcaaacagaggcggaggaattgtttataaagaaatagagcgtttctcttccaagaccatgagaacatgacgtggcgccaccttggatcttgaatcatcccagccgatatcagcttggtccagaaaacacgatcgaaagagtacagccggctctcaccgtggtgtcatagagtgagatgtgacccaagacgatacaatcactctgttcttatcttttcttcttgtctgtagttgttaccacctagaaatccatctagatagtccattccaatcggtcgtccgatcaaccgatattttgtctctccctctatctcttcatcaaaaataacatgattacagacaatactcagttctgagtttacaactttggctacttgctacttgtctgtgaatgccctgcgggtatctgacccttgcgacgcctcttcctctcacacacaactaaccgaaccgatatgttcagaatcatgcgttgcaaaatatttatctaatccgcccatctccgatccgcccacctgattttcaaaaagaaggattcagtttgaggtcctcttctaaaaaagagaggaaaacgtcagatttcaattcgcctgttgttctgtaccttcttcttgctctttgcaactgaagcaagccaaatgtcgagtgagaggcaataaaagataaccaatctagatggcgagggaaaggaagagggtttccgcgcaccgcgcgcccacgcgctcgcagcaagacaatccatttgcccgcgctaaccgcttcggtcggccaaatccttcgaactccgcgagatataacaatcgtccatctcgttaatcagatcatctagtctcaacatcataccaacctacacacccactcccacacttgttcgtctatctaacatgcctcccagattctcagccaccaaacgagtcaggtcgacagactctcctccgattcctttgatagccagctgggcagccgattatgatccttcgacaaatctcggtagacctctgatcggaatgagtcagggtgtaccagggagcccacctaatccgtcgtttactaaaagactcagcgaagttcgttgccatccttgctctctgactctccattctggattagcccagaaagactgacagactatagctcaaacttctacttgctaggtcgtcaccgatccatcgtcgagcaaatatggcgcgattttaggagacattgccctcagagaatcccttgctgatgactacaaggatgtctatggacaagataatcctaaatggggagacgggtctggagctggtgttcaagtcgaagatttcgcagttgtctgtggagccaacatggtacgtctcaggatctaggcgctgataatttctttctggattctgcgcttgagagatgctgatagttatctttggcgtatctgagcaggcttttatggctacgatcatgaccctttgtgaagaaggggacgaagttattattccttttccatcgtttgtattcttcccaatgatgtggggcttctttgtcgtctgtctcctgagcatttcttacctcgttcctacccttcactcatacacccggacagatatttcaaccagacaatgacaatgaccttattatccgtcaagcctgtccttctctatacccaatctccttcgttcattcccacagtggaggattgtcgaaagctcatcagcccacgaacgaaagcaattacgctcgttacgcctaacaatcccacgggcgcgatctacccaccggagactttagctggtaggattgatcaatacttctggctgtggaccgtcttgtttgaggagaaagaaacatattcaactgaccgttgaggctctttctcgtacgtatcctccggaaatcacagaatttgccggcctagctagggaacatagcatcgcccttattcttgatgagacatatagagactttctgcccccgatacaaaccgatcgacctgatgttcatatcagaggaaaagcacaccgtctgtttgatacccctctttggagggaatgtgtaatttcgatgttttcattctcgaaagtgagccctttgattctttccatgcgcatgatcttgacaaccttcctggccactaaacgtttttggggggttgccggtcgcatatatcgtttcctttgttaaaagagttacgccatcccaggtcacagattaggtgtcctcgtagccgatccttccttcttgaattcagtgtcgaccgtgttggattgtatgcagatcaatccgcccagaccctctcagatcgcacttgcacctatcatgaaagatcttcgatcaggtctcattcagtcagttcttcctctgttctcttgttcattggtaaaaactagcacacacgtattgacaggaaaaattcgtatctacttgtttttacagaacatctctccagtttacaaaactcctagccgtcttttcggaaaccctgtcaacttgtcctggttgggaagtcctttcttcaggagctttctacgcatttgtagcccatccattcaaaggccattcgtctctgagggtttgcgaggtgttagctaagaagtatggtgtgatgactctacccgggaccacttttgctggtggtagtgatgttgatgatgtcgccaccatcaacggtcatggtgccgccactgtcaatggtcatggcaaggtgaagaaagtgaaagcaggaggtcaatggttgaggttcgcagtcgccaatgtagcagaagatcaagtcagagctgtaggtgataggttaagaagcatgaagcttgaggatttagagtagagcatgacttcagagatcaacttttgttgctttctatcttctttcttctttccttcctcttttcgtagggcgggattgttcctttcttttcagagaaagggtgtctttctttctatcaacatgttgtagatcatcttttccaagtagatttgtttctttgcctttcgcctctcccaggaggtttgtatgcttgtaaaaatgtgcgagtctttccttctccttgggttttgaagtgtcgcgccgggcttcgatcacaaatatagattgtcgtgctcgctagttcgcaaacttgcaggatactgccattatatttgcccctgctcccaaatagccggtcaattccgtttatcacatatcctaataaagtcagacatcaaagaaaagcgtcagcatgtctcatcagatgagtaatcgagaacgaaaacaagaacagatatggctcgaggcgacagattgacgagaggtcttacttttcttgagtatcggatgcgggcatttatctactcgatcttcagaattcagatccgttttcgaaactagaaatcagtcgcccgaccgccgtacgtccattcgttacccaacaacggatctttcttcggtccgccctaatcatacataaaccgagttcaaataggatcggaaaaaaaaggataagaagaaaggtaagaagaaaaacttgattaatcccaatcgttctgaatgaaagaagaaggagagctcgggaacgtaccacctctccagtctgagggttgacctccccatcaaaatccggcttcggcttccttctcaggtcctgatgaatatccgagtcgggtacattcatatcaaccgtctgtgctttcttctgaagcgcttcaaactctctctgaagcgctcgaggaagtggcggtggtccgggacgagatcgaggggtcgatggtggttgggatgatgaggcagagtcaaaggtgggagggctcatcgctagcgttcgagcagcgagaaatcctcgaggaataaagccagcgcgggaaactctaataaccgttcgggcgaacattgtggtatgtatgtgtgagagagtgtgtgtgggcgtgttctgtagaagagaagaagagaaagaaagatcacggcaatggacgccgaaggaaggcaaagtccgaagaggcttatgtaagcaatcatctgtgacgcgtcgacgcgtcagtcacgtgcttaaacacgtcgtcatatcatgatctatagaaacttgggaatgaaacccgagagacacgaagcaaaaagccataggcatcagagcatgagggtgtagtatctcgggggaacgctattatactcacgggatttgtatacgctgagatgtagcgtagatagtgtatagctctaggtagatcaaaagttaagggccagtttcttcgactctaaattaattttttccctcccgcccgagaacccagtctatccatctcccggttgccttacttaccgcttgacagagtcccacagattcttacactcctcatcagccgctccttagaggctcttcatcatttgaccagttaacatataaacggacaattaaatcatccctccttcacttctctctatctgcaacaaaatcctaaagtatataccctcaatcatggagcctatggatgttgagaaaccgatacattcggttccggtctccaaacctatcatccctactaccgatttgaagaaggatgtgccactatcccctactgttgagaacgggaagagactcaagtctgagaatgggagcgatgacgacgggaaacctttggtttgtgtcctgtttattcttaataaacacgggagaaattcatcgagaacgagtctctcggttggactaagaaccctggagaccatccctcgtccggttgatttctgacgcgtcttctcacaacttctctctctctctctgtcatttgttttctaatcgttgcccctcatcactccaactgaactcaacagtcaaagaaacacaaaaaatctgctcttcctccgatcaagaaacggaagactgcaatcgagagcagcgatgatgatgacggagaggactctgctggagagcaggcggcagagcgtttggcagagaacgcccatcaggttcgttcctgtttacacacgcgtctcttctgacacccgaatccttctttatctgacatctgttctttgtgtatgcgcgctaatcgtgattgctcttgctgactgatggccgaattattatcaatcacatcattgcttgttaccttcggtctcttccggaaaatctcccttgattcagatctattctactgctgtcaaagttgaacccattccttctcagggaaaggaaccatcatcgcgcaagacatccgcaggatcttccgacctgtccgacgacgacgttcccttagctaggtcatccaagcacttttcggttactcccgccccagaggatatctcaatcaatggaggtgatgatagggagtcatcggatgaggatgacaagccattggcgaagcttccgtcactgaagagaaagaaaaagccgacggtcgcggtcgattcggcggatgaggaggaagtggatgtaaaacctttgaaggataagttacccgcgctgaaaaagaaggtctcgaagagagcgacaaaggaggacgaaggttcggagactggtgagactgatgagaacgacgcaaccaagaaaaaggctgtagccaagaaagtcaagccaagaaagtctaagaaagataccaggttcgtagtgctttaccctctgcttcatctacttgtctctttccccaatcttccatatcaaatgtgtgttgcttacacattatttcttctcgtttttgtctgctcgcctatcgactcgtttgttgctcactagcgaggaagaggattatggcagtgaagatgagaagccattgaagaagagcaagaagaagacaatagtcaaagacgagcctgtcagcaagaagactgctactgctacaaagaagaaggagtcgactcctgtcgccaagaagggaaagggaaggaagaaggaagaaaacggagatgatgaggtcaaggaggaggaagaagaggaagaggtggtaagtcaaacacaaccttgggcgaatgctcttctcatcacccatacagcacgctgtctgacagcatcaacattccgggtgcttttctacacgtattttctctcagtacaaatggtgggagaatcaaaatcaggacagctcggtcaagtggaccacgcttcaacacaacggggtactcttccctcctccctacgagccattaccgtcaaacgtcaagatgctctacaatagttagttcccactgatgacgtctgtcgcctggtgtttgcgaaaagtaaatcaatattgactcccaagctcttccggtctactcattttctcttctccgcaacagagaaaccggttgaccttcctcccgactcagaagaggtcgccaccttcttcgcaaaggtcatcggaacacagcacgaggaagatacaatgttccgtaataacttcttccgtgatttccaaaagattctcaagaagttccctcctgtaagtgtgtttttcgctaaggttgagaagatcatctgattcaagactacgcaagaaagcaatgctaaacattgtaaaaatcatcccttctttgcatacagcgagacggaactcagattgaatcccttgataagtgtgatttcagtcagatggtcactttctttgatgccgagaaggaacgcaccaagagcactccctacgcggtcaagaaagagttcgtctttgtctttatcttctttcttgtcgatcgtctagagaaacacaccctaacaattttctgtgccctaaaataaacaggcttcggaagcaaaaggacgctgacgaagcaccgtaccagtactgtcaactggatggacgtaaagaaaagattggaaacttccgtgtggaacctcctggtctgttccgaggacgaggagagcacccgaggaaaggaacacacaagttccggttggcccccgaagatatcactctgaatatgagcaaggacgcgccgatcccggtccccaacatcccaggccagtggaagaaagtcatcaacgatccttctgtgacttggttggccacctggacggagaatgtaaacggacagacgaaatatgtcttcctggccgcaaattcctctctaaagggacaatctgatatggcgaagtttgagaaagctcgtaaattgaaggatcacatcgctcgaatccgaacggactataccgaggctcttcgatcaaaggtcactcaggacaggcaacgagcgacagcgatgtactttatcgatatcctcgctctcagagcaggtaatgagaaaggagaggacgaggcggacacggtcggatgttgttcacttcggtacgagcatgtccttctcaccccgcccaggacgctcgagtttgatttcctcggaaaggattcaattcggtatagaaatgttgtagaggtggacgagcaagtgtttaaaaacatcaagcttttcaaaagacctcccaaaggcgagggagaccttttgttcgaccggttagatgtccgttgacttttcttttttcttttcttcttcttctttatcactcctcagcttcactgaaactacaattttctcttctctacgctggaaaaaccaaaaaaaaaccacctcacttgcttgacagacgaccgggctgaacaaacacttgggtaactacatgcctggtctttctgccaaggtgttccgtacctacaacgcctcgcacacgatggagaagcaattggacgaactcacaccggcagatgggtcggtagctgacaagctactggcatataaccgagcaaacaggatggtggccgtgttatgcaaccatcaacgtacgaagcccaagggtcacgaggaaagcgtgaagaggcttcaggaaaaggtcggtcgtcttcttgttttcttacgagagtttccttcagtctttcgaaggtgaacacaggtcaagacggatcgagttaaaaacaaatgtttcttctctcaaaccaggttcttgcactcaagtaccaaaggctgaaactccggcaccaagcttggggattagatccaaagtttaagaagaagggcgtgtttgcgacagcagaatccgatctagaagatgactggatcaagtcccacgaggaatcgcagaaagagattgagattgaacgtgctcgaaagagattcgaaaaggtttgtccagtgtatttttgtccttctggggttcagttcgatcgaagtcctaatatgcatatgtatggacgctagaccaacgaggtgaaaagagaggcgaacgacgaggaggaagatgtcaagtcactcgccaagacgatcgagggcatcaaggaaaagtgggaggcgatcaagaaacagacgaagcggggtgaaggagagcccaaaaagggctgggatgaagaaaaagctagggaggctctcaaaaagatggacgatcggatcgaagcagccaagacgagtatcatcgacagagacgaaggagccgaggtcgcgctggggacgtccaagatcaactatatcgatccgagagtgacgatctcttgggcgaagaaacatgatgtcccggtgacaaaggttctttccaaagtcctgatcgacaagttccagtgggctcaaggggccgaaccgtcctggcggttctagaaagaaaggcggtcttgttttctcatctcttgtttctcaactttcgtctctcattttaccttctttcttccttccttatccccaacaagcgagtctaagtagctcgtccatctctggatcgtcttgtccggttcgccgggtctgtcatacctgttctcactcctattccctttgatcggtcctccttttctctctctctctcgccttgtctttaccttttcattttcttctaccgatccttcgtcctgtctctgttctctgtcttctccctattttcttgtttctcttcgttcgtattcagccaataattcacgattcgtaccccatcgttatgaggaagctcaaactccggaaagaaaagacgagaacaagacagaagagatggaaagaggaaaaaaggaacaaagaacagaaagggaagggacagaaccgagaacgagaacgcaagccgacaaggtgggtgagtcgcactttgcgcgtcggtcagtcggccgatgtgtgatacggggtgtgggatgtgcatcaaacatttcgcaacaggacacaacgggtgacgatcggacgagcagagaacgaaagcacgtaggatacagaacggcgagtaagaaacgagacacggtggatgaatcgatcgaacgaacgtaatgtctaggtgttgtcttgtcccgaaacttgttgacaacgaacctgcagcaagtcagagtgaatcgatatgaatatgaatatgaatatgaatatgaatatgaaaatgaaaatgaatatgaatatgaaaatgaatatgaaaatgaatatgaatatgaaaatgaatatgaatatgaatacgagtaagaaaatatatgtccagattaaacatgaagatagaaatagagatagagatagagattgagaaagaacagtgttgtgatacggatagatgtatgaaggagatctgtacagaacatatcgagcgtaggatgaagaaagagggagaaaagtaagaaagaaaggaagaaagccgtgtctttcggtttgtctcaatatatagccctcgtcctcctgcttgggatttcgttgttggcttaaaaaaatttgagttttaaaaacgtctatttgacaatctaggattatgatgaggagaatgtagaaagaagtaggatgggaacagaacaagaaggagggcagaaaatagaagagtagaggaagatatcgtgtaccgaagatcagagaaagaagaaaaaaaaaaaagaaaaaaa

SEQ ID NO: 977 - DNA, 3736 bp, Xanthophyllomyces dendrorhous
aaaaaaaaaaaagaaaaaaaaaagaaaaagaaaaagaaagaagatcagaagtcaaaggtcgaaggatcaaggtctctgcggaacgaccgtcgagatggacgggcttctcgagttcttctttcctcctactctgatcaacagatgatcgtcatcctcctcctcatcgtcttcgtcgtcatcacccatcgcggtactcctcggtccgacggcgggcacgggtgtgaagcccatcggtttaggtacagctcgtgtccctcctggggcggctgtcgacaaggaagaggccaaggcagaggaggaagcggaggtggtcaatcctgctgaagctgttggtaagggtggtgctgctgctgctacaggtgtcgaaccatcggtcgtctgtctgaacgactgaccgtggtcgggtgtggacgatccatcgcgcaatctagatggcttgggaaccactggagtaaggccgttggcggcgacggctcgtcgactgatgtccatcaggttaccttccgactgggttcgctgcaggttttcggattcatcataatcaggcaacccttggacggccgagagtgggacgacaccaccgcctaggaagcctcgggaagctaccgagtaggaaggaacctgggagagcgcgcttacgtcggtgtatgaactctgtctcgttggcgcttgcgacccggcaggcgagggaccgggagatggtctggtacttccaccgccaccgccaccgccagtgggaccggagttgagaggagcaaagtgagcggatagactggtcgagctcatgttcggtgactggagtggagtctgctcgccggagttcaatccggacgaggtcggcttatgtttgtgatgaccaaactgggtgaacggtttcatcgctttggaaggaatgttgaagagactgtgaccgtgcgagcctcttcgctcaataggaggagggccgttggtgaagctaccgctggcactggcactgctgccgccgccggcaccggtaccgtccaaaccaccggagctggccgatggctgggaagccaagctttcaggttgttgcaacggagtcatcatcccgaaaccgcgttccggactggacgcccgactggccggtcggctgctacccgaacgggttctgggcagcctgaaacctgtccggctggaagatctggtctctggaggggtctggtgaggggatcccggttgggacgaatggtagatctcttggccgttcgggtttcctaacgcgccgagggaaagcaaaagctctgaatctgcccaggagatgttgggtcgttcaggaatcccatccgggtcgttctgtggatcctggccgttcgtagggagcgacgagacaagcggtctcattccgaactgaggggatccaggtcgggagcccggtcgggaggacggcggggtgtttgcaggggaccgcctggaccaggcagcagcggtcgtgccagaagaagaagcgacgttggcgttggcgactctgtcgtatacgtggttgccgtatgagggcagatcgatcacgttctcgttctccatatccgtccggcagccgaatagcacggatcgggtgtgagcggacgcgatccgggcttcttccgctagcgaaggaggcaaaaccacgatcgggagcgcacatcttaattcggaagctgtcgtggggaagattcgaggagaaagagtgtgtcaacgtcgggtttcaaagaagatgaacaagaggcgagaggaaaggcaaaagaagatgaaaatcaaggcaggaaaaaaggaaaagaaaaagacccactgtgtccatccggattactgatcacacagctccacttgatcttgtgagagacaaagactggatggatggaatgactgggcgtggtccaggtgggcaaggggatactgatcatggtgtctacctcgctatcaccgagctcgacctctctgttctcctctctggcctggaggtacattgcctgggagtctgagtgtgaggctgtggccggatcgagaccgccgataaagttgatggtctggttcgctccggactcggtctctgatgagatgctcgtccgggggatatcattctgatcggccgagctggttcgacctgcgccagcaagggagtgaacttgggggaagtatccgtctgggccagcgccggcggagcccgaagggatgggagccgttctgggtccggtggctgaccgggcgagaggcgtgttgtttgtgacgggcgtgctcaccgggctatcctcctcccgaggtgcgtttggcggtcggatgtagttgggggcatgcttctctcgatgaacgtaagccttgccgtttcggatgtcgtgtctgattgacgcggcgacccggacgtccggatgagaagagtttttggtatggaccagggtgtactctttgacgacggtcgagatcgaggtgacgtgcacacccttcatcaacggttgaaatttgacgacgatcgggatgttgtctcctgcggcaaaggccctgggaagggggaggggacggaaggaaaggaaagagacagaggaagggagaaaaaatcaactggacgtcaacctgggcaagagaaaaaacaaagagagaaggactgacttgtgaggcaaggtaagcgagtaagcgaccttcatcggccaactgttctcgatctccaacgtctgagtgaactcgagtgcttccgaggtgtatgtcctgagaaggctgacgttcttggtggcctggaagttgctggaaaacgcaccggaacggatggcaacggcgcgtaatttgtagctgacatgggcctcgttgttccatgttcggagggaggaagggaaggtggtgtcggattcgatggtcatcgagaacgggaaggagtggatcccggccttgagggtgtgggtctgttggctggatttctttccgctcccgttgtttgacaaaaagttccattcgtggttgatgattgggtgactgtggtgatgagatctgcttcctcctctgtaggaagagcgggggtgaatatcagcaacgatggaaagaaagtcagtgatttgaaggccatgttgatgtgagagaaagaagaagaagaagaagaagaagaaaagacaagccagagaaagacaagctagagaaggaggagaggaagaaaaagaaaaagaaatagaaacagaaacagaaacagacgaagcacagaaagggaacctacccagcaccgtctccaaactgaactttggccttgccagtcagagtcagcacgacatccttcaaattcgtgctctccaccagttgcaacaccacagtcccgcccaatctggctgggttggtatcaccgcctgcgcctctgaggacgacgtggtcctggtcgagatggatctcgacggtggagtgaccgtggtggccgtggtgaccggctggggtatgaaaagaggtgggctcgaacccggcagtcgacggagtgaacgggaagtaggccgacgaggacgacggggtggacgaagagtagggtgtcccgttgctgtcgtcgttcccccacgagccttgggacccggcgggtgtctgtgggatgggcacgttgagcggactgggacgatgtccgcctgccggagtgtttgctccggaagccaacccagccggggtggatgtgcccgaggagaacgagggcgttcgctccgtcgacggcgtcagaagcgagggcagatgggaggatgaggtgtgcgatgagagccaggacgagcggggcatcgttgtggac

SEQ ID NO: 978 - DNA, 368 bp, Xanthophyllomyces dendrorhous
ttttcttttccttttttttttcttcctttttttctatctattttctctgtgcaagcaacggggggatcgcatagagcaacagaaggggagcacgggtgagtgacgggcgacttgagaacagagcgagatgccatgccgtttgcccgggggccgacggacctatcagcggaaacaagcggaaggaggatacgggaagaccgcgaccaagatggggctcacaatctaaggggaggctttggactgctagctttcagcccagagaacacggacaacgacggcgggcggggggaaacgctgggttctttctctctttccacacgggggcttctgttccggcggtctgggggcgtgtgtgggtgtgtgtgtgt

SEQ ID NO: 979 - DNA, 618 bp, Xanthophyllomyces dendrorhous
tgtgtgggtgtgtgtgtgtgcttgggcgtgtgtgtgtgtgcttgggggagtgtgggaacggataacaagcatcagaggtctcgacggaacgacgacaagaaaaaaatcctccttcgccgtcatcgggggggaaaaaaaaaagaggccccactgaaaaaacattaggaattttttctaatgcacactacaaaaactttgtagtctctctctcgagtcggcttgttcttgaacgtgcttgtgtcgtggggtggtcgtgtgggtgagtgcgcgagggtgtgagagcgttcatagagcaggtctcaaggctgctttcgggagggtcatcgggtggggaggtgtataggctgcttcggtgaccacttgcgccgtgcgccgtgcgccgtgggtcagttctctgcccatgttcttttggcttgactgcatggcctgtagttagcttgaagaaacatctgttgcctctgtgctttcgtggttgtggttgtggttgtggttgtgcttctgtgctccttgagcgagcctttggtgtgctctctttctcttgcccatctctttcttggaactgaaaaaaaaaggaaaagctaaggctttgtcttttgatacacacacacacacacacac

SEQ ID NO: 980 - DNA, 20009 bp, Xanthophyllomyces dendrorhous
cacacacacacacacacacacatacactgcgccatgtatagcccgctcatgttctctctctcgtctacacagcactagcagccaccttggaggcaagaccagagatcagctctgcgtgcccatcagtctttgggtccatcatcttttccacctgttcttccgtcattgaagccagagctacaaagaaggcaaacaaagtcagacatcagtgaacggcttcggcccgcttctttctcttttcacgccattcttccttccctccttcaagccctcttccctccttactcgccaacgagaactcacctttgttcaacgcatcagaccgcccgtcagcctccatctcgacatcaccctcagcatcttcttcggcatcatccgatcgatcgcccggtctcagtccagtggggaacagcgttgcaaacgtcagataactcgtatgccccctcgcatcgatcgccggtcggctcaggttcatcccgtacggtaccgggtcaccccttcgtttgcgaaccggctgggcgacttgtcgccgaccgtccttctccctcgccggcgcgttctcctgggtcatcagatggtcgatcaactcttggtcgacctcttccttcccatcttgagcctctccggttccttccccgttctcgtccgctccggatgagacctgtgggacaccgccggaagcaggcgaaccaggcagagaggtagcggccacctttcgtttcttggaaagtgcagcctcgatctgatgccgacggcgggcttccttcttgacctcttggtcttccaactttttggtgaccgagcccaccggaggaagcgcgatttgcgggttcacctcgtgttgacgcagtaaacattcagacatcgagatgtctttagagggtgtgggtgtgggtattggcaaaaccgagagtcacgttcgagaaacattgtcaacgagttggcccatacacatacatacacaagcagtactgaagaagagctcaccagagaacccttcggacgaaagcatcgtcacagtacgcaacacctgctcgatacaaggagagaaacaacagatcctcgtgatcttgtcgttctgttgtgcacacgtcaagtagcgttcgtaagtatatccgaaggtcgttcgtgagcacccacccctacacccacacaggcatacagatcagaacgaaccttgagagcagctttggcactcttgattgcttcccacggagcgggtagatccagaaagactttgaaccgtccaaaaacaaagagtcacacccttcttcagctttttgccagacctctctcgtccgtcctgggctctcccctaaaataaaaataaaataaaaaaactaagaacccaccggcatcagccacgttttccaactcgaacccgtccttgcagacgttccggtgtctacatctcaccaagctagacatgccatgatcctcaaactcagcctttgctttctccgctcgcggttggtgaaactcgaacgaatgtaggaacccatgcggggcgatcgcccgggccacggaatgtgacatcgagccagatccagtgcctgttgagtttcatgttggcacgttttcatcccgtacggagacacagatggttgtcagtcggcgttgaatggaaagaaggacatccagacgcgaacacaatcgtagacacaatagcgagaaagaaagaaaggaggaagacgaaccggcctcgacgacgatgctaccaggtcggacgttcaactcggccaggatataacttatgtcggccacatacaagatctgcgtccggtggggaagagccagcgtccatagctcgggtgtcggtcgaagcatccatacgaatcctttcccgtttgcagaggcgacctatgaggttgttcagtcgatcccaaaaatgcttccaacatcagtgttctcgttctcgttctctcatccctgcttctgattgagcctcaaggtaaaaagagatagagaaagagaaggagaaaaacacgaggaaaacaacaacacgcctactcaccctgcttccaaaggggacaccgatcaggtctgaatggtgatacattccgtaccggttctggatgacctctcccgattgaatcaccacaggctgcatgacttccctggtctggattgatagtcgtcaacagaacacccaccacatcagaacaagccaagccgtgagatcatttctcgttccaatatttttttttaaaaaaaagcatccaatggacaacaaagactgacgagttgcatgatcaccaggtctccttccctcatgaacttgtggtgagaaaacatcggatagacctctgatggagaaggcgccgaggacgacggagggacggcagagccggtgtatgaactcgagctctccggcacatcgaccaaaggcgtttccaaagacaaatgttctgcgctcgtcgtcatcttgagctgtgaacgaacgagatgatgtagtctagaatacgatcaaaagaagcaagccagcaaagaactcccatccctcactctctcgtacgtgcttgagggggaaagttcgaaattctgtttgggttagtcaccgaaagaatacccggctaaagatttcgttcacccccgccagcgccatcatcacaccaacgaccatcaccatcagtcagccaggagatcgagctttgtttgctggtttctagctcagagtgtgtaccctgagagccaatcttgctgttgtgtatagagtgttctgtttcctctctttctttctttctttctttctcgaattgcgttcgctaatcttttgttttgttttgtctgggtctgttcatcagctcacttagtcatcgttgtttgtatccctcaaaaaggcaagaactgttcaagcaccatgggtctttggctagcctgtagacaatcggccttgagaccatgctcggcctcgtccgtcgcttctctgtccgtccgttcgtttagcaggtcgtccggcctacacagtctgcatccgccagaacaaagtcagtcatagtattctttattattccctcttaaagtctctcttcttgtccttcatacatactttgctgatcacgactcttcaatcgactcttttgtcatttgtcacacacacacacatataggttcaaccctaccgttcgcgcctgcacgcccaaagagaattaccctaagctcgttactctcccttcacaggagaaagatcccgataaccatgatgaccgcttacgactacccgactgctctcctcctctcgtcctaccatgacttcccaaacacttctccacccatcgttgcctcctctcctccaccggctactacaaccgaatcggccgccatgccgagcgcgttggagaccgtcgaagctcttcacccaccttcctcggcaacccctttggacggagtccgtcggacgaccgcaaaatcaacctcaccactcgctccgccaggacttcaaattgacatgatcctcgtcggtgactctctctcccaagtggcgctcggccatccgtctaccacggccatcactctttccgaactcattcatcacgcccaagcggtccgccgagggatcatcgtgtccagctcgttctccactcaccctacccctttcctcgtagcggaccttccgttcgggactttcgaacgatccctcgctcaaggtgtcgactcggtcatccggctcgtcaaggaagcccaagtcgacatggtcaagatcgagggcggacacgagctcgttccactggtccgtcggttgaacgaaatcggggtaccggtcatgcctcatatagggttgaccccccagcgagctgtcgccctctccggctacaaagtccaaggccgaacggccgagtctgcccaaaagctggtcgacctcgcgctggagttgcagctcgccggtgcgtctggtctcttgctcgaagccatcccggcccggctggcttcctatattaccacccggttagacatccctaccatcggcatcggcgccggcaacggcacatccggccaggtcttggtcttcaccgacgccctcggcttctcgaccgccgacggcggaccgtccgcgcagacgaaccagcaaccaaagttcgtcagacggttcgccgaagcaggaagagaaatgagaaaagggatcgaaggcttcgtcagcgccgtcagggatggaagcttccccgggaactcggagagttactcgatgaacaagggagagtgggaagattttctgaaatcccagcagaagcatcacaagacggagtgatcttgaaaggatgaagttaaacggaagaaaaagtcaaggccaaaagaacaattcaaaagattcaagggatactagaatatgggctgtaaattagatcatgtgtatatctcgctcaacttcaagaaatctcttcagacgttctttctcttgtgtatcacgatgtgactttcctcgaatgggctcttcagttactgaaaattaaacgaccgacacatccagagaacgacaaggattctttctatatgttttagtctccccaactcaaacctcttcaaagcctgcctgactgctttccctccttgacagcactcgcccaggacgttccttccttggtgaacgtttcctccaactcatccttgatctttctcggtaggccgacaccggcgtaaccgaaggaagtgtacatctgaacggccgacgcaccggctctcgcgaactctaaagcgtccgaaccggaagagatcccaccacagccgatgatgggtgtctcgaccggtagtctagctcgaagcgcgcggacaactttgagagcgaggggcttgaccggtggaccggagagaccgccgatttctttcttgttggctgttgtttgttattgttgttatgaacgtagcaacacacaccttcaaaacgtcaggacttatgatgcaaacagtgaaaattgtatgtctattgagaaactagaaagaaaaaaacgtaccggattggagatagtctggcctggaaatcgtcgtattactaacgatgacaccgtcgaccttgctctgcttaatcgctctggcaacatcatcgatctcttccgtaccgagatccggtgcgattttgaccacgacctttggtcggacgccgtcatgggtcaccaagctatccctctctttgacgaccgtggtcaacagctgacccagcctatcacctccttgcagcttcctcagcccaggggtgttgggtgaagaaacattgatgacgagcacatcggcgtacggtccgaaagttcggacaccgagcttgtagtcctcatcggaatctgcggcagacaccttgttcttgcctaggttgatcccaagcagccgaccaggaatgagcgatcggggcagaccaggtggaggtaaaggagacgacgcgggtcccttggggaaacacgaaggagggaacatcgaaggatgcgttcggtagaaggaatccactcggtcttggatatgggaaagcgcggtggcgtgaccgagagagttgaaaccgtatcggttgatgaccgattgatcttccaccagtcggaacattcgtggtttcgggttccccggctttggtttcaataaaagattggagtatcgcatcagcaactcgtagcatctcagatcttaaggagtccagattggatgactcacctgaggaagaggggtcacactgccgatctcgacgtatccgaatccaagatcaaaaagacctgttgacacaaagaaagacgatggttgtcagtgtgatgtaaagaggttatttcccagagtagacagagctctgtctcaccatcgatggcctcggcatgtttatcgaatccggctgcaagaccgactggattagagaccttgtgtccgaacaactagagatttcgttgattcagccagacaatctaaaatctcagcttggactctaccggaacatcggagaaagaaggaaaaaagaaagacttacctcggtcgttagtccctctgcatcaacccctcgatcaacaggtcgtccgaacggcagtctcaaaagctgaacggccaaccaatgactctgctccgcgtccgttagcgctctcgccaacggcatgatcactccggtgtgcacagctgctcgagagtcggtgtaatacgcatagccatagaggagggctgcactggcgacgagaccggtggtgtacgttcggaacgaggaccgaagtttgaacgcgtactcggacggaggagagctagacttgagacgagaaccgataggcaaagccagcctgaccactgatggccgtgcggtcaacattcgaacagacatcgtatatttcgtcgtgttatctgtccgacgaaagccgagacaggagtgagcatgctattatactgacaaagagacgtgagaaggatcagcagaaagacatacaagcaaaaggaaagaagttgatcgttgagagggaaatgaaaagataaaaaaaaaaattaaaaaaaaaaaagaaaaagaggaaacaccgagaaacaactttccatcatcttcccatcagctcttgttcattccaagacgcatttgagagcagtgtcgattgttgtctagatatcttcaagccgttccaatatcctacttcttgtagagtgtgtctatgtccctgttcaagctgggtagagcgttcggtgtgcgctccggccttgcctcctcgtctctctcctcctactattccttcggctctcgccggtcggttggaaccaacatcgtagatgatctaaccgaacggggatttgtcgctaatatcaccaggtgagtgatgtaacaaagattccaagtccttcttttaactggtactgatctgtccttgctcagtccaaagttgaaggaagcaacgatgaaaccaatctcggtatacttaggtgtggatcctacggccaaatctcttcacgccggtaatttgctcgccctactgggtctccttcactttcatatcaaaggccatcaagtgtttgctcttgttcgtcctgtttgcttctactgctcgtctctgggaataaacttggcctgatagccaatctatgttattgactctcgataggtaggaggtttcacaggatctatcggtgatccctcaggtcgatcgtctgaacgacaagcgctgtccccagccactctcgccctcaacgtcgaggctattacttttcaaatcaacaccttcctcgagagaggccagagatacgcaacaaagtattcatcagactatggaaccggaaaagctggagaactcaagtcaccgaaggtggtgaacaatatggattggtcacaggagatcactctgctcgatttcctaaggacagtagggaaggaagtcaaagttcagcacatgctcaacagagactcgtgagttgtcccggctgccagttgttctcctcatttcctaagcttcttcaacaactcttgatattcttcttctcttataccaaagtgtcaagaaccggctgtcgtcggaagcaggaatctctttcacagagttcacctaccaactcctccaagcgcaagacttcctccacctccataaaactcaccaggtgactcttcagttaggtggatccgaccagtggggcaatatcacagccggtatcgacctcattcataggtcatactcggcagagtcccgggaagggcacagcaaatccacacacacaccggcagagatagaggagaaagagggcttggctgtcaggaaggacaaagcgtggggtttgaccataccgttattgacgacgagttctggagaaaagtttggaaagagcgttggaaacccggtctggttggacgatggattgacgagcgtgtttgacttttatcaggttcgtgtcattaaactgatcgctgctttccacctattgaccatgtcctgtcggaactgataatcctacggagagttgaatagttcttcttgagagtacaagatgcagatgtagagcgatacctcaagttgttcacgcttcttccgttgaaacaaatagaaaacatcatgaccgatcataacgtacgttgtgtttttactttcctccatcctcctcccttcaacgctttttacaagggaaatttccccaacaacatgcgtcttccatgcgcacatcttttacttgatttactgcaacatctcggacgggacacttcgaatttgaatactaataaaatactccattagaacaaaccggagactagatcagctcaacggatattagcttctgaagtgacggaactcgtacatggccgttcgtccttttcagatatcttgttgttgtttttttttgttttttttttctctgatctatcattgaccgtaccactcgattggaaactcaattgataacagaaagaggactttcgaaagcccaaacccagacaaagatcatctacggctcagatctccccactttgaccacctcggacgtgctcgaggcattcaccgatgacccgaggttgaaattcatcagccgggaagatctggatactaaaatctcggtgttgatcgcaaaggagggcatggttccatctagacgttcgtttatctctctcctttttcctctgctactacccatgatggattttccaacgccaactttcatcaactgccacacacatatacaggtgcagcaaatacaatgatcacatccggtggatttaccctcaacggccaaaaggtaaccgatccgcaatcgacactttcctctgtctgcttgatcgacaaacaacttgtggttctcaagctgggtaaagccggaaactttgtggtctgtgtgaaagatgaatgatcttcttctttgtatcttaagttgtatttcatttcccttatctcaacgagagggaaaaaagaccattagacagacaagatgatcgaaggtttggaattgaaaaatgaatcaaatccgtgcataatgtttcacacatcgtcgggctgaacaagcgagaacgccgagtgaagaaacgattctaactaccctttcataaatataagatcaagttaccgtctttcagaaaaaggaaacatctctagataagacaattctccttcaatcgactcgaattgcggctatcaaaatttaaaccatgtaaagtcagccaggtggtttatgacccgtatggaaaaaaaggatggagaaatgcattgtaacgtaccatacagcttgcgaatcgcaaagtacctatcaaacaaagaaccacggaagtttaataaagacaacacggatggggacgagcacagaagaaaaggacgcacgaagcgatgaacccgatggatcctgtgaggaggaagttggccattgccagaagaactctatttttttgaggtgcccggtagttgcaacatgatcagctcgatctcccgttggcagcgactggatatgaggaaaaagagcaaagaaaatcttacaggtatccaaggtagaggaccacactggacagcccatctagtgagagtctcgagccccaataaaacaatccatagaggaaaagccagatagacgatccaccgccgatcaagaacgaacgccattgccatctaattcgttgattacacaagcgtatcaagtttgatcaataaataagggcaaacgatcagtctcccagaacttatcgtgaatgaacatagtaaggagatgcaacaaaccgatactcctcagcgcaaagcgtaaagtctacagatcgaaaggtcagttaaattcttttttgtgtataaaccgaagtaaaaaataaaaaaattgaacgacaaaactaaggtcttacaggtgaaaagaatagtgatcgtagctgtggtcaagacaaccacgcagaaggtcaagaataggaatccgaaagcactaaaatatcaatgttttggcgagtcatagatcagtatatgagtgatgtgaaagctgaagtataacgagaaatgaactgactagtacgccttggatccgaagagactagaaagaacgactgcggtcatgaaaaaaggaggattacaaatcaatcagacacagatctgacgtcaaacactgtgggtacaagaaaagtatcgatgtacgcacagaaaagctcgacaaacgcggccgcccagggaagtagtcccgcaagcaacgtcgcaggctatccgaaacaataaggatgggtgaatattggagtcggtgaagaagcagagacattatcctgaggacgcttacccatttcttcagatacgttggacccggagggatctgacggggaatctgattaaccttagtcgggtgctcaaaccccttattcagattgaagtgatcggaaaagaaaggtcagacagcatgatcttcacaccatatcatgataatacagtattgtatataaaagtttggaagacgcactccgtgtttaataccaaggtaagtccccaacacgttgagcggggttgagatcaagaaccaaagcgccacaacggccaagatcgttccgaacggaacggctccagaggacccgcttgacacgagaacaaggttcagtaggaagatgactgcaaagacaattctgtgttgattcaatgggaacatgggaagcaggtcagcgaatctcattctgctgtggatgagtgcattgttgaacgtgaacttacgtggggaacaggaaggaggtgataaagccaagctttcggaaatcttttccgtccattgaagcaaacactctcgccgagacatatccagaaatactgaaaaaatttatgacggaaagaagcacttagttgttgttcgaggttgcttggaaacactataaaaataaaacaaggaagaaagaacacatacactccgaaaagggtccatgataggatcatgactgttgccaagcttcctcggttactagggctcaggaatccaagaagtgcaaacccaagcgtgacaaggaccatggcggccagctgaattccagtaccggtcatggccgatagcaaaagaggattgacgggtggtcggaaaacctcgccatgaacgagtttccaaccaaagtcttcctgtacgtcctcctattgtgagccaatatgtgttgatgagcacaacagtattcaagataagggcaacaaacggaagattgatcaaagagggcactcacagatagatcaaccgcattgtatcggtgaatatccttaccgacagttcggatcaataccatgctgaccatcgtgcagaggaagataacgatgacgagcgagttgatcaagctgaaccagtggattttggggtcgaacacgtgcagatagttgtcccaccgaagtccccatgggatcttggagggctgtcggccgagtttgaaaaaggtgttaatgacatcaggatacacgactgacgtcgaatgaggcagagaggaagacaagcttacaatccaagcaacagagtaggtgtagaaaagctcgttatcagcagtctcgctgaggaccatcctcgatgctgattgacaattgggtgttgttgatccagctgtcatagaagcggttctggttatatcgttcaagggaaaaaaacgtgtcaaacagagcgttacaagaggtacaaagtaggagtgcaatattccgagctcacgatcgagggttcatcaagacgcccacaactcggaacttttcattgtctcgagtatgatacctgaaataaaaggatgtgaaacgtgagaccatcagatacgttgaattttgatgaactgttgagtcaaaatgtgactatcaagacatactgcaggaagatatcgaaatggttgttgatagctgggacttctggatcagtatcatcatcacctctagagcgatcgagagatttttaaacatcaaattgattgggtcagcatcttcagctgagtcaagtaacatcactgatttgagcgcgggcgagacttacaagtttacaccacctatatcataaaatttctctttcgttctgacatcaattttgatctctgccgctggaagcttgtccaccaagaagttgaagccatagtcttccttgatgagctggttgatgaacggcgcgtcaccagaaggaacagacgagctacataacgtctgacatgtcgagctgatgtcatggttgtcaaaagacgaggatgtaggtaaaaagagagagagagaggaaaaccattaagatttaaggtcttgtttaccgttttccgcgcgcgctcggaattctgattatgattacttacttttccagcattttgatctgtacgaagcaaaccgaaaaagaggtaagcatacgaaatgagctgtggacgtacagaagcagtctgattgaaagatgaaaaagtgtcggtcaacgaacttcgaagggagaactcaggattctgtctccaaataggatactacccaatccttctgtctgtttttgaggtcctccttcgggcgagcaaaagtgaaaccgaggatcgtaaaagtcatctgtagagtacgtggttcaggtcacagtttgtgttcagaagcggctacgataactgctttaggttgtcataggcttacacgagatcatagatcgctgtagggtgtatcacgtagggtaggcaagcaagatgagcatacacattttctgacaaacagacgtgttatacaacaaggcaagccactaacgagtttagaattaagcattggcgccaggtggttgacaaacacctcgaccttttcaccctttttgtagtcatggggagcagttcctgcgatttatcaagagaacagacgtgagccatccgacttcgaagaagacaacggacgattgtaccacaaagaaagctctccataaaaccggctgatcgtctggacagattcgatctataggcagagagaaagatacgcgtttatccgatagaacataacctaccagggagatagaaagcggacgctctagggattgcgatcaaccctgccaacagcaggctagatatctgaagcatgtctggctttcaagacgacgtgaattgataggacaccaagaaaaagaccaaaagatgatggtggatgatagccaaaagatggatgaggccaacgagatcaacggccaagaatgcgggcccagtgtgatcaaaaactgtaaccagggctttcagttaccaagcgcatacatccatcagcatacatccatcatccacccatccatcccagccggcgatcatcacccatacagcatacagacagccaggaaggtcgttcaaacaggttcatcatgtctagttcaacagtcaagcagggaccgatcatcccaccgtacgtggcttcgcatacgatccagtctctcatcgcttcggtccttcatcaaacgggttttcaggcagcccagtcttcggtgatgctcgaactagaggatctcgttgtgaaccgttcgtgcttccctccttcttctcactttcttttgctcgtttatgtcagccaagatggatagattggctatcagtgaactgacgcgtctttttctgttttgttcctacagagatcactgcgctcgcaacggcagctaaagagtacgcgtctctagcgaaccggatggactatactccgttcgatctgttggaggcatgtgaggaagaaggcttttcaactcatgatctttggaagacagcaaaaagagggaaacgtaaaggtttggtcggaatttgtgaggccctcttctgaacttttgtaaaacctgccgttgccgttgctgtttgagatctgatcatgatatcattgcattgcattgtggttctatagcaacacgccaagcgttcgaaattcttccttcccctccttcccccccaccatttttaccctcggactcggaagacgacgagctgctctctattcaagacaacccttcgtcctttaagaagagacgaagcaaacgacagaagattgcagctgcttcgagacccgatcatattcttcctcatgcccctccatttcctccgaatcattcgtacatggctacacccgcttctgtacgtttcttctaccactgctcagcgatacctgacttctagtctgactatcaaactacttcgtttcattcaaatacgatgaacaaaaacctctcttagctcgctccggtccaagctcctaaagaaccaccaacaatcgcctcgatggacgctaagctcgctcaaacacgacttgtcgaaggcgctctcgcgagactgatcgggaaaacaactggaagagacggaaaggataaaaagaggggcgtagtaggagacaacggagagagagacttggcaggtgacttgggaatggtcaactattgggttggtatagggggtcgaaggaaaggactttgaagagagcacgagtcagtgttctttgggtgaggacggaaatgatccgcaacgagcccaccgacatgcgaggacggatttgaaacgccagccgacgacatccaaccaatacagtatcaaaagattcaaaacaaaacatcgcctctcgagagactatgttctatcttccctcacctctcttttcgtgccgacgatcctgtttaggtcaacagtttatccatcagaaacttgagccaggatggatgaacgacgacatcgacagactgcgcaaaaccaacagtagattgcacaagccaacaattcaaacaatcatagtcataataatcattgcatcaacctcaacatcctcttcactcaattggtcagaagccaatctgaatgcgagagcaagtagacaagccggaatcttaaacaagtggaacgagtacgaaaagacgattatatgatttgacacgctatgatacccgaatcggatacaagatagatatggtcttcatttcctttttttaagcttaaccaacaaagaggaatcaccgacggacaacccaaaaccaactgaaacacaagagatgagatagagacaatgatgagaccggaaacagaaaggatggaagagaaaacacaacgaggggtaatatggttataagaacagagcaaaaaaacaagagagacaaaaccgaggttaaagtagagaatgatgacataaccagatagatagccaatgtctttaaatctactgaaagtacacctttgatgtttaaaagcgttaaacaaaaaaatcagagccgatcttaagtcaagaaaaccactctaaaaaaagccagggacatacttgttgaacatctgaaacggcgaaaggtaagttgcaagccggacattttcgctgtctcgtttggattcgtgcgtccacgcaatccttgcagaatgctgataggacaaatgatggatgttgtgaataacttcgatgatcaagatcgggcacacacaaacaaggggtggaaaaacatactgtgcatgcatttggtgaggcagtgagatctcatacgtaattggcaagttgagcatctcaagatactctacaaaagttcaaaacaaatttcagcatgaccaaaagatgagattcggtcacttcgggaatgctcaagaactaagggaacagaacgaacataaaggttgtttctctcttcttgaaggctcgaatctaagccaccggaggaaactacgcttttggcctttcctagcgctttctctgacttctccagtgccgcctctttacgttctatctctcttttcaacctggcgagttcttccccagtcgacatatgggatgcgcgttccttctcagctatggttatccgagtcgtcaacgctttgtttaacttgtgtcgatagatgaacgataaggatctttgtcagcatccccaagaaaggaaaagaacaaaggagcataggcaaaagaacactcacctcggctgaacgacctttctcagattctaacaaagctttagattctgcgacctccccttgaagcttgttcactcgttcttggaatgctttcacattcgttcgtagcatggttgcctctttctctctcgaagcctgaagatgatgccatcagtcatactactcattctcgaggaggaacaaatctccaagacaaggaagggggaaacgaaataagagagacgtacaagcatagcagaaagaccattctcagactcggtgagcttctcgagtacttttgcttgcttctccagattcctcagcgtcatcttcttttccgattcgacagcctctttagctcgcatagcagcaaagtacttgttgtccgccttcgctttctttatacgagcggacaaattatgagacagttgttaggacatacactcacaaggagagatgcaaggtaaagatacaaacctcggtggacactttgaataatcgatcttcgatgtctttcaagttgagcatcttactagctgccaatgcctctgcttcttcccatgccttcgatagacgctcgacctccgagtacaacgcgtccatcgcctttgacgaccattccatcaaaattgtcagtgcgaacaacggaggaaacttttgagttgcgtaacctcaacggggtaacttacagcctcattctccttggccttcaagtcgaacattttcaactccttcgccttttcctctaacctgatcgtcagtaactttatatctttccccacactcggatctggacccagcaccttctcaaacgcctcgagtctcctctcggcctccgctagatcttgtcgagctttggactcggatgcgagtaaggttttcagatctggtttcgaaccaatttggaccagttgttgtgatagagcgttcatcttgttttcagtcgttctaaaggacgaggtaaagagtgaggtagaccaacagaagtctctgatcagattcaatcacaaacttctgtaacaaagcgacgcgacacgatgagacatacaaaaacttggtttccagatctttcacgtacgaagcctcgatagactcctcttcaagatgctgaaggaggaactggaagatttcttcgctcccagcattagctgctaatttcagtttgagtctgcctacctccgagactagcgtgagaatgcgttcctaaacatataattccattgttttcaaaaacaaatatctgatcagtttgattctgatctgaccagttctcctgatgaatgcagcgaacatgaagaaaagtttagtcagcaaaactcacctgcttagtgtttaccaaattcatcacttcttccgtatatctaaacctcgtattttctaacgtcttcttctcgtgcaactcggcctgacactcgtctctctggtttcgaagtctggcgagatcgctttctcgtttaccaagttgatttctcagtaggtccacttcggctgacgaggcatcctatgttggtcgagataagcgttgaataggttggtcaggtttacgcgctgaaaagtgatttttgaaaaactaaggggaaaaagaaactacaaaacgaaccaaagcagtatcctcgaaagtcttccgattgtctcttaacgcgtcggcttcggttgtcaatttttcaaagagattctttgcctcggccgcctcggttttgaaggtagcgacttgtacgaggagttgtttgaacaatccgcttcccgctatcaccgattccgaaggatgttcagcctttgttacgcgcagtgtccagaaaagtattctcagatgagctagaggactcgatcaaggaacagcaagcggcgagatgaaagaacacatacctctgaacgcaagatgtccacctggatttccaaccttcgccgatcgtctctcaatcgattgacttccttgagtctgctttccgccagaaatcgatcttcagcttcagatcctccgcctagagctggatgagctggagtgctcgcggtcgatcctaccggcgttccttccatctttccatccgatccattcacaatcccgggagacgccacagctgcgctatcgttcatgtgcacatcactatttgactctgattgggtagaagggacgacagcggtggtgtttacttccggttgaggcggctgttgaccgttcacgctctgacaacgcaatcgatcatactttttttcggctttcaacaagtctgccaacgtcttctcttggtactctttcgccaggtcgagctgagactgcaggagcttgatagaggaccgaagtgtcgcgctctgataaacaagcagaaagatacaggaagaaaaaaagcacattgtaaggatattgagacaaaacaggagacctttcgagagaataaaaatggcgagtttagtaatcggaaacaaagcaaactcacgttcttctcatctgctttggaacgttgtcgtatctcgtcgctactcgctcgcgcacctcgctcggccagttccacgaacttgatgagcaaatctttcgtactctgtgagcgcttgtcgaccgcggccgaaagctcgggtagatcggactcgtctctcggatagtctgttgccagaaatatgtgtcaagccgagaactggtcagggcttacgccaacagaaacccctgagatggatgggcgacggataagataagctcacgcgaagatgtgatcggtgggacatcaggaagatctttggatcctattaatcctctgattgactctagcagctagagaaggtgatagttcgaccgatagagaaacaaggaaagggtcactatggaaggaggggaaatagagtgcacaaatcaggatttgagacaaaccacgctccagcaaacctcgacgccttcgagcccggcctccaacgcatgctttctcttctcgagctctccaactctagcaagggatctgttgtgagcccgtttatactcgagcatttgtcgatatatggcttcttttcgaaacgtcttttaggaaaagaaaacaaaaaaaacaaaaaatataatgttcgcgtgtcaaaatcggaatgactatcatccgtggtgatcctcgagcacgataaacaatcaccgcaagacgaatggaagaaacaaaatattctgaagagcagcaggatttgtgtgaagtaaaagggttcaaagaaagtgaagccagctcgttgagggagtcgttcaaatgaagattcgaaagctgttgtgaggcagccacgagccgtgtctcgagagtcgagtcggataagaccaaaactgactctgcaagcaactcggagagctttctggatcgagaagtttcaattcttcctcatctgaatcctcaatgtgagctaaacaaccaacgagcttgaagccagaaaagataaaggaaggaaggaaggaaaagaaagcatagaagaggaaagagaaaaaaggacgatagaatctcagacatcagccacttgaagggacatacctcaatgataggtgtcaatgagtcagcatcctcgtcttcttcatcttctacactcggtcttgcattcttcatccgactggctttgatatctggccctccaggggccgtcctctttttacgatcctcgcttgacgtgccagaattgacttcagaataggatcttttacgatccatagtgcaattgattctgggaccttttggattagacaaagaaaacaagcagaccgttcagatagaaggagagaggatcgaacaagaagcaagagaaagaggaagaggaaggatatgcgagtgaacgtgagggttttgatgtgagaaggagaaagcaaaggtggaaagcgtacggaaactgggcagaccaggaagaaaaacaatacaaatttatgaacattttgtggtcttttcgtaatacttttcacagtctgtttcctagtcgtcaccttcatctgaaccatcacctctttctgcacacttcacatccttttcttcctctttcgcagatagatacttgattcctcagcacatcgaactcgatagcgttcatttcataacaggacaggagctcagttagccatggtcattgttttatataaccgaattcccaaggagtatatagaggagaacaattcctatagccgacttgtaatgacccgtcgagcctagaactggaaccacaaagaagaatatgccgaggtctctgtagagcttttctatagccataaacgaggcatgataaccagttcagctttttagtactacaatacaacgacaaagtctgaagattagggaagaaatcgtctagtagactccaacctacccagcttcattctcaatcctataaaggtgatcgttat

SEQ ID NO: 981 - DNA, 25799 bp, Xanthophyllomyces dendrorhous
aaaggtgatcgttatatcggctgaatcaggtctccctctgaccatcacgtcgtcccagctagaatccgaaactatagcccactgatcattgatcttgactttaaagttgacccgatccacagacacttcgccaaacgcttcaaggaaaatatggcgcaactgattgactgtctcctgttaattgcgtacgcaaagaacacacagattgagatcagatacacaggagcctccttgtcaaatagttgcaatgggccatacagatggccacagggagggaaaatcagagtgaaaacaaacctctttgctcatccctcgagtgagtatcaccatagatggtttgggatgcacacctggaggccaaaaagtgcaagtaaagaggttctccttcgcctcttcggacatgatggtggcagtagagaggaggtacaggatcgtgaagcaggagagttcttaaaggaggatttatatcgtgttgctaacatacctgagtgaatcttataacgtcttgctggcaaatttcagtaaaccttatgtctggatacgtcaccatgtgctgtcaacgttctctaacgttgggccgaatgtcgcgctggcattgcatgcagtgctggcaatatgtctggagtatgaagttgatggcgacggaagtcgctttgaccgagcagtcgaaatggacaggcctgtgaggttgcgcacagaggttcaatatgaagacggggttgaactgacgagagagagcaattcatggttcttgccagcatatataaaaacgggttgttcacacccgaaaggaaaagaaggtggaatgaacagagaggcacagagagtgggtctatcaagaagaaccttataacggcatgcttcttgacaacgaagacgcagaagagatgcaaatgaagcgttcataacatccgtacctcaaaacatgtgtcttatcatcaaataaatgaacaagacgatgatctgaagagtaacaatcccatgccccatgacgagaagcctaagcgccaggaagggaagtccgatgaggacaatccacttggcttggtctagaaagcctcgaagaaaagcgacagatggctcagtttgaagggacttgatgctaggattaagtcatgaagtttaaaagatcacattcactcacacagcaatgccgtcagcccgtccattttgatttttaccaaaactgcatgctgctgtcttttgaccatcacgtcgtcccaactagaatctgagactaaaaaccagtcaagcccgactagaatgtggaaggtcactttgttcgaagacactcggtcgaatatttcaggatggataaaacgcaattgttttatataatccttaagagatgtaaacatgggatcgagattgataaactgactggcttttggtaaagcggttgtctggagagtaagatgtggacacaggacgaacttctctgctcaaccctccagagaataaaaccctcaaagaacgagagggaacactcccagtgttaattttgaaggctacaatattcctcgccgaagcttccttgattgttgttgctgtctgagaggaaggactgggtgatccgtcttggacggacgcattctgaggacctttgaacctgacaagagaccatcgggacgatgttctgtggcttgattagaagaggacggttgggcctcctcagattccttggtcgacgatggtatccggctgtaagcgttgtcagacatgacttgttggttgccaaatagacactgatagatgtatacgagctcaagattgtaggattcaaagctggtattgccaaaagtccttcgatgaatgaaccttgaattgatcatcctgatttgccgatatccatgtggctatccagacacggtatggacacactcgagcctggcatcattatcagcgcgcgcgcctgtactacaactctgactgatcagatcagcagtagagtcatgcgattgaattggcagtgaagggcgaagttgtgacgaaagaaggagactggaagttttgaccggctcaggggaaacggtgtgtcccacaaagctgctgacgtctgccatgcacaccaccgttagggtttccagaacctagacaacaagccagagacatagcgcgaatacagacactgtagtcaatttgggccctcaatggcatatgaggagacaaaggcggacgagtgatcgtaagatgtttcgagacgtcttttgaatgtgtttgaagcttagttggccggctgaagctggatgacgtttgtgtatcatgttcgagaagttttctgtagtcttttggataaaaatctctaatgctctttccgttttccgtatccggttttctcattacaaactttgtagtctcgcctcaccggtttcctaattaaatcattcagatttccacagtatcttctttctcaccagcctcttacgttcttctcttgctccttctcttcttttcctctttgcttctctctcactctctccttgcaactgtagttcggacaagattggccttgcaatccggttgaccactgactcttcctatcttgtattgtcttgtctccttccgttgttggcatgcaaaaaagagtacagaaataatagatgtatccatatccataccaaccctcaggattacctccaacgatgcccgactttcctccaactctacccgtgctgaactcgacatctcgaccagaatcgcctatgggctttgtaaacggctctcatactcatcagcctactagtcttcaatatactgctccgactcagacctctcctcgtgatcattcttcttcttctctcgttgaatccgacatgttgacggtgaaaacccctgcaaatactgcctcgggcaagccctcgtctgagattcgaccaagctccgtgtatcctcctgaagtcagatcggtagttaaacactcctctgtcaactttgtcgatcacccagtcaggcccactccctcgcctgggattcagtcagccaggattgactctaagcagcgatatgaatcagatcttcaaattcttagaaggatcaaactcgatatatcctctggtcatcatacgtcctatagcgcgatcatcaaacctctggcactcaaatcggtctcagtgactgctgaagaggcagagagtcaacattccgctgctacagggctccctccagcttcttccatccatgctctgccttcgacccatcgtccgaaagattctagcctttctacaacgactgagacggcggtagagaccgttcttcttccagatactgacgagcctattgaaatcttgacagactcttctacttcctctacacctgcttctataccttcaatcacagctcctcgctctgttctagcatccagaataatagggaatgggcctcctgtgccaacaggaccctcagctttgaaggatcggttgttaagtgcaaaccatgaaaacgcttcccgggggccaagtacaaacatagccaagtttgatccatcagttttgcctcctacgcaacctcgggctcacgcagagggggccgcaggtaggagacaaaaaagaccaaaagtggatctggatagttcaagagatgggccaaacgcgatgatgcttgactattcaggcatgtacgatgaagttcctgctgctcccgctaccgctggtactgtcgacgtttccaaagtagctgttccagatactacttccgaagtgatgataaagtcgtccaagaaagtagcgcctgctgctcatcaaacctcctttcatcctaccgccaccactaccactactacagcagcaataaaagcagctcctctatcatcaaacgatgcttcgtccttgcatgtgcgatctcaaccagctcataccaaaccacacgaactccgttcaaatatctcaccagctcaacctatcatatcggactcgcctacgggaggattgccacacggaggcgcggatgaagagcagggtgatcagatggacgaagaggaggcagagatcgagacgtttttgacgagttgcatcgaggattcctcagccactgttgattccggcaagtcttcattctttgtgtttcagctattcatctgtaggaaactgatagtgcgatttgattctttggcctatatagataccgagagagttgaccttagtaaatctaccccaatcaacaccacgtcacgctctgcctcgtcttcctcaacctcatcctccacttcttcaatcaacaaatctaacagtccaagcatcaatcccactgaaattgagaaagatggaagaatccaaatgtcaatcttcgaacctcgaaaactggtttcctcaattgtgcaactctccactaattctgtcccaacacccattcccgttgtatcttccgcaatatcgtcttggtggaactggcgcgttccattgatgagatctagagctcaagaacctaaaactgactcggaatcagttgtttctccaattataaccgaggttcctccagcatcatcatcatcatcatcatcgtcgcttcattcagttactggcgagaaggacgctttgaaaaaggtcacgaaggaagcaagtagagagcaggaggagaaagaagaaagagaacggttggcgttgaggaccaagaggaagaaacgagagcttgaacagcagcagtacgagagagtgccggacagaccgggtcttactaacagaagaggacctaagcaggctctgaaggaaaaggaacggagggatcgagagagagaggcaaaagactacaaagaggctaggctcaatccgatggacaaggggaaggagaggagcttaggaaaaggcggtgaccggtatgtcttcttgtgttttcaccatacctgtatctctgactaaatcgaactttgttcttggtcctttgtattgccctagataccatccttatgaaaggtcgaccaacggactcacatctcctaacaagtcaaccagcctacactcgcgtcttgccagcagaggaagcgagcttcccgcccgatctttcgatctttcttctgatagacgaccggaggataaattcccgtatcggtacgacgcctccgacgtcaatgccgacatcatctcggctaaaccgaatgtacatggcgcgaagacaaacgcccgatctgtgtcacttggtttgaacgacaactaccgaccaggaaaagcacagggaatagaaatcatcagggacgatttgtcaatacgtcaatatcccaaaccattcagtccttcgcccgttcatgcccacgcgcatgtacctccgccagcctaccaatccggacctgtgcaaagctcagcctatccgtttagatatcagcctcccggtccccatcttcctcctctacctccacctccaatcatggatcctccatccacaggatatactaggaacaaaatgtcgaacggacacaatgaatcgtctgattggtcgaacacggtccgacatgctcctgccgggtacagggatccttttcctcatcgtcaacaactgttacctcaacagcagcagcagcatcctccaccaccggcgcatccaatatacccacatgcagatccatcgactctgagccgtcacccatcaagctcctttgaacctctgccgaacggaaacagaacaatcaacaacacatcagcttcaagaccagggccaaacgactcgaacctggaaatcttgagagagatgcaggctttgaaagagaagctggctatgttggaacaacaggcttccggtagcggtggtagaggaggcgatgcaagctctgcgccattgcatacacttcctatcccacctcctcatccccaaccttgtccatacgttcatcacgaacaacagcatcaacatatacagcaagaacaacatcgatatcagcagggctaccctccgtatggagctcctcctttcgcgccctctcaatcatccagagtcagaaaccttcctccaagaacgtttgaaggaggacaagagaaagggtggaccgcaaccaggttagaaggaggcttaggaggtagattctcagaccagtcagttccgccagcatatcaactccagcagccgccgccgccgccaccaccacaacaacgggatcagacatgggcaagagaggatgaagagtccaggagaagagggtggagatgatgatcgtctttccttatctctttgtcagagaagtcttcggggttaatatatatgacgatactcgaatttttggccagtgtttatgattattattggtgttcaaaggtgctccttttagtgaacatctattgtctgtagagtttcaatcatcgatcacgagtgtacgagcagcgtagggacttctttttcatgggcatgcagagatcaaaagaaagacagatcgggattcgatgtcatcggcgctcatcctcggctaatagactttttcctcgatggtctttacagaagaagttgagaaagaagagagtgcatctgagaaatagcttatcgtcttaaaaactaccgacccagtgttgctgagaatacaaatatctggtcagccgaatgtatagatttcttgagctgatacgtcatcctgtgctcactccctaacgtaaactatagtcaaggctgatgatggttcaggtcttctatcttatgctttggtctcattccactttgctttggtcttcttcaacaactttgtgttctcttttctttctttttgatttcatgtgtttgcttatttgtttgaattgataaatactatcagtttcctgaaatgtgctctctatcagtccatatagatcttgagtggattaaaaagtatgcaaccgcaagatggacacatgtgctcaccctctctccctacttttctatatacgggttttccaatccttcttccaatcactcatccgtcaggagatcgaaagaaatggagaagaaaagaaacgaaagaaggaaaacacaaaaaaaaggatcatcggcatgttaaatgttcggcatggcaaactccgatggagataagagaactcaatggctagttccaattgtcttctcggctgcgggttggtgttagccgatccttcttgtttaccacactcatactccttctttctatacaccaggccaggtttaatccccgttaggcaagattccggctaatcgtcgttcaggcatgtttctattctttctattgaccatcggagccaaaaactcgccgcttacccaccctaatatcttcactaacgtttgagctgacaatcttgtaaaggttgcacatggtacctaatgccaaaaagactgatgctgagccacctcttgaaacgttaatcccttccactgttctgattttatctcttcgtttcctcctcgtggacgatttactattaataccactgatacagtgggtcgttcggtgcttaccgtatcgaagctgttcctttaggcaaacatcgtgagaacttgaatgcatatcgagcggatcgaggaaatgagaagaaacacgatagactataaatgagacgagatggccatactgtctgttcccttttcttctttttttttcgttaacacgaatccgtcgttgtaacggattttttcaagccaaaaagatgaaagcatcatcattcctaccaaaatacaatgaccccattgccgatgggacggggcatgagtcacccctccaagaggtccatgactctgaattcaaagatgatcctaatcttgaaaaggccgatgagaaaggtgtctttgtggtagactctgttgttgaagcgacaacgacggaggacgtcgaagaggcaagtcctatcaggaactttcttaggtctcaatctctttcctcaagacgatcacgctgacgatgaacatcttgcgctttcccccatcaagttggagcgccgattggaaaacagtcaagctctggatgaagaatacgccgtccatgattcccgagatggttggtcatgatccgtcaagatacttatcatatctagtccgaataactaatcaaccactatcataacagtcgccgtcaaggttctttcgacgtttgacgacccgactttgccggttctcacattccgaacgatattcctcggtttaggattttctgcttttggatccgtccttgctcagatctattacttcaagcctcagaccttgagtgtctccacaagtttcttgttgatcttgacttatttctttggtgaggtcacaaatgaggattcagctcagatgcagacggtgttcgattctgattctggtttacctttttatctaaatctcaggtcacgctatggctactatcctaccttctcgaggtatcttcagattcctcaaccctgggcctttcaacattaaggagcatgccgccatcatcagtacgtgggagttctaccagtatgagattatcatcgaaccgctctgatcacaaacaccttcccttgaatctgacagttatgtgctcgaccgctgcgggtagtgccaccggtatccaggtcatttctgttcaggacttgtaagtcatcgaatttatttccagctaatgacagttatactgacctctgtatgaacatgcatcaggtactacaacaacaaaatgaacccaggagtcgcaatttgttagtctttggcaactctttctctttttcacgaaagtaagactgacccggtctcttcgcgcgtctgctttcattaaacaaagtcactctccttgggtcgcagcttcttggattcggatacgccggacttcttcaagaagccttggtgtaccctaccatttgcctatggcctcagtgtatcacctcggtagccatgttccaggcccttcacttcgacggtggattgagcaaacagcgaaagaaggttttctggatcatcttcgccgccatctttgtctgggagatcttcccccagtggatcttcccttggttgacgggaatcagtgtgatctgtctctttagtcacaacaatcctactacccgaaatatcttcggtggatctaacaacaatgaaggcttgggactgttttcaatttggtaagtcacagacactttgcttttcaacgatttttcgacctgaaacaatataacacaagcaatctgattctcatggctttgtacactttcgtatattttacgcctggcgttgcagcactgattggttgctcatcggttcctcgtgcttgtatactcccctgtggacccaactgaaccagaagttcgtctctttcttctactttggacgcttgatccattggcatggtctagaggactgacctacctcggtggttgttcgacagtattgggattgtgtttacatacatcctcatgtgttccgtttactacggcaacatatggtaagtcttcctcgttttgtaatccttgtgcgataccgtcagatcttatagttcatgtcatctcgttaacaaaacaggcacggaaagagcttcccgttcatgagtcaatcgatcttcaccgcgaacgggaccgtttatcctcaaagtgacatcctgacggacaatgtgttcgatgagtctaaatacgtgggtcttgcttagaatgtgtttacgcttgtgtcaaagtttctttatcattctacaatcgctgaattcttggtatttgtaggctgccgtcggtccagcgtacttctctgctaccaatgctttgtatcttcttgtcgaaaacttgaggtttgtgagaatcgatccatgtccagctcggtctcatactcaccgtttttcttttcatccctcgtttcttcctcaaaaacgtcttagtttgtcgtcgaccatagtccacacctttttgttctgtaagtcctcgcctgacggccacacagtctatctgtctagcaacgcccgctaatattgcggtcttcggtacgttcatgaaaacagattggccagagattaaggttcgaccgagctttgtcatatttgctctaatgctctaccaaccaagctgacaatgaaataatccacctattttcgcagccattcttcgtcggaatgaatccttggaataagacgaggtttgagatcaacgatccgcatttcgcaaagatgcaggtataccccaagattcctcggtggtggttccttctaatccttcttggaggtgagctctctcaagagtcttgatcatgaacaagtctttatgcatcatctcgctaactcttgatattcgccgtgcctcttccaaatgtaacagctttcgccatcgctcaggcgacggactacacaggaaatagtggttttccatggtgggccttgcttgtcactattatcatctcattcttcttggcgtgcatgtactcgacgttggcaggtgagtactcattctctatcctttaaaactcaggcgcagtcatattcaagtgagttaacgtaaaacttgatctctatcaggtatcctcggtttctaccaattctccagcggaggaaccgggttcttccagatgctctgtgcattcttcctccccggtcgacctgttgccaacatgtaagtttccttacgttcaattttgatcaaaccaaaggatgtttagcgcactgctcaagtctgccttttattcatcctgctctccgtttacgatgcaataggtacgctgcgctgtacggagctacgtcgatgagtcaagccattctcatgcttcaggacctcaagctaggccaatacgtcaagcttcctcctagagtcacgttcctcatgcagatgcttggaaccatcgtcggagccatccttaactacgttatgatgctttctatcatatccgctcaacgggacgcgttgttgtctgtttccggtactcgtctctggtccggtcagaacgctcagtcgtacaactcgaacgctatcgcttggggagcactcggaccaaagatgttcacagctggaaacacttactacatgatccctgtctctctaggccttggtttgttattgcctttgccgatatacgccttgcaccggtggaagccgaagtttgggttcaacaacattaatccagccatcatcatgcaatactccgcctacctgagtgtcggtgtcaacacgtctgtcaatacttccatggcgctcggtgtgatatctcagtactttgtcagaagaagataccccaaaatgttcacaaagtacaactacatcgtatctggcgctatggatggtggaacccaagtcatttccttcattcttaactttgcggtgttcggtgcgtctggaaccgcccatgcattccctacctggtggggaaattcggcaacgtactccgtcgaccggtaagttttcttccttcctaaatgtatagcgtgttcgtcggctgaactaaatcttggcttgctttccctcatcgtgatatgacaggtgcatggcgcctgatagttaaatttctttctctgtttgccctatgacccatcttgttcgaaagatgtatatatcgagttattcttctctcttgtcttctttttggtccgttgttttacgattgtcgttagttgtatatttcgtgaagcgtgtttctcctgttgtttgagctactttctccgtcgattatgacatcaagaaacgatgatatgtgaatacttcatttattgaaagttctttttctcgataatatgatgaaatcagggcggaagtcattccttggagtccccgtcgggagggtgatctggattcttgattactccgctcgttaaaagccgctgtaagatctgatcgtcgttcatcccaacactgagttgtcgcgcgagtgtcatggaaagaaacatgagcatggttgatggtccaaatatcagattcgtgtgagattatgtgaagaaggcaagaagaaaagtaaagaggagacaagaagaaaacgacgaacgagagctccttcaatgccagctttagaactgggccggcttccatttcaatcttgtcaactccatcaccatcagccctggatgggccggtggagaccatgagaatcggtttgttttcttctttagcttgtttgatcaacctaaagataagagaaatgagtacgtaaggaagagtcttgattagatacgcatctctcaaacaaaacaaaaattagaaaccaacctgaaagcggagtaggtggcgagcgaagtgcccagtacaagaatttgagatgaatcagtgattgcttgagacctagatgacgaaactccgagtatgcatgagtttttattcgaacaaaaaatcgagggtggagcgagaagaacgatgtagtgatcaaaacatacgctctctctttgacatcttcagcgattgtttctccaaaaaagacgacgtttctaaatggtaaatgtaggttgattcaatgagttcgagatacaagtaagaataaagccaacatatttggcttcaaaaacatgaaaccactcacggtttgaccttcagtcacaagtgatttcgtgaacggtatcatagattattctatcagcaatctctagaccaaatctcctcaccgaatggttgttgactggcacatacgatatctccacagtcctgacaactgggcacattgaatgactcatacggtactcctctcaagtcaacctagcaataggaaactatgtggttagtaattgtatacacttcattcgtataagaattttaattgaaatcaaaatgaattgacatacatctccatcaggattcgttcggggagacgttccagttttggctgcttcctctgcgaacatcttccatgttgggttgagctgtatgcacatgcatagaacacccgcgcataccagtcaaaatgaaaacataattgacaccaacagttatacgaatcattcactaaccctctctagggttgcttgaaaatcttctctagacactgtgtgcttttgtttacaatggacgagctaagatcccaagaaacacccacatcagacatacagtttgtgagataaaaatgatggaaaattggagtgacaaacatgaagcgtgccgtgaagtgctaatattctttgatcggtctcttgtttggaatacggtgaggccttgttatgaaggccgtcgacctgataatttacaatgaccgcgatgcgcgaagcgatcatgagtctgctcttatcatgcatttgaaccagatcgaccctcttgactcacgttctgtgtaatcagttgacgagaaagtcccatccacatcatggctgctattccataatgtattgggtttggctgagaatcacggactgaacaattcatcgtccgagtcagttggatgtgatacttgtgcggacaaccttggagaagcactcacctggcggccatcccaagaaacctagtagagttggaaccgagtgacaaacgttaggggttatgttcgatcaagatgctgatgtctatcgatcgatttatcagtcttacctctggaccaatatcgctttctaaagctttcaccaaccggcgatggatcaactaattctccatagtagaccgggcggactgaaaccaattgacaaggttatgtaaggtagagagatcagcaaagatcgtgtgatcaaggcagtgagtttggttttatgactgccttcgtacaattagggtttgttgtataatgcctgatcaaaggagcggtgaaccacagagtagtttgacaattagaatactttcagcccatgacacgctactgatatcaaaaggcaaggcgttcgaggtgatcatacgcacccttctttccctctataagctctaataccactatctacactaacacctgctccggttatgaccaaagttctacccttgccttttgccaaaaacgaagacaacctagaagccgcttgaggaagcgtgatatcggccaaaggattaaagatcggagttgcccgcggaggtaacgtggggattgatatgcggaccatcggtaggattcaagacgaaaaagattcgaccagggtctcctctctgagatcaatacagtatatctcgagagcctatgctttaaaaacctcttcaagcgtgtctgtgttcaaacaaagatagaggtatagagtttatgtgtacagggatgaagaaagtcaagcgttgagttcgatattacagactgatcgatgggctatatgaattattcaattaattacgtcatcagccttaaggcaatttacctaagtcctcgcgctacttctcgaacgcacgcacgtttattgttcccgtttggtagacttgcctacaactttctttgaatcttcaactttttcattctcttttcctcttctactcatcatccatcgttcatcgtttcagttgccatcgtcagaaggcttcgtactgttagagaagctagcagaaccattcgaactcctaggagctccaaatcatccgtatatctcaacaactaccccgtcatgtcctcgtcttccgatacagggtccaacaacatctggtcaaactttttctcggaacccttctctgaccgagtcctttcattgcttcctgggaagagccacaaggacatcagagccaggaggcagcgtggtgtccgatcggataatatccccgaaaccaagttcgttcaacttttagactatggtcgcttctggtcgggttttgtaggtttcgaagcttatatactgtaattcacagtgttggacccggagaagagcagcctctcttgtccgactttcatcaactcggcggaggagtctcttacggaacgtctggggagaacgatgaagcacccgtcaacctggtcagagttcccaaaaaggtggtctctgtgatcaatgtggagcccaaagtttggtttgcaaatgagcgaagtacgcatctatttctacccttcggcgttcgaagtttggctttcgcacagagaaccacctcttcgacccagtcaaatatgatactgactttttttggacgaccttatcgtgactgatctagcgtggttggcttacttatcaatctcaatcttgcttggtactttggctggaacccttttggccgctaccaaccacggaatgaatgcgcatcgggcacatatcactaagatatttgctggagtctatgcagtgatgtacgcccccgttgtctggcttccattgatcgtactgctctgtttatttctttactaaccactgcttcattgcgtattctccacagcgcgcttgtggttcttctttacgggtatgctatcttccaaaagagagttacgttgatcaaaaagcgaagtggaaagcactttggtacgttccttatctactctatcacaagactggatgagccagtttctgcaaagctggtttttcatccgtctgtgcgtgctttcatgggcttacattcatcaatttatagatgaggtcgtttttccgcttcttatctcgatcgctatctttatcgctatccttgccaacttcatcattcgaggtaagtcttacatatttcttgtcttgaaagatggcagataagcaaactaacaggactgctgtcttgatatctcataatcagtgcaagaattgtcagtagcgttcctagttctgatattctgaccgttctgaaagactaaccttgtcccgttttcttctggtgtgcacgtgtggtagccgagagaggaagccgcatactcagcccatttaaagacttttaattctttgtttatacttaatgttttattggatatgcataatctgcaatatagactgtcattttttttaaaacttacatgcgtcaattgttgaaaagggtttttttcttcttcaaattataaccgcatctacctccgacaaactaaccagacagacacttgccatgcgttctcgtaccctcacccttagtgaatcaaaccctaaaaagcggtttcgactgtccaccgcaactgacagccactcatacattgacgagccttcgacgtcaacaacaaacctcaacgcgaggtacgatcgattgagtcgggaggttggtgtcaagaaatctggcaagagatttaagcacaaacgagaggttgaccgcaaactgtcaagagtcaatgagcaaaagttggttccagatatagattcttctgaagagaaattaccagggctgctcgtgagtgcaacagacctgactatatcctctcgtttgagacgcatatacccgtcttgttccaccagttatcaaggaagataataaacaatttgtatgtgctgcttcatcatcctgaaatttttccgaaggttgatacacctttcaggtcgttggcaactccgacctggtttaaaccatccccgatttctggatctggggtctctagtgatggatgtgagtcggcctggtatcatggacccagaaggagatgttgttcatccgattttggatcgttcactcaacgtttcttagcgcatgtagtccactttagctcgggtaactaatcaggatttaccacgtctcttccaaaacgtctgtagatccagtgtcgaccccgttgacgtctcctcattcaatcataccattttctgaacctcacctcgctgaaccattttcctctgtcgcacgcaataatttacctcctccactccgtctatcaacttcaccgcatcaagatttgcagctctcttatcttcgcaaattctcgcactcttctcatgatccaaatgcgtcaagtgacttgtcatggagtaattggacatcttctccgttgacagccgagcgatatcttactgaccgtccgttgcatagttacccatcacatttggtcaattccgatcgatgttcaacggctgtaccatttgaagcgcgctttggtccatcagatgcgaggtctgacccttcagtattcgatgaagatttgttcttacaaccgggtggaggtcaagatatctaccaacaaagtccaatcgagaccgaactagatggaaacgctcaagatcgacttgcgccatggcagagtcaaatgaacaatgatatcttgttttatcaaaagcaagatagatacttcccatgcactccttatgtaagttagtcaaagtcagtgtctggccaatatcgacccgactcatgccttcttctacgtcgtgcctctatatagtcaacttctgagaatatcccattctccaaaccgcataatatggccgatcaccattggatttcaactggttctccacttcttcaccgttcgattcttcctaccgtatatcaacccatcataaattctccgcttgctcatcatcagcaagttttatcaaggaaccggttggcggaagactttattgaggttacatcaccctttgaacctactgtatctacagagcttgataccgtgagtaggctatcgtttgcgatatataacctttttcttgtgcaataatgcatacgtcacaaaccatgagcttaaactggactgttttgtcaactatgttcatctagtatcctgagcatcctttgacaccggtaatttaggaatccgttgaatattgcgctatatcttgcagccttttaggctgaatccttcattggagggcttgatattgtcttgacaggaactcattcgacatctacagcgcttgagctcagaagaagctcggcccgccatatcagtcggaagtaagatctttctcttgaatgtggttgttgctttggagagtatactgatatgatacaactttttgtaagacctgagggaaacaccttccatatctgtcggatcaatcagagcgagtccgtcggtctctgagcttggaccagactctcacgcaaatctgttcctgaacaggcatattctaccaggagaaccgactctcaacccgttctacgatgatacctcaacagacttgtgcgctgttattaaaggttatccgcgttctctgtccgttacagataacgatgttttcgaagatggaagacaaaggagatcgcactcagttctgtcgcttagacacgaatgttgatcccctatgtatcattatctatgtacttcttcttatatgccgaatgacaaaaagtttgaaaaaagcagatcaaaaggataccatgcagaacggtgagatccatagtgtgtttctgttgcggataaccggcgcgctatcttttacaaaagcggagatggccgtcataagatgtcgcccgcctgaactactccgaattcgtcttgaaatcgccatcaaccatccatcttctcaccttgaatcatctccgtatccgatcatgggtgtatatactccattacaagaccggcctcagtcgtctgttagaagatctcctcttctcttacttctcttcatccctctcctaggagtcatccatcttgtctccggtccacttagcgagtcggctcactctgggcttgccaatctctcgcgacatcactcgaacccagccgatcggtggtccgagtacaaatcattgaaatgtcccgttcaggtcaagaccatcttgcctgcaaagactcttgttctcccaagtggatacagagcacaaagtgcaaagaggttgtcggatgctgtcgtaagtatataccgcgatgattggttatctttttttctcctacctcaaacgctgatcggtcatatccgatggttatggggttttttttacgatggttaatgaagaaacaagcaactatttcatacgatgacaatggtctacctaccgaagacaagcgatggctccctttctttggctttcaaacgtggttgcaggatacttttccagcggtgtttgaacatcctgcggtcacttacgaagcggtcaatacattgggtatcttgaccaccgtcaaaggaagcgatccgtcgttgaaaccactcctcttgctggtaagtttgataacttattgcttctaatttttcgattgcctcactagaaacgaacgactaaatgttttggtcatctgaatcgtccgaaacatcagtcacattacgatgtcacgcctgcaccgctcgaaacatacggcagatggactgtatgtagaagtttctttctcgatgcgcacacggacatcatctagctcacacttggactacatttaccaatagcacgcccctttttccggattcattgatgatgaatatgtctggggtcgaggcgcgagtgacgacaaaactcttcttgtgggttcttggcatctcaatcagccatcctacgagcttttaccgattcgcttgaccgtttacattaatttttgcagattggccaatatgaggcactttctctgctcttgtctgatccagattgggtaccccggcgaacagtcatcctctctcatggattcgacgaggaagaagtgttccaaagacaaggagccggcgaactagccaaattcctcgagaaccggtacgggaaagatagtatgctcttggtcattgacgaaggaaacagtttcgccgatgcttggggagacgaatttgcggttcctgcttctagcgagaaaggatatctggacgtcaaatttacagtcgggtacgtcagtttcccaactttttccttgatcgaaacatagatctgaccacaaattcgatattatgtcatattcactcttcagaacaaccggtggtgtacgtgttttgttcttccttgcagaaatactccttcgtgatactgactcatccattcttcggatatcattgatcctaccagcactcatccattcctccctctcacagtggaatcggtatcatggcagacatcatccatgcgctcgaagataacccttactctccttccgtacgtcacacagcatcgaattgatatatcttgacacttgtcattcagggcaggcctgacatgtcagtcacgtctctataattctcaagtttggtccggatgatccgacattggcattcttgacctgcgctgcggagtttgctcccaagtttcccaggaaatggtcaaaattgatcaaggatgggtccaggaaatcattgactcatttggcaaatgagttcggaaaaactagtcctttcaaccatggtagctatttgtttctttgcttactcatatgttgtcggcgtgcgcgcttcatcgggatgaccaagtatctggcaagtgacgattcgtttcgtctgttctgtataaagctttggtcacgactactcaagcgattgatgtcattcatggtggatccaaaggtatgggtatcataattaccttcactcttagaacagaagaattgatcctgatatggtttcttgaaactccctctctctactttcagtcaattcgcttcctgaggaagtgacgcttctgatgaatcaccgagtctcattcgattcaaatctgacctcggtgcagaaatcgattgcctcccttattaaacccattgcctctcactatggacttgccttctcggcttttgccgaggacatcaccaaatcgatcggaagtgatgtgcaatctgtgctggggagtaagtatatcaaggtggagactctaggcgttccgttagagccagcgccgaggagcgtggtagatggtgaagtctgggggttgttggctggaagcatcaaagcagcctttccaaagaaagacggcggggagcgcatcgtctcgccttcgtgagtatatgcctggtctcggcaggtgtctttcactgcgttccgtttgtgttagtctgctttctgatcaaggccctcaatgttctgtagtaccatgaccggaaataccgatacaaaggttttttgaacccatactatctttccatgtaaccgcagccatgttgacgtcgtctatccttgacctcctttttgttctaatctttataggtataccactcgttatccaatgcgatctacaggtttaaaggcgtacgtttacttcaatcgtcgtgtgatattggtgaagaataacgactgacatcattgttgtttctctcaactcctcaggacggacctggcggaggcaatgcagtatgtgttcaatcctgatacaaccttcctgctttctgtacgattgtctcaaagaaacctttgcctaaacaatcgttctgctccgctttctttcgttcttcgctgttatagcacactgttgatgagaaagcacctatcgaaggccacttgggaatcattcgatggatccacactatgtgcgctcttgaaccaacttcttgtctactacccttagatagattgacaaattgactgacaaactacccggtgatacctttttatacgtccacagcatacaaaatgctgtaagtctatttctcctattccaacgtagaatctgttccgtacccttagatctgacgaacggttgtgaatgttggcatgggtaacacttttaaaacatcaaggatgcttacaacggacctcagtaaagcactcagctgtacgactttcaacattttccttttcttctcgttttcttttctgtcgttgtatgattttgttgtcctctttcactcttgtactgagagttgtgtgtggatatcgttatatagatacatgtatgagactttgggtaaatgaataacggtgattgagaacatgaatgtgtaagcacacgagacagaggtcggtacatcgagaatggacaacagcgcatgctgaaagtaacaaggagaattgttcacgatgaatccatctcaacatcctcttcgtcactctcgctctcgccgaccctgttctgactccctgcaccaatcacactgtcatctccactctcgctatcactcaagctagaatctcggtcgggggggtactccttaaatgcataacctccctttccgatctcttctatcagcttatacaaatcagtatagagttctcggagtacagaaggcgccgtttgtggaatcaagccgatcgctttgtcgagataggtgagagcagttcggtggtcgcttgttgccggtggggctaatggttttgataccaagaatcgattcgttagtacaagattgagactagttttgcgaacgatgtttatatcatgtgagtctggtaaaagacttgcctcctggagaactatgttcaaaggcgattcccaaagcgcataacgcggctagaaggtgaagctccggactaactgcgtatggtaagccgggaaggaacaggtcgagcctttcgagtgcacgctcaaattgaggaggtgaacggatgagaaggtgttgagtgtatgtgtttagcaatgggacggactgtgattgaaataaaaacgtgatgacaagctggatattcagtcttaaagtccttgagatgaaggaactagaaggacaaaccattgttcctccgcctctcattagaccctccagccaatcttctcgtctaccctccaatctatccaattcttccggttcattgtcctctggaaaatctctcaacaaagcgcttccgagaacccaccagtcttcccaaacggtctctcggagtccaactagaattccccaagcgcgtctagcccggtcagaatcatttctgaggagcgataggtgaaacaccgccgtcagatgggcgatgtgttgggctctatgggttttcggttgactctgtcgcggcctggatgatggcctggaagtaaaggcagaagggccggatgggaaacccatctcatgcttgcctatttcttgtgagagttgagacacgttaggtcaaaaatcgaccaggaacgagagcgaggaacaggtgtcgtaagaagttgcgtgaccttcaaaaagctgtgcttctcacggcttatgtaatggaaaaggccccgctaaaatcgagacgaccctgttcctagcgtaatcttcccagtccgctaataacacataccgtcctctcgctctcatactctccgtaccaactcatcttcaagtacgggttcatctctgtcgttgtctttcttctctaacatacaaaccgatacttacttgatttctgtttaaaggagctcttcgatgcctaccggttcgtttctctgtccttccagcttagttcaagaaatagtggcatcttgcttgacgcgatgaaccaaccagctgacttcgaattcttccactcaatctgatctcgtcttactctacctgcttttattgaatcacaatcagcttctcacccatactttcccacgcctgctaggggactgactttgttcgctcgaggagtgagtcaaaagattcactatcaagttgcatctcattattcaccttgggcccactcgttcgccagaattggacgagtgttccgccattcttcttcattaactgacattctagaatgcatcctcctcttcttcttcttcttcttcttcttcttctcctctcacctgattaaaaaaacctgttctcatcacagattgaaggtggtcagtcaaggtctagtttataaaaagaaggattatgttccagacatgcttgctaatagtcatctccgggggtttcgatctgcgatatattcgggccatctagccttctggttctggatgttctatcacagtacgtgatccattctttcttccttatccaacagactcaaagaactctctcaagaagtcgaggccactcagcatgagataagatattccagcgactaaaacatatgatctcttgtctctttatagttcgagagagtttcgctgtcaaacttgtttgtcctcatctcttttcatctaagcagagtcttcatagctgcttcagctagccgggccatctcaaagatctgctgatggctaataattccgttccgacactgtacataccatagcgatggagatacccgttccagaagattggctacctctatgaaggagaaggctggaccggtggaaaattcggatcctggccttccaagcgtggatgggtcaagaatgccggaggggatgtgtactagaacaagagagcttgtattcaccagactgttgtatttccgagaagggcggacgatggaatgtccctttgtatgctcctttgacacacgcacatggaggtgctgcaaacttaagctaagacgaaatcgaacttcgtcccatcacgcgcctgtatcaatttctttcatttggaccatgttactatactggtggagaacggaaagacagaagatgacgatctgaatggaaaaggatcaagatcaggattaaggtgtgggaatgaacctagttgactgaacgctatgttagggttatcaccacagataagattaattctcgccatcgtctattctttcattcatttcgacatcctcagacgttcaaggtcttgaacagtcacctaatcgcccgtcatgtcctacaagaggggaatctccccatcatccgttaacggttctcagtccaaacgctctcgcctgacgtcttcatcatctcagccgatcgctccttctacacctgtatctacttccaccacatcaacatctaccggctcgatctctaccgaacgagctttgactctagacgcctcgaccctttctgatgagcttttccttgaggtgttctcctatttaagcccatgggacctttcgatgatcgaaagggttgatcggcatttttcaagactggcaaacgattcattggtttgttctgctccttgtccttgtctcaaagtttcccccactaaaaggactcttgcgcgtataaatgtttacctctccattcacttgcgggacactactttaaatcctcttgtacataactgaatctggaaccggtccatcagctatggaaaaggctttatatgagtgagccttcgttcattttacatcaatgaacgattcgccttctagttcctgttcgagttgagactgacctggacgcctgtacccttgatttgacacaactttcgtaagccgccaatccgtacgcgcctagtcttcgaggatcacgatcatcaactccatccagacgttcatcacttgttggtaactattttaactctacatctacaggagcgactacagtcgatgtgtcggcatccgactccttgtcatcacccttgaaggctaaaatgtcgtccgactgcgaggatgagcagagcgacgtcttatctttaccattgagacggagaaagaatagggatagagaaaaaagcaatataaactggaaggagatgttcagggttcgttatcagctttgtttcttcttgtgtgagtacgtggcacagctgatgaacacctctcacgatcactcagatatcaaccaattggtcctctgggaggtcgactttgacaccgctatcgacacctaagcgtcttgtatctagccctcagcctgccttgcatgcctctgcttcaatctcttctgcctctaaacatatagactctcactcaattccctcgctcgaaccaaagtctatccagacacgcacaatccttgcgctcctacatcccgtcattttatacgcaactcaatcacccacttcattgagcccccctgaaattcaaatctttctcgcctctcgccggtcggacccttcggattcagctggtcaaaagactgaacaccaagctcaagtcggagagctggtgacctcgtttgtttccccagggttacgaaaggaaaaaaagacagggtggctgagaggtgaagtctgggtgacggatttgtctgtcgataaacaagatgaatcgtctagggtttatgtaggttactcgtccggggcgatgtcgatcttgacgatcgatctgccagaaattgtcctttccaatacatccaggtcttcgtcgtcctcatcatctttgagaaatatctctcacggagatattatcgttcatgaaacatactttcagccgtctcccaccgtccctccactctcagtacccatcatatcagcattatatggttcgcttctcgtgacttgtacggatgagttcagtctctccttctacactatccccgatgaagtacacgacgggaaaaaccatccccgatctcaagctcagggaataaagcctttcaaagtagtcagatcgcatacatcttggtttcctgcttctatctccattaatccac

SEQ ID NO: 982 - DNA, 38864 bp, Xanthophyllomyces dendrorhous
cggtttcactatccctgtttatccagaccaatggaccgtgtccattcagcagttccaattgcgtgctcctgcagctcgactaccgttacatgcaggcatcaactggacatggatagacgatcgaatattgagcgcattgatgccttctgttccctttacctatccatttgagtccttatctggagcagggacgcgcacacgaggagcgaacgaaataggctccgttggaaaagtttcaagcttggcaatggatggtcggtggatctgtttggctggagaagataatagagtccagatatttgaggtacctgttggaacttggactggagcttccaagagaagtgatggtgttagaaccaaagagaagatgggcaaagagaagataggaaggaaggatgggttagtgtggaggcatacgttatgggatcatcatgctgctgttacatctgtatcctgtttagacggtatgtccctcttcttcttcgaagtattttcacttgatatcttcctcttggaaaataagtcaagttactgatatcgttcgttgtaaaggtcgatgcataacagcagattcaacaggaagactcctcatttggtccttggatcaacctttcgacccagaggggctttctcctctccctcttccacttcgttccattcttcttccttccgcgtccttttcacaacctcatacacctcccctatcgtcctcatcttcaaccttcttgaagaccggtttggagccagaaacgagcgcaagtttaggaacagatgatacagaagtcaaggacgacgcgaaatttgttgaagtcctcaaacctcggttcaaaccttttgaagatccatcctcttctgtctcccaacagatcgatacgagaaaggtcggtcatggtgaacatgatggtgattattcgaccgcagagcgcaacagaaagaaactcgatggtgaaggaaacgaagtcagaggcaaggagtgcatcaaatgggtaggtcaggatgccatgacggttgttaccgttagtacagctcggatgggagaaggacatggagatgagcgtgtcgcaaatgaagagaggatcaaagtttgggggtttgatggatgattttccagtgctttgagcaccacttcttgctgttcaaattcaattgatgtttccaaacacaaccatgaatcaagaaaggtaaagaaagagaagtcgagagattaggaaactagaaacacaaagtatacaaattcctcgacgatggaaaagagaacaagaccgggagaagaagagatcgttgtgaaaatatgggataggatcaatcgatctattgactcgaagagatgagagacatatactgcatatcgacaacagagacaataagagaaagtctcagattgttggtttatatacagtagatacagcgggtgagacatcaagcgcaaaatccagaggagaggaagcaagacgaagagaagaacaggacgagcctggaaggaggtcaggactataccgttttcagcctttgaccgatcctccttttcctctccctaccttcttttgtttctcttccccgtcagttaccaaagatgggaacagcccaattcctgatcctgtatctccacatccggatgtcgttctcgatcgtccttggttgaacgcgcgaggtgatttggtaagtgaaggaggagggctggatatttcagatgaaggtgaaatcaaagccggtggagcttcaaggattttccagatgcaaagcgaacagagaattgtagattttacctctgaaatctagagaagaagaaaagagttggtggtggactgacaatgggttgactgccaaccatcatcactcattccaaaccctgccgaagaagaagacgacgtcgatgacgctcttctggcacgtctcaccttgcctattccaatatttcccatgacaggagaacttaaacctaaatcctcttctccaaaagaccactctggtagccctctactcgcctcttcccattcgttcctccacaacaacgccaaactcaaaaactcaacgtctccttgaggtatcgtgtaggagggcgagaagatagatgaagacgaaggagcggcagaggaggtgcttgctcgacgatgtttggttccattgggtataatacctcctgaacatccgtgtgggtttgtcgatcctgtcgatcgggtccccctattcaaatcttgcccagactcgaacgggtgcagatcgcctgtcccagcgatccagaaaccaactccacttcttcccacccagccgagctcgataagtttcggtacgcgcctcatgaattttttgacatctttcagaagagggatggtaggctcaatactcttttgccataagagcgggttgagagattttggcaagtcaagatgatcatcttcctcagccgatgataaagaagacgtggaggatgatccgtagtgagacaagaagagatcaggctcttgtgaagaagccatgattggttgatccagaggtgtcccatctgagagtagatgaggaagcgttgcttttggaagcaagggcgaggtcgacagaggcggggtggttggtggaagtgttatcgcctgaggtaagggtagatgggaaggcgggatggaaacgtgcaggacctgcaactgaggaagatgggagaatgctgttgtcatagccaacagctttccaaaaggcgcatcaaacgttactctcagtttctcaagacctctccgtttcttggtaattttctccaacgcgtccttcccaatggtccaccagtcaagctctaagaccttgagtcgagtacccttatcgcaaatcttgcaaagtaactcgtccggcaaaggtccgtagatacatgcttcatccactctaggcgggggatgaccttgagggggaacgggaaacaaacagactggaggaatcgaccgcacgacagagaatgtttcaagattgttgaccgttatatcagagatagaaagaagatggtctgttgtccagctatggtgggggccaacatcagagatctcgatgcggagatgacgtagtgtctctgggaaaacttcgaccttcgaccatagcgttttagataatcggccttggaggatcaagagacaatgtttaactctgctcgagactgattagcgagttgtaaaaaagaactgagagagcgcaccctgaacctccgataggcagaagctttctaagctcggacaatcctccaaaattgccagtcttgattgaaggggtcagtgatcgactgcgttaatatcaacaagatacttcagtttgaaagaagtacgttcttgcaaacgtacattcctttatctgttaactttgtgcccgacgtcctaagccaaacgtttttaacgcctcgtcctgcttttgtgatcaactcgcacagctgatcgtccattaacgccgattcgatcgagatcttctctaaagatgcatctctaggtagtgtcgtgaggtgtaatgatagattctttgtcttaatttgatcagatatcagagagggggtttcctctcctctcattagctggatgtcaagttccgagaggagataacccagagagaagtaaccaaactcactccgacaacacttagtcgagagagttcgagtgtctcgagttgagaaggtataggatgaggcaggttgaatctagggatagaattaggctggtgttgggtaagtgttgaggctggcgagagaggcgaagccacgagtgagagatgcttcaatttaggaaggtttaagagttgcttcacacgacgaatgttttttgatcttgttagttggagcccgtaaatatcattttttgcggtagctcgcatgtagagaagaagaagacaaacctctcctacttgatctccccaaacacctatacctctccacaagatcctatctagattctctttacaagccaacacaagcggaagaaagatctccagttctccctgatcgatcgaggtgaatatggatggactacccgtcaactgggggtagagaggtggatgaacagtgatcattcgcacggatgatgcgtatcttgctgggttcctgataaaaaaaattccaatcgcacaagaatcagcctaaagcgtactttcgcttcctttcttcctttcggacacatgcacaagcccatcaatgtagtctggttatccacacgttcacgaagagtgaaaaagaacaaaccctagaacagctttccatttgcctctttcccttatctcgccaatggaattgttcctcgaatcattgtcctccttgcaagcaggtaattctacatcaatcctctcgaatacgacagactttgttgcttcatgcaccttttttcctagactagcaagcaatataggaatcagtcgggctgagcttgtgagtatgaagaagatgatctcttgaggaagttagattgaagaagaatcgtagaaaaaggaggagtcaattagtgagtatttccccaaacaggaaaggcggaggtagttgatcctgttctggcactggaagattgcgaggcagatccgtgaagtaagagagcgtactcttcagaattaatggtggaagagactccatcgtgaggaggagtatttcgatgaggtcgttagctgagttctaaacaaagaagcacacacaaggaaagagaaggccagaggataggaaggtagagaaggtgaaaagatgatcgacttggcgcatgtagaggatgtaagcagctgatctcgcttgattagataagccggctcggcgtctgttgatgagcgtcatcgatttcggcctagttaactcggctcagatttcgtctcactctctatttgtattcgaacaaaatacagccagaacaggatgtcgagcacattgaaaagaagcaaccgagagagatacaagagcatgcgaggaatgaaacccattgatattgaggaggattcaaaattctcatccaaaaaagaaataaaaagggggagagaagaaacttgttgatgaaagacgaatcacatcggctctccatccagatccagaggctccccatccacattccctccatcttctcccaaaggcgctccatccaaatcatcctctatatttccgtcatcagctctaacatcagcatcaacagaagcgaaagttgatgagaatccggactttttgaatttagattggaacaccgggggagacgttgtcgctgcggtggacaacgacgacgttccagatggagctgtagcgatatcggtagagtcggaggtagaggaacgagagggatggacgccttgtagacgaagccgaaggtcagatgtaaaggcagggttgaacacgatcctgttgacataatttgaaatcgtatcgcgtcagaactctgtatcttcaatcagattaacgagaggagagcgtaaacgcaccagatctccagtacatctaccactttatcaatctgtcctttgaaagtctcagctgataaccttccagcctgctctttgaatcctctgtggagctctccaaagtgatcgaacaccctttcaagccttgtctcgaacgcatttcgatatttccactgttgtttccggtcatatgaacaaacaaaaacaattttagtcattcaaatttcgtggccagacttgaccatgaaaccgaccagaaccaactcacagcattagggacaggagaagcagaattggagagaatgtcagaaatcagatgtaatcgagcgacctttctaggaatcggtgtttcgaagatcactagagattggcagatgatctcggccaccttataaggtcagaagactgcacgtcagccaagatcgttatggggcgagtacagaaacacaaaagacagatgttttcacctcctcagcagcatccgcatgacctaatgcgaaccccatacatcttgccacaccccctctttcgcccctcagccctctgagacaactggtaaagcgtcttctcgccaactttgccagtttgcctttcccgactctctcattctcgctctcctcgctctcctcggtggagtatactgaatcatagccttcctcctcaaacggtttgggcggcgggctgggtgcccgatatcgagggtctagacaggtccggtagaaatggtactcgttggaatgttcattgcgaaggaaatcgaaacgagggttgaccgcttctttcgaacgaagcatatcctcgaacgctttaccaacagacaagactttgtcagcgacggtacggatgaagtgttctttgtctgggtcgagtgcaaacgaggcagccgatgaaggattaaggcggacaggtcgtttcgctactggtgaacgagacggagatcgggagtaagatggagaacgcgatcgacgtcgttttgaagatggatgatgtgaagtggaaggacttggtgatctcgaacgggagggcgaccgtgagtgtcttcgggaatgagaagtgatatctgtgtatgcgtcaaaacacgtcaacacagggtaagctgtgaaattctcaaaagaattaagcagatttgattcggaaaacaagacaaaccatagatcgctcttgcaggcaaaggcatcgctttactccacccaaccctcaagacgctacctccccaatcaagcccatcaagctccttgactgccttctcggcgtcctgcctcttcatataagccacgaaccctgtcaaaccagccttgcttcccacccgacgaccctgcaaagtcgaagcgtccacaccgggaggaggctcgtcgtatcttggccacataatttttacctgatggtatcgagagatatagcgaacgcggcgtcagctaagcgaacaggaagaagcaggataaagagatgaattagaggacgaacagagccgacgggtccgattttggcaaaaagaagccccaaaggttgctcagatacaccatctggaagatttccgacatacagatttgttgtctgcaagaagacaacatgtcacgtaagtaagcaattcaagataggcaaaccgaggcccacatcggaagagaaagaaaacagatactgatggacttaccatagaatctccaatatcatgagagcctcgttctgtctcccaagcttttttaaaaatatgtcaggtcaattcaacagctatagacagatatgttcgacatgtaaaagagcgaagaaaggctcaccagcatgcacagctgcagaggttccactgagcccgctcttcttgaatcgttcttcccgagcggcctggtctctaagtgccaccgatcaagccaaagattcagatttagttgaacgaactataagttaagcaactcaagatggatgatcgactgaccttttgagatcttccaagaaagtattgatcacccgtttgcccttccctttgagggcagccggcttaggtggcgagggtgcactatcaaagattcctgctttcttcacaggaaactggcttttgttcggaggctcgtatgccagcgatcccgaggctgagcctgcatcgggacaagaaccatatcagttgagggtttccaaattgaggtggtgatgatgagtagaaacttgggaaaaagaaggcgagagaagaacaaaccagaagcgcgaacaaaacctcctttaggttggatggtgttggagtttgagctaccttcgaattcagcagagaattcagcaaacacccgagcggcctctcttaaggaaggtatgagaaaaagatagggctgtcagtacaggcaacgaggaaacaatgatcgacataaactcaccgctcttcttcgtcttttttcctcttctcttcttcccggtctctatctcttttcgacttccgttggattccataatgatatgtctgctgcttctctgcgcccaaaactggttgcctctgttgtatgggttatgaaggatgggaagagtggttgaggagattcgaatgacgggcagagaacgaaacatcaagagtgcgagaggtttgattgtaagctcagtgaagagtcgaaagacacagacaagattgatgagagcgatagaatcaaaagagaggatagggagagggatgatcagaaaaaaaggaaaaagatgcggacggaaggaggtgcggttggatcaaattcatccgagtcttgatccgagtcttgtccacccccgaatttggaaagatccagtttcctagcgtagtttggcatgtctaccttcctgtttctctggagtccaggtagctaaaaacgaagtagatgagaggtagaagggtgagagtcgacgagtatgtatgatcttgagtattgcatatgttggagagagagaggaggcgaaggagatggttacggcaaggctgtgcatattacataagcctcccatcgccacacgttcctgaaccacaggaattcacgtgtttgccccatggctgtgtcaatcttcgcctccactaaccctccactcccactcctacttctcctcttgcttgctactcatcgtccatcgttgttgttcttttttttttcacttctcaacgtatatcgtcctttttattactccctccctttttctcttgtcctcactcagtctctccttctttgcctcctgcttttagttcgctcctgtggtcttgttttctctacctcttcgtctctgcttctttatatctccttctctccgtcattccctgatcatgtccttcacactggtgtcttcgatctctcctcaatatcatccatcgacttccacctacagtagccaaagtccgatgaatccggagatgatccaagcggtcgatcaattacaccaaaaccagtatctccatccagacgaagaagcgcatcgaaggagagcggtcgaggcagttgagggcttgagctgtttggcttcccagcatcaccggagcgagtacaatcggatgaagtggggagaatcaggtttgttcagtacttcatcttttcgtctgtcttcactttttggactgtggacacatcccctcctggtgatgttggcagggatggtcggtgaaatgcaagcattctaatcagcatcacctttggctgcacgtgcatatcctgtttcatttgtttttatgctcaatctgctctctacctaattccaatcgaaccaggtgctcccctatactacgtcccgctgtccatacagctcccggcacatgtgtccgagatcatgcaacgacaagcggcgtttgaagctcattgttcgaaatcgtctcaagcacgacacgctcgacagctcgctcaagattcggcaaataattcagacataggccttctaatgcgaggaccgaacggagttgataggccgctggaagaggaggagggcctggagggcgtccttgttgatgatgggctgactcaagacgaaaaagataatggaacaacagcagccctggttggcaatgacatcctaaatcaagccgctcatccgacctcggaggcggcgagcatctcaacagccgaagtagggaaatcgaccacgcctgtagaggagcaaatctcgcaagccatgcaggactcacttttgcctgcccaccgagccaaccccaccagcgaccacaccaaggaagtcagagcgcaggctgcgcctctagctagtggccatgtgtttacttcaatcgagattggcagacaagagtatatgagaaaggcaacaatcgaaggcggggagtttgggcctgcttcgatgggtacacagggacagggacaaggacagctcgcaggtcagagtgtcaagacgagtaacactcaccccatcaagtcagttatatacccttcccaagaggagctgtatgtttccttccttttgatgttgatcttaaccgcttcttgtcgggatatacgtacccagtatatcgatcgttgttcctcctgactacattcactatctcgagcctctacttcacctcgtcgaccctccttcgataaatcctcccttcccatcctctgcatctcaccaaacgttccttctccctcctctcctagatcttcactacctctcgcagacgaatcctgccattgattctgccccaccaattcttctctcctccgttcctccagaacactgtatccccaattctcccgcgtctttaagcacccaccctgatgttcagtctcaaaaggaagccaaaccggatcacgtaggaaactttctactgagctcatgcccagggaaaaaggttagactacaaggcccagtcaaaggaagaggagcaatttgccgggatctcagggttgacttggagagaattaaggggttaggagtgggctgtatcatctggttcgtacctgttttgacatgcaagctacattcgatcttacaacttttttcgtcttgattcaatccttagttgtctagatgatgatgaactcggatatttgggggcaccgatacatgaatatgagaatactgcacgcgctatcgggctcgaagtcatgcggttcgcttagcctctctatcttgttcactcttccctcatggtcttttgctaacgtgtcttatttggtttccttgctccagaatccctatgccagaaggattgaccccgacttccctttctcaatttgacgcccaaatttcttccatagttacgagatatacgcttcgaggaatcaatgtccttgcgcattgtcgaggaggtgtcggccgagcgggcctagtcgcgtcttcttgggctatcaagatgggacttgtctcgtcttcctgtcacttggtgtcttcctctccgaactctagatattcgtcaaaacgatcattcggaccaggaggcggggagtacacatcggctgacctagagatcacggagaaagtcatctccctggtcagaaggaggagaagcgtcaaagcaatagagacgtatgaacaggtcagatggcttgttgattacgtgagatggctaagaattgagggggcagtatgcaaggtcgctagagtttggagagattgagtgtcttggttccttcttcacttctgtttccttttccgtgttcctttcttctttttccttcgggtaaaaaacaaaagagtctacttgagccttactttttcaattcctcttgctctggtaacttttgcttcattttctttgctctcctcacatctttctttaaactctttcataactttcacctgttcctccttttttgtgttcctcccttctttgaattgtaagacttccgagatctatcggtgtgctctaaatttcctctggccttccttgcaatgtctgtttcctcttcttccaaatatggtcccttcccaaagttcgccctttcatctcatgtatctcaaacaaatggcaataatgctttgatcatctctgtcccttctttctcttgtcatccaccaccttgtctatctcgtttctcttcatatcgtcttccatccatattttgaccaagtctcttgtggcaaaaagttagatattcttttgtgaacatttttttagctgacgacaaaaaactttctctccaacctgacgatcggcatgtgaatacaaaaaggaaaagataacaagatcatgaacgaagaaaaaaagactcaaacagcaagggaaacagagatatggaccggacagaactataggggaaggagttcgtcccctttgagttgagccatagggtcgtctgcgtcgtgcgatcgagaaagtcggtaggcctctgtttggttattttgaaagaggaaagaagaaaaaaaaagcggttgaggagtcaggacaatgaccaaaacaacggttctttcagaagcgtatgaaagagggcacgcaccaagttgttcctctgtgacttcatcaccattcgtgtttccactagcattgttgtatttgacttttttcctgccagccatcgagaacccaccgccactctgttcttcctccgcctcttgtttcctcttcctttcctcttccaatgctctttccagtttctccttgtccagcttgacttcgccctcaccgactctaacttttgaaaactgaggcacagcagaatctttgcctgttgaagcgccgttcgacgtcgtcgaatccgaggccttgccttttccttttggatctgagttgagcgagggcgatccaactgtgctctcaatcgaggcggctacaggaggaggcgcactaaaagcggcggctttagctagtagggatttgacgtttgattcctcagccgaagcagcaagaccggtggcgcctgtgcaataagctccatgaagagtagcatggcagcaggcgtatccccattgacctgatttgagattgtaccacgacccccagatggtagtgtgatttccagtgataactacgttgcggtaaacaattccaaaaggattcaaacatttgttcaaaactactctttctggagtataattcttctccaacttcacatactgagaaggaaatacgtaccatcttcctcgtattttgatttcggcttggctctttctcttcctttgatgacttgaccggttcttgagtactcgacatctgttattgattgcgcatttgaaagttttagcgacgttctcggacgtaatcctgtccttcaagacctaaggagggaaagagacactcacagtcctccgtttgaccagtcaagagctcccttggcaaggtcttgagatgttcttctccaccatacttctccagaatactgaccttcgtggtgtctttcagatcagccttcttctctaggaactgcttgtgaaggatagatccttgggtagggtttgcattcagatggacgtcgtttcctctggcagcagagttccaggcaaagagttgcagtttttgaatattggtcgcgtctccagagtatcgcaggaagttatctccagcgaattgcatctgaaatgaggccgatgatacgcaagatgtcaggaccggaacaaacagagaaggaagacggaagaaaaggacagaagataagaaaagaaagaacatgctactcacatcctcaggacgaccaccaacgacaggagcctctcgcatcgatcgcgtcttgggatcataatgagccgattctgcatccaagttcatcagatacttcgccgtatcttctctgatcctcaaatttcgaactgtgattctggacttggtgtcaaccttctgaccagccgcatcggctgcgtcggcatacttgtcttcatcctcatcctcgtcttctgagcttccgaaatcatcgtcggccttaactttcgttttaccagctttggcgacctttttaacggcagcgagatcggtggtcgtctggttatcgatctcttcctccctgattctctttctagcttcctctagcgcatcccattcctcatgaaccttctgatactctgaaggatcatacccgttccacctatcccgctttgtcacccaatcgccaccgacattctggatgacttcgtccggtacgatgtctttgttcgtgaactttgcgcccttcttcctcggtctctccacacaatccttcgtcttatgcgtcattgcaccacaattctcacacgcgcctttccgatacttcgtggccgccggaccggccgtttgacctcggtcgtaccacgaatcaagtttcgaggaggatgaatcatattcgggtcgacgttgatggttcaaagacggccgaccggtatcaagataccaaggtgcctttgtgatgtattctagtttataaaatggtgagatacaggatgagatacgacaagaaaagcagagagagaagagaagaaaagaagaggaacaagagcaaagactgaccaggaatatgcggattgatggctcgaccttcctcatcgacttctgcagggacagttccagcctttcgtgccgcctctaaatccttctgtcgtctccattcctcacgactgagttttccggctggatgccgacaaagagtacagaagtgaggtcgggcgtagtagggtgtgagtaagttagaggtggaatgtacaaagtcgtcagttcgtgatcatctagatgtttctttcaaacgcgtgctaaaacgcctcaagtctgagagaagacaaaacttacctgcagacattgtactctttagaatgacttatctgaccctgataggcaaagaaggagcagagggttgtgggatggtcgtttggttggtcgttcgaagtgtatttgtgctcaagagagctatgtgagagatgttcatcgagaccaattacttacgccggttacgaccgtgtgtaaccttttagattgtgattaagctgaaactcaagctagaagagagaagtgcatgagatcattcggtctcgtctcagtgattaggtagagaccgaggcggaggggtgtagcataagagttacagaaaaagagaatgaatcgaggaggaaggcccaatgagatatagatgaggtagatggaagtggcatacttggagtgaaaagtggggggactgcacaggtggatgagaactattcaaatgaaagggaatatatagaataaggggacagatagattgagaagcagcgatataggcaggatgaaaactgatacctgtggaaagttacatgaccagacccaaaacaaaacgagaagaaaaaccaagaacgtcccaaaaaaagaaggaaaacagaatcataaaagaaaaaaaagtccaactcaacccagcatctcaacgtccatatcctccacaagggtctcacacggccctccgatcgtctctgaactaccagtcaagaccatattgatgaatgtctccggttcgggtacgagtgcctcttttcctgatctggctcgagcaaccatagggtgaccgacaagatctgcgatcccgggtctttccccagggtttgcgcgcatgcacaacgtgattacatccactagcgcaggcgacagaggtgttagatcaacatcagaaaagtcgtccgatcgaagagcatgccagggttcgtcgttagcaggaacaatgatgtttgttgcaatttcaaggagcatgagtccaaaacttgattgaaagaacaagagtcatgttagaaaagccggattcggacaaacggggaatggaattatgatatgaattctcacctgaatatgtccgctggtttgccaaactctccgttcattgtttccagcgccatgtaatcccgatcgccttctctctcccaacccttctcaaccgtacccgagggaacttccccaccaagacctgctcccctaagaatcgcagctggatcagctcgaggcgaccgagtcgacaatccgaagtcaccaattttgagcgcgccgagagtggtgataagaatgttggctggtttgaggtcaaggtgaaggatttgctgagaatgaatatggttcaagccctactcgtgttacaatatgatcaaaaacagattgagcaactgtcagtaaagaaaaggagaaacaaacacattttcctgacgctctgaagacgatcttgacgaaaacttacgtcactcaattctctgacgattttccaaacccgaccctcatcaagtctctcaacaacccggccgtactcctccaggaaaaatgctaggtttccgagctcacatagctcagtttggatgaacagctgtctgttttgttcccaggcatcgataaactcgatgacatgtggattcgttgggttagataaagttctcaggatatcaacctcttctaaatggcgaagtctgaacaagggagaaagtaggagggggaagaattcagattacgaatctttatcgatcaagaacaaggataacgaaatgattcatgaacgaaccggtctttgacgccttcgaacacccctttcgttcgtttcacagcccaaactgatttaccctttcgatcctgaaccttccatacctggctgaatgctccttgtccaaggggctcgagaaccttgaatctgatctcaaatacatcctcatcttcctgatgtcgcatattgattggatgggacgatcgatggtgaagtgttcgtttcccatgtgcaggtgagggagcaaacgaggggagtgagagtcgaggatggaaagaaccattcgagtgaacggcagagccaggatgggcagatgtgacggtggacgcgagagaaggggagtgggcagcgtagagttgagacgcagagccagcggtggtcagtgaagagatggtttttcgtcgcaactgaggaatctttgttggcgatccttgtgatttagaacccaacagcgggcgggctgatcatgataaagacaagaatagttagcctatcatcaggtcgaactggaacggtgaaaatatactgacctcgagcacccaaccctttcgtaggtgtcatctcgactccacttccactttcgctctcacttccactcatcactccgctactcgtcctcttcaacattgtcctcgtcggcaagcctgaaggcgctagactgggcgaaccaaagcttgaagggcggacagaaggactagagacgggttgaatgagcatgagattacttcttctcaaaaatgtcggtgagtctccggctctaagcggagatgaagacgtcgagccgagcgtagccttcgtcgtttgctttgagccagacacgataggagatatgactgaggacgacgatgacgaagatgacgatggaacctcagagacactaaggttgaacgaagaaggtttgaatgtttgggatcgtctgggaaccaaagatctgatcggttttgaacacgattgaggggcgtggccgagtaaatgcggtggctgaccctgagatggtctatgcgattgagcgagaacgttgctcgaatgatgatcgtcctcgtgtgaaagattttgatgctggtgttgaagctgtgcgctgggcgactcggcagatggtgaacttgggatggcgtccacactatcggcaatcgacaacggatgaggtttcatcccgccgccggatgccttgaccccaccattacccccaccatgactaccaccaagggcaaaggaggaagtcgatcgtttgacgggtgtgtctggcatgattttcattcctccggatccatgttgggcggcgacagcagtggcgagaacttccgctgcttctgcacctaagaaatcgaatgaagcagacgaagccggtccaccggctatactggttcgttcagaacttgtgctcaagctgttgtttataccagagttggatcggaggatagacggccaaccgtttgatgaaatctcacacgacggggttactaattcttccagactcatctctccatcaaatcgattctggaccgcaccgaaattagcgtcatcatcgtcagcggaacccccccaggcatcgtcttgtgagaaggacggcacggtcgaagtctgcagcctgctgagcgtgccacccgaggttcgacggggcaaaggcggaggcatcatggtaccactcgttcgaagaaagctttgtccacctggggaatcggtaaaggaggtttcgctcagcgccacaccagaatctctgggtttgaacttcttgctgagggatgatttcgcctggaaagcggccagcaacggttttgcgtcgtcgaatggttggctgtccgattctcgaagagaggccggtgcggaccggttgagtacagattcagatctggtggcatggtgggtggtgggaatagcggtggcagcagacgaagtggaggacagatgagacgcagagtttgagcttggcaagtggaacaaagaggtcgattgggagattccagtcgaaccgaccgaggccgtattcgagttgtgcacagctcggtgcgagaatgacgatggcagcggtttaaccgaacccgagggcagcatcctcgaaacgtgctgggctgggcccgcctgattgtagtcgtttgaatttgttcgcttgtggaacgccttctgggcagacggagcgtgtttccctgggcgagctcgactcagcgtcttgctagaagccgagccgacaaaaggagatgccggaggaacgatgacggtggtttggccggtcagtccattctccaacaagctcaaatcgtctaggcttaccgccttcttggacacagtaactcctagactagtctgtccgccagtcaccgctgaagcggatgacgcagaagaagtgaggtatctagcatgaggagcaaacaaatttccgtgggatgccatccggctggccgatcgggattgtgtgggcgagggcggagggatggtgaaagcggtatgggtggatgatctaggtcttcgttcagtgcttacggataagaatgggtcctcggcgatcaaattcttggatggcccttgatacgacgtagattttgggagatgaatgtttagctcatgctcggtgagtgcccggtgatggtgatagttctcggacggtgaccgagaggaagacgataaactgtgttctagtttgcttgcagttgatgatgactgggaggaagatgttgacgatgcgagaagggatgtggtgagaaaaggagaaggcgaaggcaggaacgacaggggctgaagtttgctgggaggagaaaacccctcgtcgtcctcgtcactgtcatccaggtgatattcctcgacaacgtccttcggattgcccattccaagcttcaacgcgctaagctctgatagcccttcgctggatccgttagaaaagatggcatcgtcatcatcatcatcatcttcgtcatcgaaaacattggtttctctagattgggtcgtagaatggtgtcctccaagaggtctcgatcgtaccggacctcgttttgatctggcgagggagtttggaacgcctggagcacggccgagtgacttggacgacgaaaagttaggccgttttatcggcgaaatatcagactcattgggagccgacattgagactgtgaacggatgatccgaaacgtttcgacggcggctcttttggaagcagacataacagttgtgcagtcggattgagtgcagccaaggatgaaaaagagtgaggacgaggacacagatgacgagggaaaaagaagataaagaagaggagggaagagaagatagaacaaagaaatgaagaaaaaaatcacggcactcacctcggaaggacgactaacaggaagaggatcgtcgatagaaagctgcctagagtgattgcctcggtaggaaccataatggggaagaaatcttatgggactagagtctgccatggcaaagtcttcgtcatccgggatggcaaacaccgatttaggttcctctcttggtgtggtggactgattacttgaatgtgaatgattagatgctgcaaggatcgagccattcgatttgcgattatggctttctactgcagatgcgagagtaagtggacgtgatctacgagaagctgaagaagcggcaaattgcgggaatggctgatggatcggagagtggaacgaggattcatactgagaaacgggtagatgagactttgtcggtgttgtgacatgaacggtgctcatgatgggcgtagtcaagttggatgtatgcgtctgtttatggcagatgtgtgtgcgtggatgagaagggaaaaggggatgtaagggaacgagatagaaagaaggcaggggattgacaggactcgagattgtccgttaggcggcgggtcaaccaaggtttggaggtgtaggaacgaaacgcgtgtccagcgagaaagcaaaacaacacggcaccgaccggtctcacgagaaggaaggacagaaaaagccagacgggaggataaattggagtgaaagagtgaaagataagaagggacaagaaaagaaagacgaatgataaagacaacagatggggttgggaggttatgtgtgttgataaatggaatggaatcggtcaggttctctggtgagaacaaatcttgagcgggtggagaaagaggcgagacacacacgcggcggagagttcggactgtggatactgtggctctggagcacggacgcgtttgacgcgtgtgacgcgattgagggtgagacggcgcgtcggtcgtgatggtgttgtttgtgaatccacgtgttttaaggctttacagccacaattgtaaccattcagtcacataaaccccgctttatgcgatcagaaatcagccgagggggatcgatttcagccggccaaagtaaccattagaggcagcaacagcagcgttcggtttcatcctacacaacaccctcaaaacccatctctgtccttctctcgctctttcggtttccctcgatagggaacaacagtcaagcaggttcttgaggatttctttttcttttctttgccttcttcatttcttcttcttccattcgtctcgttgcattcttggcaaaacacaacagcacaaaaaacacagcgctcgccattgacgtcttgcttgccattctttcggtttgtcgtttctgtcttgattttcttctcatggctttccatgagactctctgattctgatagctgatttgaccgtcattctcagaccgtttcctgtttttcttgacattctctttgtttcattgcacaaccattcatctcgttatcacctcttcagatggacgacccgaattatccctccgatgtcgtcctgccgaccgacatttcagctactgttcattctaccccatcaacggcctctgtctcgaatgaattgcgaccactccttgttccttctcatcttgcatcactagcatcaccagcatcaccagcatcttcatctttagctacatcatcagcggcaatatctccctctcatcctcctccctcggccctccctcagccctctcccttatcggcctattcaacattacaaccacagaccgagaaagtcgaacaagaagcctttatagagggcggcaactgtggtggctgcaagcggttcgttggtccccaggaggtcgctccaggaacactcatcacctttgggtcagtgccaaggccttttgctctcggctccaatacttctctctgcctttggccttcttatggtcttcttctcttcttcttttttttttttctttctttctttcttcttttacttttcctccttcctcggcttcgctgactttgcctctttctttgcccactgctcaactctatgcgaaacggctgatatttattctcaattttaccatgtactctccatgctttcttccaaaacagtgactcgctctttcatctggattgttttcgttgtgtcaaggtaagatagataagccttgctcatcgacacatcccagccagatcacaggctaaccgttatgaacgaattgaacggcatcatagtgtcagaaccgagtgacagaggacacaaatctattgttgctggccgatggctctccggtctgtaccaactgcaggtacgctcagttttgtacctgactatgttcctgacgtacgacacataactcagtctaactccttcgaaccgcgtcttcttgtctagctaccaatgttacgtctgcaaactactcatcatggatgaggccatcatgacaggttcgtctctgcttcacatgaatttctggccgtcatcgctctttactgactgtagaggacatcaattctatctacaaacgcgcacgaacgacaacaggagatgaagcctaccacgccgcatgctttacttgtaaacactgcaagtgtacgattgaagagcttgtttttgcaaaaaccagccaaggcatctactgtatggttcgtggttgttcatatttcccaccatctatatctcgtttcccaaagccttctcgtctggttctgcgcgctgaccaggttctttcctcttgtcaaactccagtcgtgtcacaacaaacgggtggcgaaaagcaggaaacatgccgaggcaaaacggaaacgggatcggaaggagcgtgaaaaggagcgactgcaagaggttcgttcataacatgctgatatgctgtttgatcggctcttgaaagcaaatcgctcacttttgtttaatgccttacacgcgcgcatacacacgtgcagaaacaagttcagcaggaccttcagaacgaccttgatggatcgcgcgctcagccggaaatatcttttcatgagagtgagaccctgtcccctcatccgacttcactatccgctcgttcccctacagcggcagaagacacacattcgcctgtccctcgcttgattcctcgttcgccctccctatcaccatcaccaagtatgtcatcgagcttggcagcctcgggaaaatacagagagcttgatgactcaacccaacctcagtcgctaccaatcaaccctcactctgagatgagttcgactttaggaacccctgtccagaagttcaactcgcccggtttgctctccctcgacggcccggagcactcctcggccagatatctatccactcggcgagggtcagaggactccaggttagagcctctttccagagacggcgccgcgtttggtttagggttaggcgtcggaccggttgcaggttcaacctcccgatcagagaagagaaggagcatcaatccggcaactttctcggccgaagcggctgctaacatcaacccttcaatgttctctcaaataacgcaaccacctgctccatcggcttctgctcctctgaatctcacgtcatcgacttccgttcaaggttcgcctagcttgggaccgaatagtaacatcacctcagacggtaggctagccggtctccctccgtcgcctctccgttcttcatatatggatggatcgttgcctgaccaccggccgagctcgcctgtctcacccaatggccggacaccttccagaccactcagaccgctcactccggatcgtgttcagccaacgacctcgacagctccgagtccctactcgatcgctccgcttgctatctctgttagacgatcccgatcgagggaaggcccaaacctttcttccgtctccagttctacactatctcagaccccaccaaggaaatcgtcgttgggtgatcatcggacgagaccaatcgaggatcgcccaggtcgacgaggaaactcatcgtcggtgcccaggtcgccaagcggcagatctctttctcctagctcagctgcaggcgagaagatcaagagccgatcaggctctttgacattccccttggttggagaagacgatgaacttagccagccgtccggtcagtttgtgcaacccatcggtttgcctcggactcggtcaccattgaatcaatcgacggcccctccacatgtcgtcgttgtcgacaacgatgacgacaacttcaaggagactagccaggtgaagcgtcaggcccacattcaacaggatgttgttctcccaccttctttaggtgttgacagtcttcctgaacgaagaagctctgtatctcaagatcccccgaaattggagtcgccgagaccggtctcgtttcttctctcgaacgatccagaatttgcgatgttattcaagaccgtcgaggacactggcgggggagacggaccaatggatacttcgttgtcgatgaaccatgatggaataacctccacgttgtcgaacggtattccgatcgaattccgcccgtccgaggagttccgaagcgatgatgaggacgaagacgatgaggcggacgaggatgacgacgaggatgaggacgaggtggatgtggatatgtatgtgaatgtcgaagatgaagagaaggaacgggacgatgttgcttctgagctgccttctcgactgtcggctgaatcgatatacgattccaaacccgcccctgcgattttttcttctccctcttcttccgtaccgacctctggctcaacggcatttttcaggcacggcaggcgggacagaaatcttgcgagcttgattcaacaggacgatggtgagccggcagccgtgttgaggagtttgttggttgaggcaaagaatgccgggaagagtacggtcgagattgggctcggacagttagagggtgtgttggaagagctgagattgagtacagagagatttgcagtgttgaagaacagttacgatggtgtcaaagtgcgtacaactctcttcttcttcttttttagtagccaagattaaccgatatttgcctgatttggggtaatacagagagcgagcgctcaatatatccatggacttaccgtccaatccgaagatttcgaaaaagaagtccaaactcgacgggaagtcgaggctgagatcaagcgtcttcgggcccaaatgcatggccagactgccaggctttctctgcttgatgccgatcaaaaacgtcaagattcaatcgccagacgatcgagagagttgactgagaatatggtcgggctcgagaaggatatttccaaattgagagccgagagagatttagcattggcggaagtagaagaactttcgacaagctccaagtgcgtttttcctcaaaagcagttttttttctctttctttctagtctgatcaactcaatttcactcattgattgttcttcaatcaaacaactaggacgaatctcttgctcgaagctagttcggctagcgctggtccgtcagcatcgttatcgagatcgctaagtgtccgattggacagcgtcaaggagaactatcgaaaggaactcgaacccctcaacgtggagcgagagaaactctcgagagagattaccgagcttaaagagtccagagaattctatctatcagaatcaacgacgttgcatgcccgaaacgaagagctctcagacttacacgccaccctcgtcaggcagatcgagcaggcccaggaaacgttaaatcagccagtagttccgccaccgccatcgccggctccccaacaacagtcgcagccgctaacgccaacgagtgagcaggccggatatttctccgctagtggcaccccgaagggcactaaagcgggaattcatcttcctagattcaataatcatcatcgcgatcatcaacaacacgtcagcggatcaccctccgtttcgtcacttcccggttttacctcgatcgatggtcaagaagagattgcgaaatatgtaaaagttgtcaaaccagaggtcgcgatggatcctgtgccggttgcagctgtagcggcgagttcgaaaaagttcaagtggtacaagtcgtcttcgtcctcatcgtcttcgtcctcgaaaggaccggaagcggttaactcagcccatgcgtcgtcgacgagtatttcttcggcaaggattatcagcctgccgacagcgccggtggtgactggccggacgggggctcctcagctaaagactcgaccgtcttatgaaggaaagtcgacaaaagatcataacttacagccacacagtataccaactctaagattcactaggtgtgatcattgtggtgacaagatgtggggaccaatcactgagcttcgatgtaactgttagtggcgtttctttttccttcattcatctgaccctgccatatgtagagcaagttcttagcacttactctgtttcctgcaactttgcggtcaaatggagcagtgtgcgggttcaattgtcattcgaaatgtgtacctcatttggtggcgagttgtccgagctcatcgacgctcccctccctggatgaggcggtccccgggcttccaacagctccttcacgtatgtcttcccgactgtccttctcctttgtctggcctcccttgggctaactcgacttctctcccgcttgggcttgggcctttcctagaaccgtcaatgtttggcagaagtttgcaagaacagatccaagcagatggagttgtggtgccatgtatcgtttccaaatgcattgccgctgtggaagataacgggatggaatatgaaggtgagtccttttatacctgtttcttgttagctcgtgctggcgaagagaaaactgattaagacgaaatttggttctcttgaaaggcatctatcggaaaaccggcggatcatctcaatcaaagcatatcacccagctgttcgaacgtggagattatgattcgtttgacttgaatgatcaagacaagttagtaaccatttctcctctttatgatatcctttcctgaagatggtctcaagtgaatgaacgcatttgctgtgtgcttgttcggttgattttcattgttcatagattcaatgatatcagcagcatcacctctgtcctgaaaaattacttccggggactcccagatccattgttgacgttcgagcttcatgagaaatttgtttctgcagccagtgggtctcgttcagtttttctttgctctgatagatgtgagctgtggctgacttttagatgttcaacgaaatatgtagtgattcgcgatccggaagtcaagaaggaacaactttcggcgttgattcaccaattacctaaacctcatttcgagacattgaaatttctgatgcttcatctcaaccggtaaatattcccttgtctcccattacataggttgatccgaaccttatggctgatatcgaatttcctgtgcctttttcttccttttggatggatgcgtgcgcagagtgatggctcttcagtcgattaatttgatgtctgcaaagaatcttggtgttgtctttggtcgtcagtcgtttcctccattttgtcttgttgtttcccactctgaaactgagtattggctttctatcctgactacttttttttcgacctgatttgcggatgaacagcaacgttgatgcgctcggccgacagatcgagagagtttggtgatatggcagggaaggcgttgacgattgattggctggttgaaaatgcttcctccgcttttgcaccacctctggaaacgtgatctttccggggttatacctcttggtttcccgttttgtccaaatttctttcttttcttctttcttttgatgaatctacactcttctggtccattcttttctggaatttttttcttctttacatcgagatatccatctttgtgtcttcatcgtaactgcctttcgtctcatatgcaatccatctatctctagaccgagatcggtcgtccttgtccgcgcacaaacgtctgttccgcgtcgtttatcttccaatcttctcttacctaggataaggccaagattgaacgcttgccttgcttcttcctcctcgcctattgttctgccttctttgtctttctccttgcgttcgaatgctcttcgaccagtccttcgttgtttgcttctttcaataccccctttcctttggcttgtacgaacaatgatttatttattttatttggcaaataaaataaaaatccgtgtggttcaatgtctaacaggatatgaatgacgaacatggaacattcacacctgcatttgtgtctatgcatttattaacatcaaaaacatagatctacgaggcaaaagaaaaaacgaaaaaaacaagagagaggtaagatggaagataactgtttaaacaatgacgagattgatgcccccaacatggacactcgcaaatactgaaccgtatccgtttccgtctttttccttctcgccctcgcgtttctcatcccgttgtccttttccaatccaaccccaggtcctccttccggtccaagtcttttccgttctatcctccttcaccctgcctgcctgcttctcatcgaccacctcgacagaacccatggtcgacccagcatcgaaaggccctttgaacgaatacggcaaacggagattgacatggcctgcgttggcggtcaagttgatgtgagggttaaattgataagggatagaggtatactctagttcgatcgaacctgtgttggtgtgaatctcatgaattggcaatttaagcggttggaccgcagaggaagaagatggggcagacggggatccgaatgaggatgagggcgggtgaggaaccaagagggaggcgtggacggagccagagttgatgttaacgatgaaatcggacgacggtcgatactttccgtagatcgagccggtgttgatagtaaagttcgtcagctttgaggctattccctatgatttcaagaaaacaaatgacaaggtcagttgaaatgagatttcatgacgttcaaggtggctggaaataaaattatggcatcacatacgtcggcagtgatgcttccggtattgatctttacggagagacctcccacctggatggactttaaagagtcatataccgtcgagaagacgctcccttcaaaagcaaacaaagtcgagttcaactggaggtgaattgggatgatgacatttatgtggaattgaagttgaccagagggtgagcttgagtgctttgacgtcgaatgaggttcttttgtctaaattatgtagtacagtcagaggagatacaagttcagctcggcctagaggacgatctcttacagatcaaatttactaaccaagagtgagaactcggtgattttcgatttttcctcggatagaaacattccaccatcgactctgcttaactcttcgacaccccagtcgggccctaagtactcctcccacctggcctctacatgaacagttgcgtagttggctgtagatttaactccccagtaaacgattgatccggctgactgtgggccgagaacacgaatcaactgaagatccgctgggtcgagattgaagcccgcactattggaggcgtagtattggttgctctggttgggctcatgacggaggacgggatgggtccaagataatatgccatgaggttgagtgggttcttccgagtgaggaagacttgggtcctacgtacatccatcggttgaagtatacacacatgtctcagtttcggatcaacagatctagaaagccattcgggaaggttgatcttacatagggaggagcaggaacatctcgaaccggcggataatcatcatgattgggtttgttcaccttgaacaacgcatgaaacgttgcccaaacggcgagccagatgacaaacgataagacaagtgctttgatgaaacggcctgtcgcttggctcttgggacgttccgggagaggagagtattgggatgtttgctggcgctcgacatcttggctggcgacatatgcaggaggtgcagtagaggaggaagagccggtgggagcgctatcagctgtgccggtggcaggaagaagcttggccttctcggccgggttcatgatctcaatcatgacggtaacggtggtggtggtggtagtggtggtgatgagaaactaacgggactgactggacggtgtgctcttatgtcgtgttcccttcagcccaacaagctgatcctaagctgcggcgagaacttctatcgtagagtgtgtgtgtgagtgagtgtgtccagccgggaaagtgccaagttctgttgtcggtcgtcagcatgttcttctcttgcttaatgttctcggagaggagcatgtgtatccgtcggcgatgtccgagctgtggttacagtgattacatagcattttggaaacacgtgatctgtctggttacaaacacgatcacaccctaagccctcttcccaattgtcctcaccttcttgcttgagcagcttcgccgcttgcttgctcactcatctgtctctcccggaactcgacagcacgttctagatgatgctacctcagtccacactctgtctggcagcagtctctcttgcagttggccagctagtcagggcgcttccctcgtttgtcgcttcctcgggcgaccatcaaaatcggcaggatgatcagtccgtattgagtgcatccgcgcccgaactaggcttcgaaggttatcaggtctggaggatgcctatcaataggaaggacgttgagaatgttggaaaggtcggtatcaagtgatccttacttgtttctcggcatcttttcttcacttgttggcgtgctcggttgttcactttcacattcttaatctttctctcttgtccggtttctatctttccttactctcttcatgccatcagcttctcaatctggatatctgggcacaccacccatcgagcgttgacgtgctcgttcctcctcacctgatgtctcacccgctacttgcatcttatattccaaactcttctcatccagctttcattcccgacgtccagaaactcatcgctggttcttcctcttctgccttctcctcttcttcattcaaaccatatcctcggccatcgaacggttccatccctatcacacatcctttccatgaccgatttcacacctatgacgagattcactccttcttgctcgacctgcaaaccgcctggccagaatgggtcgatgtattctccatcggacaatcagccgaaggaagggatatctacgcagccaaaattagcccccgtgttgtcgcgacgcattcgacgaccgacaaggatggcagcgacgatgaggaagaaagcttgaaaaagaacagacacaagcacaaacatggccacaagaaagagaggtcgaaaaaagagatgattctcatgggaggttcgcatggtagagagtggatcgcgccggccagcatgctgtatttcgcccaccatctgttactcaactctcatgccccgggagtgaaaccgctgttaaagacattgagcttcacgatcgtacccgttttgaatgtggtgagtgtccggatcagttaggctatcgtacttgcaaagacaaacgagaattaaccatcggagtttgcaaacaacctcctcctcgcgtatatcaggacggatatgaatttgtacgtagatagtttttggaaaggaaaagttatctttgcttggagtgaacttctttttgagcgccttttattttcaattcattctagactcatacaaactcccggctctggcgcaagacaagacaggtcgtcgatgaggaatctggttgctttggaatagatctcaaccgaaactgggtaagattcccctgctttcttttttcgccttctttgagactctgtgcctctagatatctgcatatcactgatgaacggtgaccatccttggaacagggttaccactggagcagtgaagacgatcagtatccttgttcagatgacttccctgggaaagtaagctctcaatctcttatctctgaaatatcaagtctcttaagttcaacgcctctattatgtacttgtagcacgccttccaggccccagaaaccaaagcgatgtcggattacgtcgcctcaaaggatgtcattagctttgtagaccttcactcttatggtcaactctgtctgtcaccctttctattcatttcgtgatcatccagtgttagatctcggacctcatcttctttctcttcctcatctcaacacagtgatgtacccgtttagctactcatgtgatgatttcccgccggacgcagaagacttgatggaagctcttttgggagccgccaaggcgttaagatctgtacaaggtacagcctacaagaccggacaagtctgcgagttggtctataggtcagttctgcagtctcttttcctctcttattactcatcgctgatcttttgttcaaaacgggacaaaacttatcagagcggcgggtgactcagtggattggacgtacggaaaccaggagatcaagtggagtgcttctatggaactgttcgtctttcttccttgtgtttcttctttttctcttcccttctctttctctcctctgttctgcaccccatcggatatggctttgcaatttttctctttcttcgtcttcctacttttgttaaattttctttttgtcttacttcttgattcgtatcaacagaccagatacaggaacctatggcttcctactcccacctcgagagatccgaccagtggctgaagagacagtggccgctttggtctatctggctcatttcgttgttcaagttcgtctctttctctttttttttcttccttcttctttcttcttactcttttcataggatgaaattctgaccttgagttactattgaacatgttaaaaacagaaagaaggaaaactgaaagatatttaggaaattgcgatgcgccttttgctcccatttttcaagctgctaaacatctccttcacatactttcttaatcacatatcttaatccttttctattgttttctatcttcacccgttatgctcgacccttctttccttaacatttataggaccgccttgtgtccaacttgcgatcgggctaccgatcttttttgcaacatttgtagtacatattatggaagacaatgtccagaacatgtcctttcttgcgcacccttttctgggtattcaagtcgaccaacttactaagaatacactctccggggaaagaagaaagaaaaaaaaggagtataaatcatcatcttcctccttttcatataatgctcctttaaccaatgctagtctcggccgaaggagcgcaagtctgatggaaaactccaccagacttgagcaccacaatcttctctcttggcctgtcctcttccttcccctttccctcttcctccggtgtgagaatcgacgaaggtctgagtcgttgcccacatccgtggcacccgccactactcccttcgatcgctctccatcctctctgtcggcatctccctagatcttctacagcttccaacaagtccctacttagtatccggttggtcacagtcaacagatctccttcggcctggtatctgtccaacatcccagtcaagatcgatctgtattcgctatacactcttctagatctgggagttgaagatgatgacgaagacgaaggttcagaggaagtcgacgggggagaagaggaatcgactagacgtttaaatagccgaggaaaggatacgttggagtgagtagcagtcgaaaccagagaagctagactttcttgcattaaaccccgaagagaatccaacacgatggtctccatccctgttgtatcgtctttcggacattggtttgattttccattggtagagactgtggaagatggaaaaggagaagaagggacctcatggttgggtgctatagcggagattgaatggacaagctctaaaagctcatgtaaaagaccaaaccaaagatcttcaggtggaacggatcgatctgtagatcgactttccgaatggaacgagcagagctgagctcctattgtcgtcaccgatttcaaatcctgcaaatcctggtgaacggaacccacgttcccgtcctggaaggaaaggaaggatgctccgatccgagaccctcgggatctgataatttcttcgactttgtcaaacgcaggtctgacttgaccggacttgtccagtgcccagatcacagcttcgtgaatctcataccgttcgcagatctccacaatcgactccaacggatagaattctttaggcgcggattctaatacagagaatactctgaccgagtcgaaccgacataagagggagatgtagagctgacgggaatgttggttcacacgcggacacggctcgagaccgatgaccgagcggctatcttcttcctcatcaaaagatgccggttcgagaagacaacgaaggtaccctaactgtttacggggagacgaagatatagcatctagcgcgtcttgatggctattcgggagatactcatccaccaaccaagcggtctctctaaccccgagatcacacaattgaggaattgcctgtacgatggtcttatcgagatcttgcgggagacgaccgtcgcctaaagtggctatctcaatgatgttctctagcgcaggaaacacatcgaacgtcgtatccggatcatccaaatacgacaacaccaagtttgtccatttctgctcagatctatagattgatcccaagatccggtagaacccagattgttgaaagagagacatcatttgatccgtgtcatgtggtgtgtaagccgatagcaagaactcgactgctaactgccgatcttctcttgagctttgatctgggtcagatgacagagcaatcaatatacgatgtgacgttgaaggcggtaatatgatgaattgtggatatttggggagatttctcgaaataaatatgtgaaggagcgtcaggtcaattgaggaaaattcttctgagttcatcacttcgagcatgacgttgatgatgagttgtcgactaacaactccgttggagtcgtggtcgtcatttagatatgaatcttcgaaggcgatgtccatagtgtgaaggaatgcctcggcatcgaaccggagaagaaggcgaaggtaggggtaagcagactcgggcgcgccttcttcctccgtggtgaggacaagttctccgtctgtcggagacggaattgatcctccactgaacagaaacgagtagacggatgacatggccgcccctgcctcagcttccggaattgggtcactacttggataggtcaatccagacagcacatgagatagataggtgtaaagcttgtaggcgtctggaacaagcgcttcaatttcgtcgttcggaatatcttctgtcgacctgacgtcgcctactctagaaggacgatgagacctatgttgttgaatcctgcggaccaaacccagaagctcgattgcaggcgaaacatagtctagtaacgatctggtataggcgtagatcagcgcatcccatagtcgatgcttctgacataagtgaatggtctggttgatatctaaacaccttggatcgacatgccagatagcgttctctagctgatctagctctcctctctcgtcatgaactcgaaggagatgctggacgaccgcagtaggaagtgttctgatctggccgtcaatgatgaacggctcgagttgtttgaagaagatcccatcaatccaagcttcttgataggcttctagaacgtcctcaaagaagaaatcaaggtcaccaagcgcgagacatgcgttggcaatctcgaccactaaaccttcgaacaaagatgttcggtcaacaccccgtccatccatactgacatgggtatcatctaccattcggtcttcggagaaagtgtattgcaacgctgcgcgcatcaactcttttagtcgagagcctacaagactctcacgttcaatggaggtagctggaagggataaaagtgtgctggtttgttgtcctttataaaagcatgtggccagtcgcaaggctgcaaggagatcaccttcttccattagatgaagaatctgatccgtccaggattggattgtccccaattttaaatccgctttagtctgaatgagaacgacggtaaccaaattaaatattcagcccattcagcttgtgtgctattttgatggggcttcgatgacatataatctttagatggacttacgaggaagaacagtctacctttgtatgcgcttagacttccagagaaattgacaacccctgacccagaggtggtgggtccagggacaagtattctacaatcaagattcgaacgttcaatgtgggtgcttgaccgaagatcgatgatagcgatattgcgcggagttaaaacagccacatgctatgacggaagacaaaaccatggtgaatctagaccatcagaacatggtcttcctgtttccttacttcattgaaacctaagtggagcaaaagagatgatatatcagacaaacttacatgatcgtcaacccactccatgcctaaactacctccgttcaaagtccacttccctctctcttcgaacacgattctcttctcaaacccgcttcttctttcttttttaattccagcgttcacttcaccattctttccttcttccggcacgactctcacaaccaacgttctcaccacatccccccatgaaaatattaacaatggatccctcggttcctcgtcatcaattttggtagtcatcgtcccatttagactcgcgccattcgatctgctcaaaggcagaggcgaaacgcctgttccagctctccacaataagtgcccgatcttcgagccaaagtctcctccctcacctgaccttaatcggcggaaccatgtccttgggcttggcttcaacccaatgattaccagtttcgaaggtgtaagcaacgccgaaagttggaacgcgtcaaccgagtgtgctggtctatcagggtttcctaatgggaggggctttgccccgtgcaaaattgatgctgacgacttctttctcgggtttagcccatctgggtagcttcctagaatacggaggacgtctactgaatcgactcccagaactcttccgagtgagtgatagaatgctagccccttttcgtctccactgatgatggctgtctgtctttttcctacaaaccctacatgaagaatcttggtacctattagatgaccttctttctgaccggataacgcagaagaaatcgttattggagtcactgttctagtaggaatgtgcggagtcgtagaggagagtgtataaatatagatatggccttgggcatgaccgacaactatatgcgtatggtctggagacaaagtgagtgctgtgacaggtcctgcctcgtttgctagacagcacgaaacgaaactagattagcaaacagaacacagaaagagagctttcaaggaatctttcaagggggtatcccgacctacatatagtctcgtttccaaaccatcctcttagatctcctctaaaatcccatgcgccgacccacccttttgttgtccctacgcaaatccaacccccggcaaccatcatcgttgggtctcccatgtctggtctatttctgttgtctccagataggtttgccatcttggaggttggtcggcctcttggatagagcgcgtgcgagatacgtttgagagtcgtgtatctcataggatcatctaatgataattctggcggagacggcggcgatattgatgtagatggcaacggaactgataatgaagatgaagcgcgcattgattgaggatccacgagagaatgtatggtagacgacgaatttgatctagatagttgggagaaatgcgaggaggagattgatcggtcgaaagcaggaagttgagaggacgcggtgctgtttatacttgaggtagatggatgtcggacatgagatctcaagcgagataccgtaggatctacataatgttgacagcagggtaagattcaagagttcaagtagcgaaaagatcagaaaatgcgttgcttacgaagaaaggctggccggcgtggctgagcagagtttacagagctggtaggtgaggtcattcttattggaggcgtcgaggcgaaagcaagaggttcattcgatcgggttgaaggagttttgtccgagaaggcgtcttccatctgttgacaaataacgaatcagataacttagtcagctggtggatggacggaagaatggacggtcattgaaagtcgtaagaaaagcaaacgaacttgagaaggatcttctattggcactggtttgagttgatccaattcgtcgttgaatcgtccatattcttcgagctcatcctctccgttgtatctgtcttgactcatgacctccgttagtctggtcctatatgcttccgttcttccctcctccgtcgatcccggtgcgtctgaatcccatccagctctgcgagcagccagtagattcgcgtattctgcgtcttgatctacaaagcgaaaatccccctcaactgggtcatcggcaccgtccttacttctgttctccatctctaattgagatccatcacactcagccgggttattattaaggagttcggctagtttttttgattgcagccttcccagttcatcttcatcggacttgtatgtgaaagacgaaggtgatgatgtttgagtgagatctctgtcaggggaggtatcagacggagtgggagacgaggagtcgagtcgagtgattgtgttctctgatgaatgagagtatgatctggagggcatgagggaagaatcgagttgcccaaggatccactcgaatcaagataggagatgagggagggagggagtgaaaggtagactgatattgaggtatgagagacgaggtctagcacgagatggaggtgaccgcggcctcatcactcgaaatgtaccatgcatgcttcagggcaaatatggggttcgacatgggcaactatggcggttaattccgaacatgaaataaaccatttaatatcttgataaaatcaaaagagacaagacaactttggaatccgttgtaaagaatacatattaaaagaagaagaaaacatacaacgaaagaacgtaacgacagaaaagtaagagtttgaaagaataacaccactcagaatcgagcgcagaaacgaaactactctgctacctcttgcactttctggcttgcctctgtcttgacatctggtttttcatccgttcttgcttcagaatcaagcgtgtatgaaggaatgataccttcctgaatcagctcattcaacggtcctttgaaattagatttggcgaatgagaaccaagaggacagtgcgccgacgaagataattcccactgccactggagtatagttcaaagtttggctgtcgacggggttgagagcggctgaagtggtttgagaattgagaggaaagacacgaaagccttagtaatacttagtttcaagctgaacttatgggaaaagaaaatacacccacgaagacagaagacaatagtgataaacatcacccaaccagcggctatcactccgttgattctgatgtggtacagggaaattcatacgtcagagaagagaggcgatatacacaaacgaacagatggcatggactcaccgagagaatctacccaggttgaaaggtcctcggattgacaagaagcgatcgtgatagataaccatcaataaaatcgggagaccataggacatgtctgatgatagacatcataagaaaagaagttttagcgaaccttctcaaagaagaccgaaaaacagataagagctggcttacaaagtccaatagtagcgatcgacgtagctgctgagtacgcaaccgaacttcccaaacttggaagagcgaggagaaaagacaggaataccgcgagccagactgcatataacaataatgtgtgagctgaacatacaaaaatagctattttcattcaaagtagtcgatatactcggtatggacttaccag

SEQ ID NO: 983 - DNA, 1230 bp, Xanthophyllomyces dendrorhous
gtatggacttaccagttcgtacgggagcagagaatcttggctcaatcttgtcgaagaaccgagggattccaccatctctgtttatttggtggaacattaatcaaagtttcctgacatgacggtattcgcttttaggtagtccttgccgaatgaaaaaagaaggcccaccgagcaaaggcatagtacattcgactgttggatgtaaccgagaacaaaccgcagtgccatacacagagcatgacaagagccacttatgaacccaaagaagaaactgttgttgagcccaaaaagatatcgacgagaacgagaggatggaaagaaatcttactcagtactttggctccagccgtaccgaacacgtcaacgaagatctggaacacaggctgtccgataggagatgcgacagtgttgtcgaagtcttggattgagaaaagcattgagacaatgaagaagaatccaaagatagcggagattccgacgctcactaagacgtatcagcggaaagatgtgtcagctagatattcttcagttggcccgatagcgcaggaatgggagacatactgataacacctaaaggtgcatttcgagcagagttcaaggtttcctccgacatgtgagcactcgcctattgatcgcagagaatttcaaataaatcatagattagtatagatgtacagaaccaaggcctgaggtattaatatacttaggattcaaacatacatcgaaaccggtgatagtgaactgagcttgcagaattccaataacagcaacgtatgcaggacttgcgcgttgggaccacccaaccccgtccactcctgtgccatcataaaactttccaaagacaaaggagcctgattgatgggttggagctttggctaaagtggccacacatagggaaaagataccgagtgaatgcaaggtgacggaaagcgtgttgaagtattttaggaatttgactctgttgggaaccgaatattcaatttcagaacagaaatatgaggagttgaggtatttgcaaagactaacccaaacgtgttcacaactccatgagagatcaacaatgcaatataaatggcgatcgtcttgccgggagtcgccacgtagccgtcaagggaggcagctgtcgagatgagctgagcgagaccgaacgtgatacccgttgttctgtggaagagagtttaaaattgaggatacagttccgtgtgtatggtacaaatcaataactcacac

SEQ ID NO: 984 - DNA, 6410 bp, Xanthophyllomyces dendrorhous
caataactcacacagctacttgtcctagaaagttgaaccatccaaccatccaagccttataacaaattttgtcagtttattgagttgcctagtaaaagcctattttgaacctacccaaaaggccgaatctagttagagaagcattcaacgaaactgatcagttgaactcatttgaaacaaatcgtgatatcacagagagacaaagggtaaaacgaacattttggaggagccaatagcgccgcccaatgactttagaccgaaaaaaaaacagttatgtcgagagatgagcatgagaaatcattagcagacaacattgatcattcacttactaagggcctcccgaagcaggaacagcagagacaatctcggccattcctaaagcgaccgttccagctacgcaggacgaaagataagaagaagcgcatcaagacctgtaaagtagacatcagccagcattatcgagggccaaggaatgacgtactgaaagcggaaactatgatccaccctatagtcatcaccgctggacctccggttgtcaacccatactcgaaaagagttgttccacctggacaacatataaagaacacatggtttggatgtcagggatgtcagtgatctgaattctcaacatttagactatcggacgacagacctgtgataacactgtatgagaaaaagtccatcatttacaatcagctacaaagctatcggtctgccagaataatcacgatagacaacgaacctgatgatggaaaatgagacaccgaagttgtgctaaacgagccacagagccacttaccgtaagttcactcccgtcttgatacgaaaattaagatcgttgatggacacgactcacaatgagacccattcctctagatagctcctccttatatcccaactctcgaagtcgagcttcgtctgctgtcggttcatggctggtgattgtcgtcttgttttccgttgacatgatgacaagatggtctttcccttctcaatgtgtgtgtgtgtgtgtgtgctcagtaaagaaaggaaagaagagattcaagaaggtcattgggtttgttaaacagttttctctgccgggtgcgatgcgcgtagacccaaaccgagataaggagataaaaattagccgatcaattgagaacaaaatagccgcaatacttcggctactcgatgacgaaactccagatggcagcgatagttactatcatagatagacaagcgacacaatcaaagcattagaccccatgcacgagatctcactttgctcgctgtcttcctccggtgacctctaagttccaatatgttatacactttgacgccaaaatatcaatatgatatacagaggtgttcagatgaattttgtgaggacaagaagcgagaactgagaagaggtccgcgcctacctgactgtccatccaacgtttcaatacaatttcccatcctttcatccgagcaccatgcttgtacgccaaatgagccatttcttcaaacccgacaggctgtagcaacaagaagaaaggaatcgtttttgattaattaataaaaggcgtctactttcagaaatgatagcagtcatcagagaaaatgctcaacctcatatctcagtagtcgaagccaaagttcttcgtcttgtaaaaccatctgatgaaagatctcaaatagatcctcatccttctgttcgggctcattatctagatccgaatcaacgttctcggtgtctgctggccaagcacagactgatgacccttgttctaattccggctctacggcctcctctgacccatctagcaaagcggtaattctcttcatcttctttcttttagccgaattcgatacaaccaactctttattctcgctcgagagcctcttcttgtggactttctgcttcgatgctcgaccagccgaagtggacatggatggagacggaccgggagtctctggatctggaggtaattcggggtgtagggtcttccagacatcgacgaggaggctgataagctgagccttggaagacgactggcgaagtccataggatttgaccaggttctatgaaaggttgtttgaagcatacaatacagactgagcagtcagatacgtaagcgagaaagattggaagagactatcattacctgcagttttttacattcccagctctcgtagtctggcataacaggagccttcgatttgcccttcccgttggtaattttgattgaagaatgacgagaaaatacatcaggagaagatagagatcggtttttattgaggtcgatctggtcttcctcagttaaactgattggactcccaggcaaaacatgcctatccatccgcaatactccctcgtcttcgtctaggagaaagtcttcgtacacgtccaagtcgctgaattgctttgaactcgaaggtttcggtgtctcattcaccgggtttatgagaaggattccatcatcatccgattcgtcatccgagatggatataaaagcgggtttggatttagatcctccggaggttcgattgggtgttgaagtccaaggtgaggatgttgcgggttggacaggttttaaagcagagacaatctgaagaggagacgaagaagacaggatttcttccacagaatcaatcagatcgacgatctccggagacgagccaagctcaaccaacccgtcttcttgaacctcgtcttccactacgatcaggcccgcttctccatgataattgttctgcccttcttcctctcctcctcctcccctcagacgaagagtgctatttaagccagtatgtgtccaattgacaacatcagtcttccttggtgaggtcaatacattcgcccccgcaacgtgcgatgtcaagaatgagttctgtgtcggatgagatgataccaacggtgcgaggagattcggtagacaagcgtggactggtgaaaggagatttacgtttgagcttgaggataaatgagcaggggagaactaaaagttagtcaagttggtatcatgaattgaggatcggatcagttaaaatgcaggaagtcggcttatacgaaagataacgcacagatgatctttccgttgggcttgtctctcctctggcagttacttctccacgactatctttttgttcatcatcactcgggtcaatgaactcgtccttatcggatgaccggctatgatcttgtaagaaatcccctcggttggctgcatcgaaccaacctcgtccctctccgctggacagacctgatctcgacgcgcccgacacaccatatttgtgaaatcttgaaccgagattggacgtggtaaatacctgcgttggcgcaagaacttttcctatctcatcgtcctcgccaaaagcttccgtctcactctcccgtttctcactttgggcttcgagtggtattggagttcggctatcagcaacgtgttcttctctctccatctcatcatccgaactggcgagtaccttctcgattcgcattttcatcctctctctcccttcctcggtcgctactgaaacgactgtcgtttctttgatggcctttctgcctccagaccgttgcttggtcgtcagagattgaaggagcgactttggctcagaagccgtcgctttctggatatgcgcgataatcatatctttcagagactcgacagtggtatcatgtgaaaggcgtgtggaacaagcatagatgtgtttctatggatcatatgaccccaggagcatctacgatcaggcgatgtatgcgaggaagagtgtgagaacagacgcattcacatacccatttcgtcttccatacttttctatccttcgaccagtcttcagaacaaaccaagcacttcacaagtttcttcatctcgcttccttcgatcggacaatccgggacgaccatgaatggcttcgacgacgtccgtttagagatcagggctgcctttttcttttgatggagcgcgtccgtggatggaacaacagcctcaggtccactcgttgagcaaccatatgcaaacttggcgaatgcggacggcttttcggcatgtttttcatcgacagacagcttattgtcttcggaaggcgtccgacaaggtgaaaacagagaatgtggctgatctttgaggatgataggagatcgtggtcgaggcgtggtgatgatgttggttcgagaggaattagatcctattgatgataatctttgatcctggttcgctataggcggacttttcttgttgatcgcgttggcgttgtcctttgtctgaaagtagtgggagtcgatcgtccctgtgaggtcgatagttgctgttgaccctgaggtgggaaagccgatgtcattggcttgggtagggagtgaccgacgttttctagctactgtattggcctttctcaacgacttgatcgagtcaagttgagccctaaccatgtcgataagcagaggatgaggaatcgagggatcacacctcaagaggtgtgtcttgcggaagggaagagcggtttgcggtcaggtctatatacatcaatcgacacaggtctttgcttgggaaagaggcctgtcaagagatcaactcacccatttagttttgattttctttccaggctctgaccagtcctccgcgcagatcacgcactctttcagctttctcatttccattttgaaagggcattcaggtgaaagagaatcttgaagagagggatccaccttggtgggtgacgggatcgattgaagacgcgagctaggttgtgcggaaggaggcgtgggcgtaggtgacccgtggggttccggtaggataggtatgtctgttgttgaactggatacggttgcagggagtgggatctctggaagcaatacaattgggatcaagtcatggccctcctcttcactttcgtctcgatcgtcgtcatcgcccgtgacgacatacggactagaaccggacctgtcgtaaaaatcgctcgctttccgagtccgctccctttcaggttcagagtcttccactatatcatctgaagagagacctgggttcataagatctggcttgaacgacagcacggtaagcttgtaagggagcaggttgaaggaatggatagacaaagcaattgtctttatgtgagaggtgatcgaatgtgtggagagaatcgtaaccctaacagaagtcgcgcgacaactgtggagaatcctatactcaagctttgacgaggaattttgctttaaatcgtcatattctgttttgacttgcaagagtgtgcttagtttgtgcaagagtcatggcgtacaacagaaagggaacaacaatacatattctattggatgcaatggtagtgagatagcgatgtatagaaatctccgacgagagtgagaagagtggaacgaagaagcctcaagccgatttcgaacgttctttggcagtcttgttggctgaatctattcggtcaagccatccctagagtacggagagtagaatgtagcagatgaatgaacaaagttaacgtggtatccgaagcgtattgaaaatcgaacagagatgaacagatggtagtctccctgctggttgaaagagaaagaagagcacgaacctgaacactcttgacgccttcttttcgttcttttcttgcctcttcataagacgaaggacaatcgattccatctctggggaggcggaatttaacatgaagacaaggattggttaacgttaaagatggtaagcgtctgcctccgacataaggcgagagtttacatacagccacaggagggtttgaagaagcatttcactcaaaactgtgaactctttgctgtactgggcgtgttctggagattcgggaatgaggacgggaccctcgatagactagaagacaacggatggaagagtgagaatcgatgtatttgacatgctgcctgttgatccttcacgatctgaccggtactcgacacacgcaagagcagaaagggaaagaaatgaaaggaaaaaaaagccaagactcacggccttctcaaaatcgatgactcggtttccgagcgtgtctctggtatctccaaccttcatcttgatcctcctgaccaggtcactttcactctcttccccgccctttttactctttcctgcgcttcgccccttctccttctgaaccttgccgacctcactctctgcgttctttccattaccaacgatggccagaacagagccatgctttataccgtacgtggagagtgagagagcgtcctcggacatgatcccgcctgcaaagatgattttgaacgatttgggaggcaaatgggtctgatgggccaggtgtgctcgaagggttgacaacgttgttttcgaaggaggggttggaagggtgatctgaagtctagttcgagatcgtcgtcaaacaaaccaggttggcttcacttgatgagtcgaggtgtgggacacaacagatcacctaaggcttgaaag

SEQ ID NO: 985 - DNA, 23439 bp, Xanthophyllomyces dendrorhous
aaaatatatatagtaaggacgaacttttctcttccccatttgaccactacgaaagtggtagattcttcagagcgagaaggatgatgcgacctaaaagctcgctgcatggtatcgaggaaggacatggttgaccggtgggttgtaaagctgagatactaatgatctgatggctgatattcggttaaacgacaatccgaaagtcgtcggctggaacagtcagggcgttgtgtcgtgtagccatgacgaagctctcaaagtggttacacaccagtgtcacagcgcatggttacacataactctcgagcgagcgtcctttactcaatgttgccgctggatgtgcaagctacacgcccacatgcatacagctagttcgataaggttgttcaaaacaggcatgctagtttgagtcctctcttggttgactgacgacactacttgtaacaaacaaagagaaagacgaagacctatacaaagaaagatgaagttgtaaagatatctcggcttcacgaaagaaagggccgagtcaacaagacaagagacaaggccagcgagaagaatcacacccttcggttccgatgcgtgcgttcgttaaggagagccttctggatagagcaaaccgacgcacgcgctggaggaaaccatatgtttacaggcgtatgtatgctgtctcctctcgatacaaacacgtacgacagacggatggcaaacactgactctgataatcatcccaacctggctaggactaatagcaaaaagtgagacaaacccatggcggcatagaggatgaagcttagagcgtggggaagatgcgcagtaagcacgactcgtagtgagtgttccagtcgttccgataccaacaaggaaatcttgtactgctaactcgtgtgagaaacattcccttcttgatcttctctcgcctgtctcgctttaatcttttatctctgttctcattcatcgtcatcgtctccttcttcttcttcttcttcttgcaagctcaatcctagggtcccttctactcttccgtgctctcctaatctcggtcaatttacaatcttagcgactgtcccaataggatcgacagtatttagttggaaattccagactgcctttcgacctttcaacatcctgtgacatcctaacggacaccgcccccttcatctattttcttcaacctctttgtgtgtcactcaagtcctttcgtcgcatccccttctctctctctctttctctttcttttctcaagatggatgcattcaatgacgatgacgcagagttgaattccttcttgaggacactctcacccgtccatattcaacaatctacaacatcaccttccctcgatcaaaggtccccatccttaggtgtttcaacctcaaccttccagccaaatcaacagcactctcagtctcagtctcaacagtcagcttcaccctttgggttcttggatccagacagctaccaacttgcacaaggtcagctgcaaaaccaggattggtgggcttcctcgtctgcaatgggatcagcggatcgtccggtagtcggcagggatggaggagctggagaagcaggaggagcaagatctgttcccagacctggatacaccatggaggaatacgcaagcttgatcgcagaacggatacagaatatctctcaaaatagtaatagcaacgacagccacaatcacacattcagatcaagtctttctgcttcgggagactaccgagaagctggatcgggatacgcaacaccatcctacgcgtccagctacggtagctatcaggacgatctcggcgcgtttgatggcgcgagctcaaacggagaccttacagccgacagtggatacaacttgttcgtttctctttctgctcttttgtctcaagagccgtgataagcgactcttcgaaacttatccttcctacattcaaccttcgttccggttactggatatacacaggaacggagacgatcacgactctaaaggggatgtcgccaatgcagactttttttcctcctttgataacttcaactgccaatctcttgcgcaagatcctgccgaattagacgttcctctaccatctgattccgatagccatcaaccaggatggcccttcaatcggtcgctcaccgggcagtccagtgcgagccacctggccgtcaatcttcatctatcagcaccgaagaggacgtcaacgatggagaccgacgcgacgatttgtccagagccacctgctcctcggatccggatgccaccagcccatcaatcctcccttccatcctcccacctgtcctcgttcgactttgcttctgataccttgtctgctgcctcgcccgagaacttgtccgaggaacctgttgcttggccggaaagtccgaaggggatgagtgagaagagcttctttgagggggatatcttgtctgcccattcagggtccagttatgatcaaccaataccttctcctcgtcttgtctctagtaaagtttcttctaccgctgctcctcttcaatcccagagtcacacttccgattctaaggcttcgcctcagaactctgccaactacgattcccaacctaaaccctccgtcccatgtgcatccgggtcgtcctcgtcctcgccgtcccggttcaacatccagcaattatctctatcgaactctgccccccccccgatatccatcacgccatcccaatcaccctcgtcgacatcatctccgtcgaactccaatcagtggtcctccccaatccttcaaaactcgtctggaaacttaaacctttcgcctactgagccggatgagcaactctttcgcaacgcggggtcgcttccgcctaccaatccgaggctcatcagtctcggtcagatgccgcaagcgggtgggtcacaagggctgagcgaccaactgcaaatcaacatcgttcctagtacgcccacgatggggcttgctggaacaaaaacgcagtcctcaaacgagtttgcatatgctatctcaagagcagtaaggagccctgttcatggaagtagctcaacgggctcgtctcctagagccagatcgtctccgaccacacagaacgtaccctcgcagtctcgacttgtgtcatcgagtccagtccagcagcctcaaactttcggctcatttaacggtcacccttcaacgtctccaacgagccccgcgccagagaccccttcgttcttccctcagactgttaccttggcgtccaacggatcagaagagatgagctggttgtcgagcttggggaatgcagcgactgaaccgaacattcaaagtcaaataactgtctctcctcctcaagctggtccgtcatctcttgaattttcaccgggtaaccctcggccaacatcaatcccgtatacgttcttctcttttaattcatcgttcccacaaagacaagaccttgctacccaacctgatcgaaccggatcgaatctacctgtaacaaatcaagtctctcctttcctcaaggcgccacctcaacgtcagcggtctagatcggaagcatcgcttgttccttacgatttcggcccagttccggtcccacccacaatgaacccaaatcatttggccaagcctggaagcaatcaaccttctctgaatttatcggcatcactgatgcagcaacagcaacgacaccggatctcatcccagcaacaacagcaagaacatcagctcttgctattgcagcaacagatacaacatcaactccagcaacagcgacaactccagcaacagcaacagcaacaacaacaacagcaacaacagcagcagcagcagcagttctcacagcagttccagtttcaaatccagccccctcaatctgacgcccaaaacgcgagcactttttcaacgtcctttgccgggaacccgtttctccctctgaacgcgcttcaaaaacttcagatgcaacaacagatgcaacaacagatgcaaccagttgatttctatcagtcccagtctcaactatccacattgtctccgtctttgaatccttcgagttcagttcatcaccaatctcttgacgggaaaccaagaagaacgagttttggaggaggaacattcggagccggaactccaaattacgggcaaggcctattgaatccttgggccgggatgtctggattaccggctggcgaacacgtggcgctcggtatgcctgggccaggagtacagcgaagcttgagtgatgctggttcgaacagaataagtcatcgaaaggtcagttccggtggttccgtacattctttctctccccccaaaaaaaatatttcaagctgatgcctatccctatgtccattctcaggtgaagtcggtagatctgagttcctcgccatattgtcagtatcattctcacgctatatagtgttagctatatgcgcacgtatcttcgttctctgtccccttggctaatcaatagttcactgatcactttttcctttaccttcaattcattgaaatagtgggcgttccgaacaacccttctcgatcaccccgtcatcgatcgccatcccgtcctacctcaaccgcctcgtcttcatccacggtacccgtctctaattctagttcggatgtaaagtccctgcctatgtcttcctatgccggcttaaattcgcattccggcttgtcgcccactcaggacctggtccaaatggacatgaacatgtttgactctgacgaagatgatggagatactgatcctgatgggccgtcgatcatgttgaccccactttcagaggtttcagcatccggtggggctggagggtcggaggaattgaatgtgagaaagcagagcgtgacgacgaacaagacggcgaacgcaagcaagagtagaagaaaggtcgtcgcacatttcatctgtccgatcccggggtgtggaactacgttcactaggtgagttatcgcgcatgagccaggggaatcttctttctcttcttccgcaaactgcacttacgctgacatcatattaaatgtccaaaggtcattcaacttgaaagggcatctaaggtctcataccgacgaaaggtttgcattatgcttcttcatagttttgtggtcaatcatttcctgatctcaacacttatatttttacataaacacagaccattcaaatgcgagacttgcggcaaagggtttgcccgtcaacacgattgcaaacgagtgagttatcccgtgctcgctacaagatacgatcacctttgtcgtctacgtttcttactcgctttgctatatctcttgttcaaaaaagcacatggctcttcatgttggttaccgtccacattcttgtgtgggttgcaaaaagaagtttgcccgtttagatgcactcagtcgacatcgtacgtttttttctgcatcctaaatgtgtttatcgcccgaaagtgacaagtatggtccttcctattcctaacctcttctttgcgtctggccctatccagtcaaatccgacgccggtcaagaatgcctacgagtagccgagacatcagctctggcaagtgacaccgatcctgaggcggatattgaagagacattggagaaggctgattcgttaggcggcagtgaaagtagtagtcctcctgctgaaagagatcgtcgaatgccaactcgagggatgagtggggtgcttctctgaactgatcttccggatgatggctgaatgcaaagtcctgacgcgtcgggaaattgtccgacatttcttttgatatctgaatgataccgatcagtgtccttctttctgtcaaaatagtggattaggaaactatattataatttcatccatacgacgtatagattttgttttatatatgtacaataagcttttttctcttttcctctttaacgatgtttgaacgactgccatgtaggcgtgtgcacggtgatacctaaccaggtatgatactgtcgtatgtcatttacgaaacaaggatagatagatttgagaggaaatttgagctaacacgatgtttcgatctagcataccgcatccagcgtacgtctgcgggagatacgccagaaatgcggttttgagtgcgatttacttggggactgacgtcattgtgatctcatcgtgtgtgttcccgtcgttttttttacctttccttccagctcatcgataccgaactctataaagctaccgaactctgttctccattcaaaacactactacaaccaacatgtctgctccctccgctatcgccgtcaccgacgctcctgctgcccacttgggccgacctttgacctctaggtaagcttcttcgcctttctccttctcgttcttccaccttttctccaagttcctccttaattctcctcattcttttccttgttgtctataatctaacctttcactttgttttaaatttacacagtgataccatctctgccggtattcctgattcaattgttacctctcagaccaccacaggacacgtccatgacgcgtgagttcacccgctatactaacttgctccagctcgatgtatgtgtttgcttacccttttaatcctcctctcaacctagtaccaacactgctactggtaacaacaccgggaaggcccccattggagacaaaatctctggtgaggttgacaaggtatgttctcagttgtcatactatcctttctatgtgattagtattggtacttatcttggctgcctcttactccacccggtattcccatcctagctcactggaaaggcccagaagaaccccgagctggttgctcagggtgtcgagaagaagggtcacgccgatgaggccgaggccgttcgagccactcagaacaccgacacgtctcgagccgccaaggagactggagctggcgactcaaccgacgttaagcacaccaatgtcatcagtcccacttccgccggtgcctcccactctgctgtcagctcggttgacccaacattgaacaatatcggcaaggcacccatcggacagaagatctctggtgaaatcaacagggtgagtcagcttaccaggttttttttagagatttaataccttgggttgtgtctgaccatctcgaatccttatgattatcagctcgtcggcaagttgaccggaaacgttgagaaagttgcccagggtaccgagcagaaggggtgagtcggaggctactttatcttggttacgtggaacaacagctgatgagcactcttcaaacacttccttcaatagacacgctgccaaagcccaggccgctcgggatttgaacacagtcgatgtctctaaggctgccaaggagactggcgcctcggattccaaggcttgagctaaatctgattctccttaatcatactgaaatatctatatccctaatactctactgtatcaatgatctacaaactacaactattccatacctatcaagagcagacataggcaaggatacaccaccctctaaacatcgtaaaaactgtcaactatttggacaagaaagagaaactagcatagactggacttagaacaccctgcttccaatctttgctctagggtccggtctgacaagcactgttcctccctcctcactcttaaccccgagggtgagacactcggaataaactctacccaatctaagtctctctacgttgatcacacaacatactttggtaccgatcaagccttcgatgtccgggttttgttcaacgatttgggtggatgagtttcgcactccaatttcggggccaaagtcaatagtgaggaaataagctgggcgaagagcctttggcgttggtttagcagcagtgatgatacccactctgattacggagaccaacaagaaataaaataaaaaggcgtaaaccaacggatcaaggaatggtgacggttgttcaagtcggagggaggaaagactcacctgatatcttggttgggtggcgcagtattgagaggaaggaaagcctccttgaggggatgaagctctttagccgggggaggaacgactgtcatgacctcaggctgaggatctgatgttgcagcggcagacattacgggctgactggatggtcggttgatactgttatagctctggagagttcgctgtagaagactaagtaaccgggggtcggatataaactcgacaaaagctgtactcaggtcacaaaccaagtgaccagaccacgtgagtagcgccacatatcacaaccgctcacaaaccacgaccaggttttccgttcctggttactgttcctggtatccatctgctcacctcgtttccttcacctttctccttccccataccgactcccactctttctgagcactcttgctagtgtcctttcggtcgaagatattgatacaggactggacacaactaccagttcgactttgttctgttctgtttgagaggtctcatgagttctccgacgccaccggtcgagaaggaccctggctcttcaccgttcccttcaacagaggattcggcctttcctgagtcttatactagccatacctacacctcgtcgccgaccgacctcaagcttgatcttggattcaatccgctttccaattttgaagagtttctggatacagattatcaacatagtctccagagtcggccgataagaccacttcccacatccgcacgaaagaccacgtcgactgtctcctcgggcgcccgagtaacatatgaccaactctcgacaggagatggatttatgagtgggaaaaagaggatgacactcgactcttcgccagaagttcctagcggtgctatttctgccaaatccgcatctgcttctatcaccgagctagatgaaaattcgtccttatttgaagcaggccagaccaaggcagaggggaatggacggcttttgtccatgtttgaagaagatgaagaggaaaagaaacgaggcggtccaagatttctagaaggcaccggtgctcagtgctacagctttcaggtcggaggaggttatgatgatcatgattgcgatgacaggttcgtacattgacccttaccaatcctccgtaaagaaatatcacttgttgtagtcaagttcctgacggatagcatggtttttgtcgacggctctagcttcaccatgccgacgagccttcccaaaaagtaagttctcatgattgcaaagactgctgttctgttactgttctgattttggttgccttcatctcatcagacggaagatccctgtcaactcggctatactagcatcagatcaaccccttcatgacaatcctcaaaaccgtacctctacatcaaccccgtccgacaccatctctccagaagatgatgtagagtcttaccttccatcaccatctactgctccaaacattcatggagcgtactactttgactttccttcgtttccttacctgcctcgaggttacactcgtcaaattccgcagcttccccccaagattcggacgaatcttcaaatcgtcagactaagtccggcttgtagggcgaacatgtgggccaagacggtctggagccaacgtagaaagatcctcgccttggctctaggtgtcgaagggattgatgccgatggtatgccaattccttccgaggagcctatgacattgacgaaggcagaagagagggcagttgagtactccggggtcgtttggggtaaagtttttgacgccccctcgctcgtcaaaggtgggaaggacggactgaagaagggcgaagacgggaagagaaagaagcaagaaaaattggaacaggcttcttcaggaatgaatggtatcaaggagatcttgaccaaggatgggctgagtatcacatcaatcgtgagagaggaggtcgtctggttgggcaagaaatcgaaaccaatcttggagcttgccaattcaaagttcacttaccagtgtgagagtgccggtaagtcctagtttcaggagaccaatcaactgctcatcatacttacatgttactaaatgtcttccttttatctctttttcgacagctacgaccttcttatacaacatcaatcaaaaccttgtctcccttcgcaaacggctcacaactctcattactcgatctaagttattcacttctaaaggcaaaaagggcagcagggtcaaccgatcaaccaaacgaccagggtcgactaccacctctcgatcgttgaagccagcgctttcgagtgcatccactttgtccaaagagcaaaagcttttgtctgcaaacgacccgaacttattagctgagttcaggatcaatgttgccacgcacacagtgaccgagacattcaattcaaatgacagatcagctctcgctcggaaaggagggccgactcgagccaatctgatgaacaagactatttcgggtgctcctacggcggttgtcaaggcaacttctccagaaatcctggcgagtaagtcgagagaggcattcactctgggcggaggattccaggcttcagacaactccccctcggcaattggagctgggtcacctcctgcttctacaaagaagaagcccggaaaaaagaagagaagtgcattagcaaatgcaggaaatccacatcacatgaagaattgttagttttcaatccattcgttttgttctcttcgacattccctttagacgcttacggtttcaacatctatctatacagacgtaccgactcgattggtatctgatcagactgtcaaccatgtttcgggcaatgcgcctttcatgtcaagtttgctgttccctacgtcttcaagatttttagctgccaaaccaaatagatatcgttcgtcagcttacatgacggacgaggcagcgtcagaggagtatatctgcatattctgtgattattcgctcttcgtacgtcttctttcttgcttctacaagccataatggccgtcattttctattgaaaacggactgctggtccgaaaattggatcactaacagtcatctatttgttcgataccatcacagtatggttcaacagaggccagcaaaaaagccgttgccaagaggaagaagacgcttgctcggcggaggcgcgcaaaagagcgagcgagtggtgtggctaacggactggcgaagaaaagtgtagaaagagtacatgatgatgacgaagatgattgggattgtgatgaagaattggtaggtcctagtgctctgccgtcttatttttgttgcatatcatgattcgattgatctcgagtccttcgttgttaatcgtttatttgattctcttgtatcgtcatcagcttcccaatggccaatgtcggttagtagctattcttgttaatgttttggcctttcgattagaatctcgactgatgtttgtctatgttgattatgtttccagacgatgtgctgagcgccgaacaagagagctacggatacagaatcgagcgaagaaaaagaaagacagagacagaccactaagggatttggatcggtaccaccatactcatcattcagcacattgcagtgctgatgacggttcctatgcttaatacactatcctttcctgtttctgtttcttcttttctttctcttttctttctcttttctttctcctccttcttctctttttttcttcttcttcctctttgcgattgttcgtgtcttgtgctatatctttctgtctttatgagttcttcgtcttttcctctttcctcgcattgttttcttttcctcctatttctatcctctggcatctcttcatcatcgtcgtttgtccaaacatctaaggaagcttccctcaatgttccttgtttcttgcatattcacttttccctttgcatatcgctgttcatcccatcttcaatctctcctcgtctttcttttccctcactgcctttcgactttctcttattcaacctttatctgtggtaaactttgcagaacaggtgtagatctccatactcatgactcacattgttataaccattcaagtccaattgtcttttaggacgtgtcacctcttatctactttgttcaaactacttgatcgtctcttgaagatcttagagtacacatcgatccatgatatatctactcttccaatcttggtcctaattcacccacggctgatgcacttttcaaacttgctctggctgctatctgacctgtctcaatcatgctttcccaccggacgtcatccattggctcccagatcggccgagtgataagctgagctacaagcgcgccgaccatagagtcacccgcaccagtcgtacttatcaccgaacccgcactaagtgattgcggtgcgtggtacatcagacggatcgttcgactacgttcattcgcttgatagacaagttggtgagggattgacgcgactgggttagagaagttgttagaaggatgaactctgcaggagagaacgccgagggggccaagtttaagtatttgattagggaagaagggagacgtatcgacgagtaggccgataactttgggaatgaatgaagaaatacaaaatctcattgaatgtttacaagtgctgtaccgaagaagaaaaagaggatggccgatctgaaaggtgataatgcactcactttctttggctttctgcgcccagtcaatcttcaacccaacaagccaagcgtccacggccgatgtccactcttttccaatttgatattcacttgaacgtcttgaccaaaactccccatgaatcaaacgccttttggtcgcctcagcatgccatttctccagttcaagcaagtttggggagaagaacgagacctcgacctcggatccgatcgaccgggctcgctcgaacgtatcgagcactcggagggattttgcactcgatgtaggctcgaagaatgttctgatagatcgctcgaaacagtgatgcgctagactggcgatggcatcggaatggaggttgccgtcaaacgcaaccagactcggttggtgttcctcgactccacgaatgatctgatggcaagacaggccaatatgatggggagtcaggatccttgacctgatgtaattttagggggactgaattaaagatatatgatcaactcaacctgttcgccggtccaatgctccacaagcttcatatctgctactcccccttctaatcctccctctgaatccaacaataacccacaaaccggcgtaactcctactgtatcgtctttcaggctgatcaaaccttcctgtctcatccctagcacttcaagctcggctcgaagtacccgaccagctgcatcgctccctgtaggcgcgagaaggagaatatcctcagcacgaggactcaattttgaagcggctaatgcgatgttgagggcgacgcctcctggggagagtcgaatcgaaccgggaagggtcgtttgcgaatgaagatagtcgtgtggagattgaagggtgatgtctagcgcagcagaaccaatcaccagtgcttttgtcctgatgttctcattggctgatgtacattccacgtcggatttctgactggagataacgggtgggattgtgactgaagaatatgttttctgttcaagagcgcaaagaccaaaaccaggtggtcaaccttacgaatctgtatctttccgtcctgaattgaatcaggtagggaggagcaaaacatccattgcatataagagagaaaacaagttcatacggtcgttcctttagacattcgtttcaattgagcaagcttgactgcaatctccgctccctttcgagcattgttctcaatcaatgcgatgtctgtatcagagatgagttagatcagtcgatgcaaattctatcatccctgcttattgatctgaccaagacagaagattggaatcattgacttactactcttgacggcgctgccttgggtcagctgagagactcggctcagcagccaagggctacaggcgaggtaacaagatgagcagtttttcagtcaagaagacagacagatgcaaagtagctcaacgacactcacgtagcttcctttcctcgaacaccggattgggctagatcggctacagctgtttcaacggccttctgaattttttggcccgaggcttcccattcctggggaatcggcacagtgatcaaggttgccaaaggactgggaagggaaagaccagcatctacaagagcaacatcatgagaaacattgatgtcaaagattattggtggtgggtcttggatagatttatctcgaataaaagagcaaacgaacagatgatggatgctgcctcagacgcagtggtcactgaccaggggctctgtttagatacaagtcgagtagatggatgaaccgtcaaacaagatgacaaatggatcagaaagatggatttcgcaaataaaagatagcttcagaaaaggagcttaccttaaacccagagtctggtgtgtagaacgcagggaacgcattagtcggtcctaagtttgcaactgtaactccttgggtttcctatgagatattatacacgaaaaagacttagtcatatttcatagtcactctcgttagatgagtgcagagttcacgaacaagatattctatcgttcgtccgatgtctaggatagatttacaaccagcgcagacgactccaagaggggtcctaccgagctcggttaggtcggctgaaacatccatggtgtgctcgcctcctcggtgaacgccgcctgttgcgaagacgctttaagtgtcagtgtctgccggaaaatgcaaggttctcgagtaaaaccaagagagctaaccaatacccccggtgacactgatagatgaaccaatatgaagatttcagtgatatttctattcacgaaattgattgcaagtgactcttaaagagatggactacgaacaacatatcgatcccagcttgatgggccagccacatagtaccggctacagttgttcccccatctctgcgcagtgccatagtaggcgcgagatctcttctggagaccttgaccgctgaatttgctgggtctgcgagcctctcaagctgttccctggtgagtccaacggtggggactccatcaagcaaggcaatggtcgcagggacagcgccttggtctctgatgatcttggacaggccaagagtgacgtccaagttggtaggatagaccataccatgggtaactgatgaaattcggagaaagaagaacgtaaagtttaacgccaaaaaaagatagagtcgacaacggcccggtgagccggcttgggagattatgaagatagggtgagaagactcacctatggcagtctccagagcaacgatgggtttatgactttgaagagcctcctcaacctctggatggtacctaattttatcctgccaaggaagttgtagaagaaagaatatgccatcggaggagtcggacaatagagcaaaggagagaaggcatcaggctcgcccaacaatcaagaaagaagatggtccatatgagaaggcaacttacccatctattgagagtagagcaaacagagaacgctctagaagagggtaatctgatagaagatttcgataccagccgagggagcattctcaaaacgagatgtagatggctgatggctgaaggttgacggttgatggccggatgttgatggcaagagaaggtttaaatatgaaattccagtcttgggatttacacccacactaagattccccacgtggctcaaagcggataatcatcagcgtcgaccaccaccacaccatgttctctttatttggatcgaagacaactcctccgcctgtaccagacacaccagcagagcaggaacaggcccatgcagctccagtgacaccttcagagacgcctctgcctatagttgactctggagcaccaccgacaccgctcaaggagtcgccggaggaacgattgaagagaacgtacaaacaggaaatcgagcttcagaatgcactctacccaaagcctgaggatgtgccttcatgtatggatttgttgtacgtctttctcttcaggattatttccacagagatcaccatcgaagcaggtgctgacgttcaagattaaatagcgacgctcgtatgaaatgcatgatcggttcgttcactcttcatccctttccttcttcctcttcgttcatcaggcctatatacgtcttctctaatcaccctgtgcacgatcgttcctgaatcacaggcggtacaaaccaaggtcgacatatctatcagtatggcgctctcgacggttgtcgagatcaggaaaatgatttttggttctgctggagtaatctccgagcttcatctgatgcagagcaaaagcgagagctttgggttaaccggagagccgagtggtggacgagcagaaggctaggagcgagttccgaggatgtatgggatgctcgaccgtatgtcttttcttccgacttgcaatgtagtgttttgcctatgatgaaaaggaccgattctgacttgccgctggttgagttcaaaagagagcgattgacagactttcctccaatgctgaaagaaggtgacgaacaggtgatcgtagacatggctaacccgagtacagaatatagtacgtatctgctagtagcatacgttcattgactcaaacagttcctcggctgatggtttgtactctatctcgcggtcagattaatgcgagatatgatgtttccatttttaaaagcatagaagtttgagcacaacagaatatctatctctccgtgctttacatgaccatatgacacaacaaccgaccttaaccccccaaacggtcctcataccttcctacttgccaacgcattcaactgccttctctccaggctggatcgtacgctttgcggacaaactcatccagccccagcgtctcatcctgcaacggtaccggtatgattccggctgccctacccaggaagaccaaggttggctggaacagaactgatacattgttgacatcgggcgggacaagcagccgatgaactgcagtcgagccgctcagaacatcgtcgtatgctccggctcctctgagagttccggaagggccagcagaagtggacgcgttgacgttaacgacagcggaaggatcgtttaggtttacaagcccgggcacagaggattgcagggctcgttggagctcatcttcgtgaggctttagtagtcgtttggtcactttagaatccgaatcaataaaccggtacacagactgctccaatcataaagcaagagaatgaagtgtcgccgacgaacaagaagaacggttagaggaacaagaaaactaagatctaaaacacatacggatccaaaaactcaccttagacttattccgctgggtcttgcctccgccattgcgcagaacatcgttcaccgaagcgattgggtgcctgatagaagacgagccagcgcctttgtttgagagatactcgcggatcatgattttgatctacgtgacgtcaaaaaaaaacagcccatcagcaatttattaaatatacggaaacctattgccggcaaaagagatcacgcttgacttacctcggcctgtacaggcttccaaagttcaagaatatcgcctgccagagcaccttttggaagcgggccagcatcatccttgaaatctttccgctgatcggttttcaatattcacatagatatcgctattagaatcgcaaaattcctacaaagcacagatatgttcagagatagagagtagaaaagggaagattactcaccacttcgatggcggaggtgacctcccacacgactcgtaagccctggaggacggcgtcgaatttcgagaatactgaccaaaacagatctctcaacgtctctccattctcatccgtctctcgtttctttgccgcccctttcccttgtgcgccttcaccatcgatagctcctcttagtccgtctggatcggtaggatcgaccataagacttggctccgacgaaggcggtgggggaagcaacgagttcatcgggatcaaccctgtgagagtctgtctttttcgatcaagacttcgttcttcaacctcttgaatcgttccttctacgagtgcgaacaactcggaggcctctctctgagcaagcacatccatcgcccaccggagttttcccagagcggccaacgcttcgaggagatgttcgatatacatgaacgaatcgacctctgggttaaccatcttgtctgtcaggtttaaaccagccccgagtaagcccccgttgagaactgttgtgggtccaggcgatctcattagaggggtggcaagcatggtcgagagtgtttgagaggtgaaatcatcaggtaggttcagtgaagggtcatgcgcaagtctaaaaggtagatcttgaagaaaccgggttagatattttggagcagggttgtgagacgtaggtgatggcccggcaaatgttgaaggggacgggttgggtttcgagttggtggcaaagcgcgatggagaaggatcaaggatatccaagtcgggaactacaagaccagaagagaacatcaaacaacatgatcagtctatggtatgccttcggtgcgaacgagtctaagaaggaaatcaatggaacacgaacgctctgtttggcctttcgtatacgagctccatctggaatcgcaatagtaggacttcaaatacagatggttatgtagctcttcaaccaggatctcttgaagtgcctattggatcgagaagaaaggagaaaccttgagaaacacgatggtaacctttgtgacggcgtgaggaacggaaggaaacgaactgtctcttgagatacaagataacttctcaggtcggagagcgcaccaatctcaagcatctctggcttgttgatctgctttagggatcggactaaaacaagtgcagcaagaagcagccttttttcgatcaagagcgtctcaaactggtctggtattgatttgaggtgatctctgttgagagagacgtccagagaatgaacgggtctgtcagtctttcttcgtccagggcactctaagtttttgaaaggttcaggagagatgggaaaggaaaaggaaagagaggagtttataactcacatcacgtccagtaacgacaaggtgtctcggacgaccctacctctactccaaagcgcgccgatctctgcgttccgttcaccccgaagagactctttactctccagcaaactgttttttgcgtctctgacttccttttgggcttgtgtgagtttgtggagaaatgtgttgtgcgtggaaagtgcagaggcgaaggatgaagagtgggagtggacagtgctctggagggaatcaagaagcgcgtcggctagattttggaatgaaccaagtcgttcggatgaggtgtcggaaagtaagttgagtgagagtgggataggattgaactagagaacatggccttcaaggtcaatcaagagctcaaagagaacgagaatggatggctgtgagaacagcgatgcttacatctggttcggtcaccatggaccattcttgtttgatctctcttagaatttctgattgccatcgacaaagccatttgggatgcatcagatggctcggtttctcatcatacgatgaggtatactgaaagagagaagagaagaggaaacgcacggtcaattccggagaactctcctcctagatcttcttcggcatgagctacccttctctcttgtgtcctatcttcggttcgtagatccttcaaccgtctatcttttcccgagtttgcgaacgcctttccgatcaatgctgttttgaaatacgcctgatcgtgttcaatcgcgctacctgatacctgctgagctctcgcacgctctcgacgttcttcctcccaagtggaatgattcgagtcggccagagacgtgggaagaggaacagaatctcgagatgatgaggtcactggcagagagacctgtgaggattgttgggcaagtgatgaggagaaagaggaactagatgcggacgcagcaccagttgcagcagagacggtagatgtagaagtaaagatggatgaaggcggagggttcacaggtctcctagcggcagaccgtgtcggtcgctgaggagtagcagatccgttcggagctggaagaacaaaagacgtagatcccactgctgactgtggaatagtagaggatgaagacgttggataccgagattcgttcggttggttcaaaaagttggtcgttgacccggatgacatggccggcggctggacagtagatgaatttgtcggacgcagtcgatctcgagacatgatctagtgggccaggtctagttgtctgaccaaggtttgagaggatctattcagacttgaccggtttcctctagagagatcaaagagacgatcggcgggaagaggtgggggaaggtgaaggaaacggtataggatggttggatagaacgagatggtgatcgttcgttctgattgtcgatgttgtgatcgtctttgtgtacgaggactttctctattgtttcattctcgtctcgctttctgatctgtatgcccttcatgtaccggtctctaaactatcataacatgttgtgatgatgatgatgatgatgacgatgacgatgagaaagaaaacatgtgtctatttggatttagtcatttttattactgaacggaagattgtccgattttagaacttgtatggcttgtttccgacctcgaacccataccgtcctctctcaagctcaacctccctgatgtgcctcaacccacgacccttatcctgcgatcgagcggaacctcccaaaccatctcccaaaccaggcgcccgagcctgatgaagcaatgacggaaagattatgaaccacaaagaaaaaaacgaaagcgtcagctaccaggtccttttttcccgtatttggtgaatcactatgagaagaaaaacatcaaagaagaaacgcacccctccctgaagaagtaaagcagcggccttgatggtctgcatctgattcgtacttccgtagagcttagcggatacatctttgataccacaggcggtgaatatcctgtgcagcacgggggaacatcgaagtccaaagcctgatggaaagaaacggacgaaaagttggaggaagaatgacgatgagttattcaagctaagaaggacgatcttgatcggaaaagatgaggagagaggagagagagagaaaacgaaccaggcggacgagccctcatctggattctcacacctccgagcttgatggacatgtcctggccgtcaccccagacggtcctgttttggtatctgcatacagtgtccaagttttttaaagctggaaggtcgatcgaagaatgatggtcagtgaatacgagagacaagaacctttctccattttatccttcctttctatggctgcaagatgatgaacgagacataccggctgcataggactgttcaacggctttcgcactgatggggctctttccctgaccaactccaagaagaccggtatcagggcagccgacgacagtcatgacaaagtgcttggctactcgaccacctttggtcatgttgacgactcgcttctgggacattgtgaacctgcataggttatcgattcgcttgaaatccaatccgaccatcttggaaaggacttccttctggacgagcttgtcatcggctgccgagccctgtttggggaatcgttgagggatgatcggtgggtcgttggcgatgacctgaccttgttgaagggacggatcttgggctgtataaagatttggggaaaaaagacagcagaacgaagcaggttgagttgacatggcagagagaagagaggggagccagaactcgcacaacatcgttcgtgatcttcctaaagatctctatcaaggtgaacaaactcacggatatcaaggaagttgtcccacttcgccaacggatgcacgtagttcgaaggaaggtcggccgggtgctgatccgagagcggtctcagcggctcgtacggcagaacaggaaacggctgggctgatttggctcgaacagaatgctttatgatcgaactagccgaccgggacttgatagctgccgatctgagagcctggaaaggaagaaacgacgacggtcgcatggtctatgtcggtgagtgtgagtggtggatggaagggaaaagaaaaaagagtctatacggcgatcagcaaaaagactacaaacggtcactatgaaattgtccgaattctgtagtagctttcacaatcaacatcttatggcctcgcccacgaaagcgcatcgtccggatcgaatagatacacatcctcagtacacccaggtgaagccttcaaacaggcttcgtctcttggcatcctcgcttgttctctcgcctgaattaaggagcagaaatcaggcaaacaaagagggatagcgtgtgatcgaggatggctctgtatcaggatgtccggttttgtagtctttttggctcaaagtcctaatgcggatcgtaataccaaatcctagtgtttcctcgacgagcgttctaccttgcttcctccatccacatggaccatacacacatcatgagtgacgaccaggatctcatcaacacactcaatcagctgcttcctaatggcaagtccaggtctgcttctgatgtcttggtggactttgttccggtgtctgcttccttccgggtctctcctttatagtcaaaagctcggttcatcgttcagaaaagctaaccatctcgttcttttactttggtttcccgctcgatccgttcactcgtcttccttctctctctccctctctcttttgctggaggactctcttttgccttttgctgttgattcagaacaagcactccaaaaggctcacctcatccaagcttcactcagaacccagctccgacagaccagagatgagatcgctcatctgttgaccgagctcaaaaaggaccagagcaaggagcgcattcagatcgtccaatctctcatcgccgtgagcctcgttcttttccatctcttcttacagttcttctgtctcgatagaccaactcggttgtctaaacatgtatctcacgtttctgttctcatctttggcttctcttccgttcctctaccgcaggaactgttgcttcagacgagtcggatcaaagagaaggcgctcgagtcagagaccatcgttcgagatatcacacgcgacatccagagtctcgatcgtggcaagaagaacctcgtccagaccgtcaccgttctcaggcagctcggacatctcgtcaaagcgctcgaccggttggacgcgttgatcccgaccaaacgctacaaggacatcgccgacgcgctttctgttcgctcgctttcttatttctctcgtttctgcttccacttacgcacttccatgcttattgcttggcatatcttcatacacgcatacaaacgcacaatcctcttttcatcgcagacggtcaaagaatacgcaagctcgttcagaccatatgcgaccgttgatgaagtggctaaactccagaaggctgcagcagagaagcaggccatctgcagaacgatggtctctgaagagttcgagaacttgtaagtcacctcaccttttctctctctctctctctctctctctctctctctctct

SEQ ID NO: 986 - DNA, 28487 bp, Xanthophyllomyces dendrorhous
tctctctctctctctctctcttttttttcctctctctctttctccctctctgatgctcgacctgacctcctgatataatcttgcctccatcatgttccttccacagcttcgtaccacctccctcgtcaacaactgatcccagctcggtcccaccgagcgcaaccattgctgtagtcgcctcggcgtgccatgtggtggacgttctggggagtgatgtcagaagcatgctgctagacagatactgtactcttgagctaagagaatacagacgcatattcagatccaccgatgaggtctgtatatctctcttctttacaagtactgcacatcgtctgaccatcgaaaaacacggcaatcaacaaacaggcaggtcaactcgacaacatcaatcgccgatacgcctatctccggcgcattctcaaatctcacgaagaagaacgcgagcctgcgttccccaaagaatggaaagtcggagcttacttggtcgctcgatttgcagaagttaccaggtgactttctttttctcgtctcccacacatatcgtaccttgacaattcgaggcttccgatcacttcagctgatgtgtctatccgccacatcgttctccttccgaaaatcagccaggatctccgaaacgtactatccaaaaagacgcctggttctgtcacccttctcctcgaggcccttcagtttaccctagatttcgaggcacaaatgagttcgaaattcaacatgacagtaagcatattcggacttttactctccttggacacacaacctgtcttgctaaatatcaaaccatattcacccaacccttagtttcaacagattgtctcagacgtcctccccagctcaacataccaagtcacgagcgagccaatatccaaagttttcgatccatacctatcactcttcatcgaagcacaagacaagtaggtgttctgatcacctccattcatccatcctctaatccatcacacgcctctcatttttgtatttgatccttccgcgacccaaatagagctatttcagaccttcttcagccctctcgaggacctagatctcgagcttcccttgagctcgctaatccgagggcatcaacatcttccagagatggtcaaggtgataaagaagcagacgaagagcacaagcctaaagtgcttggatcatccaccgagctcttctacttttatggaaaaacactcgagcaatttgctcgtttcaggtatgttcctctaatctctctatgcttttcttcacttaaacacgtgtgcttgtctaaaatgtcgttggaatcgcttggggccatgatatctatagttgtggtgcacccatgagagatcttgtcaacgtcttcaagaaatatctcaaaatctacgctggttcgtatgttttctcatcactgcagagtacatgaattgtgacatactaacatggatatcaactttcgtttaccccaatcaatcagaggacgtccttcttgccagtttgaaaaggtatcttgtcccttcctctgattctcgatgaaaatgtgaagccttacgacacccccttttttttccctaaagagagcccatgtcacgtcgatcagctgatcgaaagtctatggaagggcgattcaatgcgtatgaattcaagaatatctgtcttgtactcaacactgcagaatactgccataccacagcggcgcaggtaatgttctttacttttcttttgctttttgcatacatcatcagtcggtatagaaaagtttaattcattccctttctttattcattcccccttttctgttattgggaattgcattagttggaagagatgagtcgagacaagatcgaggttggtcttagggatgaagtttcgtttcaagaagagaaagacctattcatctcgtgagtcatttttacattcagaactcaccttcaatctctgaccatcatcacccatccaccgtgtctgcgctatagagtgattaccacttctcttctctcactcttacgagaggtcgagaccacgatcgacccaatcacctctcagattgccaggctgccttcttggaacacaatggagaacgtttctggaccgtcaaattatgttcaggatctatgtaacgcagtggatgatgttggagacgtcgttagagaaggactcgagggaaagaaataccttcgaaacttttgcgataaggctgttgggtaagcgcttttcttttctttttctttaaaagcagggtatggatctacttgaacaacgtcattgggtgtcatcgaacagggtcgtcatgattcgattggtagctgctgttgtgagaagtcggccaattaaaaagatcggtgccgaacaagtaggtcatttgtcatctgaagatcatacttaagatcgtgtcttacgttgaggtcctttgccatgtctgtttcaagcttctactcgatttctcattgataaagaaaagtctgatggacctacccaaatttctacgcgatgatgctcgtagtatctcgtatgttccaccttgacccttttcttggctatgaatttaatcacgttgacaaagacatacctctcctctgttatattttcaaattttgtaggtcttaccaaagacatgttcagaatatcacaagcccttttgaaacgcttctcaaggtgatcttggcccctgaatcgccgccggaaggattcgttcaaaacttcctccttctggtcggcagctcatctttcaacgacttccaaaaggtaagcgatccctctttgttcgacttcaacatgtatgtcttatggaccataaccgggcgtgcctctcgatcacatatagattctggatctcaaagggacatctaggaaagatcagagccacttgctcgatatctttgtctcggtagtatcggtcaaagatgatcttcaggattcatcgttcttgacaacgatggacatggatatctcggcgcctgtaccttcgatactttccaatgcttctgctgccggttagtcttgcttacctttcttctttcttctctcccttttctgtttcgctatgtgcctattcaaataccctggttatcgcctgatcacgtcttctttcatttctggatggatgtacttagatcgcgctctgttgttcccgacaggaaattcctctgcctttggtgattctcgaggatcatcaaatgggaacgatggtgggccgggtacgggtgttggtggtcgatcatttgcattttttaggagtctgactgccagacgggataactagattgtccttcaagagacggcgatgtgattcgtcttggaggactgaccgtatctcgtgtgttgtatcatagtctgtgcatataccatcctacttgccgatctacgagatcgtttcataacatgagcctagcagacacataaaatatatatatatacgatatatacgatatatacgatatatacgacaagagagagaagagtggaaagacaggatgacgaatgaatagaagaataaagaatgaaaggaaacgctacaatagataaacacaaggattcagacgtatttaaaaggatagagatagcagaacgtcacggtctcgataactaactaactaactaattaggacgaagatacagaaagccgataggtagaaaaggcaataccagaaagaatgcgatcgtttaatcaagctacgctggcgctggcactgatgcgcgattgggcggcacgagaaacgttctggaacagcgcttccttcccttgtatcgagatgtcgccgtatggttcagattgactgagcttgactttatcctttgtgccaagtacgaggagctcaaagaagaacgcagaggcaactcggcgagatacctgttatgtccatccaattggaaaggatgatagccagggttgagacgcgccgtgtcagtttcaacctcatgatatggaatatgagaagtctatcagacagagaataaagatttacgaacccgttcatttgcagcttggaagctaacgaccttgttttcatccaaccgattgttatcatccgaaactttcagttgttgtaataacagctcgactgctcttcctttctccctctccctcgcgctcgtactctctccttcctccgtctccgggacacctagacttcgagtcagactgccacccctggagcttcgagctcttctcgcacccctggccaagtcggcctcatccacatcggagaacgcaacggaacgagctctcgaccctgctctcgatcgatcatttcttaaaacttcttcctcctcgaaatctcgtccgagagatgatcctcgaagaggggcgagatcatcgaactgatccaacgggatctcttcgtcgtccgcaaatggaggccttccgtcgtcctgctgaccacctccaaagtcctggaacatgaactcgtcaggagcaacgtagggagctcgctcgccagcagcaaatatgctgctcgctcgaccacctcgagagaccgaaggagctcgggatgaatcccttcttcgaccgagttcgacctcatcatcatcctcaccttcggtagttcgcgcccgtttggcgccttcgtctcttccttctactccagatccttctcgcctcctcgtcaagccgcccacagagaacatgaataaaccttcaagttgtccgccgaggcctttgggcccagcgtaaaagaatggctctccgccttggacttgtcgaacaggaaggaagtagccagccgggtcttttcgaatagattgtaatgcgagaacagcgctcgaagccgggatgaacttttggggtcggaggatggtggaaaggtctctgagggaagctcgagcagattgagaagcggtcgtctgtgaaccaattgggagactctctgattcgagctcggttgtggcatcgacgatgattcgaacagttttcctgcgccttacatcgtcggccgctgtgtcctgtctgttggcagcagcagcgatttgagcggctgttcgaggggtcaagttacctgctatcgatgaggtatgaagcgagctctcgagagtaggagtggacaagcgggaggctgtatcaagatgtagaacaaaatattgagcagttagaatgtctcctgcttcccgatttgatgtttaatgagcaggtaaggcaaaaacactcacaagctctgccctctcgtcccaaaccaagttcgttgagctcgtccagtcctaccccgagaccctctccataatcataatccaacccctcgcccatcagctgatcgtctccgccccgtccgagcccgaacggatcttccagctcttctctgggtgaaccaatatccaatccaaggtccatcggttctgcctcgaaatccaatgggtccaacccactaccaaacggatcacgaatgatatcgccctctccaccaaggatagaaatatctcctctttggccaccggtgactgaaccaccgaaccgtgatcccaatgactctcgagcagaacggagaggcgcggcgtctcggccgtattcaacggcagaaagcgtctcatcggcatcatcgccaacatccaactctaggtcgatatcgaaatcatgtgagttgaacccatcggagggtccgacatcgaatgagtagtgcgatcgacgcgggccggagaaggaggaaacggacaatgcgccgggttcagagaggttatttagaggcgcaaagaggtctgggaggggaacgttcctatcaggttacgttcgaggttcacagatcagacttgttgagatggatgagagagaaagcgggtagatttgagatgatggaagagacgtaccaatcaaggtcgaacccaaactctgctccgccatctaccgtgatgtcgatgttagaagctgcgagttggtcttctggcaagtccactaaggacggtcgaatttgctacacgacacgaaacttggcgttagtggttgtttctgcactggtctgagaacagaaaacgcgtccaaacaggaaggaggcgcgtaccattttcagggtgaccaaagcctcggtgcagtcatccaacagatacttggcttttcgagagtaaattctgcatactccgaggagtagctggccggacaatcgaagagccataggctccacctgatctcgaaggatatcgtctagaaagcatacatcacgaggcaagacgcgtagccaagaagcagaacggatagtaagtctcgttgagccatatcttgacgagattcttcatgttgtcccactcattcactcgtgcaccgtctccaaaccctggcaaagagcagacatgatgatatttagggaaatcaaataacatgcaggtacttactgacactctgctcaacatctacactcccgacttgcagcttcgttagcttggactccatatgggcggccagccaaaccttagccagggcccccttcttgttgaggatgaaatccgagtagatcatgttctctcggtcggctcgatacgttcacagagatttgttgtggtgtgatgtggtgtggtgtggtgtagtgtgtagagcgatagtgataagaatatgttctagctgataaaaagagacctctaagcaaagaaggcaagggaaggtcaagaatgagggaagggggaggaaaaagggctggactactaggaaggcgatcagtccgtcaaccaaatccggaacgcgacgcgtcgtgtctcttttctgttcgcgtgtcttgacgcgtcgcgtgtacgcgtccagagcctgtctcggatgacgcgtcatcggttggatacgttctcttataatttaaacaatgatcctcggactgggactcaacactgctttcacactcaacgcttctccatcttcgttcttttctgtacctacagatcttgggctggaagcctacggtatacatgagataatttggacatcttggggtgctaccgttggcttcggttcgcaagctttttatttcatcaaatcgtttcaggaatttttcgtactcactttggtttcctccatcacgacacagaccgatcgagtcaaacgtacaagatatggggctactctcctgttgtgcactaccatggtctcaccaaacctcagcggatcgttcttccttcgggcgttcatccaaagactttcataggaacagataatcttgagggcatcctgggcgaagacggttacatctacctgccattagaaaaagaggacaaagaaggatttctttggcaaaaacgaactcaagatagtggaggatggttggatattgggatgctaggtagtggtatattgatcggtcttcatagttagtgtcatcacgtcaaagatccgccgtgaggaggtgctccatacgatctgactcctggcccaacttcaggctatgatactagtacccctatatattcctcatctctgtcgaccctgtgtagctctgccccctcggcttcgacttcttgtcaacctgcccatgtcccaacgttcaaccacgtacacccctcgctatctcatgctctactgacgccttgtctgccgactatccatcctccctacgcccaaggttcgaacctatacgcccaactttctctatcggggttgacctattcgcatacacccgttcgacttgaacagttcgacggtctcggtctaatcaaactctcctcggcaggagtctactcgagtggactcacagaggccggatcgatctatgtctggggaggacgttacggctgtttagatgacgcacttgatgtcccgcttatccaaagtttgcttcatacccagcttgccgagtcgacatcgatagggaagtcaaatggggcctcaaagcaagaactaggtgcagcaacaccggcagaggaggaggaggaagagattgtagatcatctgataacaccgtttgggggagtccttcttgcactcagaaatgggttcgtcttgggatacaactttgacaaggcggacctcatgccagcctccggacaggaagtctttcgtgatacgagaggtgaatacggtcgatcggtttggagtatcgtttgggaccctaaggatggtctagaggtaaaaaatatccgagtcggcagtggtggaagtgctatcttctttgcaacgagatagctacgagatcttgttctacttcgtcacacaaattaattatcaattagatgtctgaacagagtcaactaagcatgatgaactatcatgaagaaaaagacgaagtgagcaaaagcattggaaattcaaacagtatcaagtcagagtcaaaaaggattaaagcggaagaagagaagaagacgtcaaaatgaacatgaaaccattgcagataagaaaagaaagaaagaaaaagggaaaataagaagaagtaggatgattataagcacaggggatgaggggtacacgataaatcgaaacgaataagatgagaaagatgaaagaagaaactctcggaaaagacggaaactgtagagggttttgtgttttcaattctggagaggagaagaggaacaggacgctctgcttccgatccgcacgttctgatgaatacaagatacagttctgtgacatttgttttgagcacaacaagacggtacaaaaagagaaggagtctttgcatcagcccaagcttgaagaaaggcggatgttactcgataacgtccatacgagcgaagaacgatgtacgcacctgaaacccaaacaggggctactcaagcggtaagcgccgaggatcctcttgtgctctgagagctcgtgagatattcttctggaactcgagggcaggaagccacttgtgaaattgtatgaaaagtcatcagagaaggcttgcccatgatcggcttgtacgccttctctgctcctgttggtgaccggttaagtactgttgtgtctgacgtggatgcattaatagctggagaaagggtagaagaagcggcggctggaggtgaggaagacggttggggcagcaacgaattggataaaggggatggaacccaagacttgaacttctctcggtgcttagcgatatgaggattgtttccgtttagtatcacaacatggggaggaccgggcaaagagccagtcgatgcatcggtgcttgtcgtcactgacggagcaccaggctcagtcgagaaggtggaagtagtggggggacacggcgcctgttgtgaatgatctaacggtgagctgtcgtttgagacagaaggagctatcggttcgatggaaggcgaaatcggccgaaaagtagcctgggaaaagccagcggtggacattgacttgcgcatctttttgttcgacgtggcaggagaaaacgtcggtgccaaacttgaaggtttgactatgggcaaggaagccgataccagcgctttggaaggtcgtggacggggctgagaagtggcaaataaagtttgatccgtactctttctgcgtcgcttccggtccactgttgatgaactagattcatcgacagtcaaggctaccgagttggatcgacttccgctagcagaagcccttcggaaaggtcctgctgtcggctgttccctctcgggagagaaagagcctgattttcgcttgtgcgccttggaccttcttgtctctcgagcggtattggagaaagctccgagcggtcctgagtgggaggtttcctttccgatgacgagctggacggcagggccggaggggaaaagctttggttgggggagaggtgcatagggtatataggaaggcggaatatgcctattgttctccaggtcggcttttgctgttttcaatagacattgggaaaggatgaggtgtaagtttgacgtgcctccgagagaggatggcggagtagaagaggctgaggatgaagctgaagatgaggatgagggtgttgtacgagcctgattggttgtgatgagaggggtcgggtgttgggcggacaatggtcgaacagggagggtgacagggatggcgtgggtcacacaggccggaatatcaagactgacatgactggcagggttgaaaaccgagggatcgaacggagaacctttgggtggaaggacaacaggaaacctgaatcgattgggcaccaaagtattcggcattgatgtatatatcgaagagaagccaaacgatatgggtgtgcaagtgggtatgtgttgtttgtaggttggcttttttttctttcacaaacgagttgctttgttctcgacaacacgatccagacagaaagcgaacggagcgggagaaaaaggaatagagagaacgacgaccgatgggcttcaacagaggaacgttcgaccgatgaggtgggagagagaagagcgagcaatgtaaaagaaacaaagtggaaagtgaaagaaagaaggaagaaggaggaaagaaagagaaaaaaagggcggtccgggcgtgaggtcaaagcgtgcggcccatgtttgtccggtgggtgcctggcggcgacagagaaacgggcggggcccaggcggttgcttcggcccgtgcgggtgcctgtgtctctatgacaacgcccgatccgaattcttatcaattggccttttgcttgtctgattaaactttcaatgctgtgctcaacgagcattgtgatcacgccacggctcagcccgtatctgacgccacatccacgccacacccacccacacaatacatcgcatacaatggaatcaagtgctacattcaatgtggagttgtacagtactctagagtcgatttggaactcagtttccgggaatagggttaaccttgacctcttggtcctcctctgtgatggttggatgcgttccgtgtcagcgatgattcttcatacatgcgcaacaagagtacatgtgtcttaccgatagattcaatcagatcgtggctcttcaagtcgctggcaagattctcgggaagagacgcagaggcatacttcagaatagctgttgtgtatagagagaatagaatgtaattgagtcacgtaatcggagcagatatcaccccttttcggttttacatgtagaacgaacaggagtcatgcttcttcttgtgaacagtcgaacctagggagcatgtcatccaggttagtccggaacaaagccaaataccgagatgtcaaactacagcaaaggaaaacttaccctggccctcaatgtccttgtaaaaagcctcgatatcctcggtcttggcggaatccttgaaggtaacgatgtagttctgggctgtatgcgtcaagtccaggacgaaacaaagagtaggacatgagatcccagttcgtccacaccatacggatctatctgtacgaaccaggcatggcagcaaacgattgaaataagaataagttgaagagaaggaagacggggaagagagatcttttgattgacagaatggcgggcaaagtagcgagatggacgggactgttgaggtggaagtttgggagaactgctttctcattcttatcgcacggcacatggcgagcaactcgaacgaagcggacgtcatatataatttaaccctaaccttcacttacgtaatgcttaaacttccccaccttcttattcatttcaccacacgatctactcagccactgctctactttctaaacctcagccagatggatgtatcatctccgatctacattctacgtatacctccagaggttagcacaacattcctcatcgaaatggtatttattctgtgctaagctcactccgtgttcaccgctcttgcgatcttcaattacagctatgggactatattctttctttcatccctgagcctcacctacaaaggaccgcactctccctactctccgtgtttccgaacgtctcaatctctgaccgacatctctggaaaaacctggtggttgccaggtcagaacaactaccagcgctctatctgattattagagaactcgataaacgtcggcagttcagacccggtctgatcgatgatgattctgaaacagaggatgaggacacgtggataaatttcggtcctgctttgtcgacaagtttcgagatgcgaagctggtgagccttctatcttccgtgcttctgacttctattcttctcctccttgccttaaacttctcgaggaactttttctctttggagtaaagttgttcaattggaagctcaacccttcttctgtcatgctgctttcggtatgatctataggaaaggcaacgccgacgcgctagtcaacattcttcatctgcttccaaacctggaggctatacgattgcgcataggaacgaactttaatccggaagtgagtgtctctgttccaggctcaatcataattcgttgaacagaagttcattctttcaactgcccaccatcctcaaatccgtcgtccggagcagcatcttgaagatatatttttgacccctcggccgaaactgcagtccatcaaccttcggttccgaccttatgtcaacacggtctcgtatcatcaatttctttctggcatctattacgatactttcatcgatcttctcgcctcttggactgtcacacctgcaaatcaacctcttcggtcgctcagccttgttcaggatgttccacctcgacatctagtcgatccaagagctccacgaccggcagaaaacaacgcttccaaggaggacgcaaaggaaaaggagagagtacaaggaaaaggaggctatactggccatggtccgttcaactatttgagtgaggctttgcaaagctttcaaccaaagatatttgcccaaccgtgagtagatatgatcatctcgggcgctcggcctctgggcatatgtatcgtacattcactcctacactgcccttcactgatcttaattttcattttattttatacatctcatcctccttctatagaatcgtttttttcaacacaatgtgtatcaccagactatccctttcacttctcactaaaatgactactcatttgcgacttcggattccccaaaaggatattatctcacccatcaccacctcggccttaagttttccatcgctacaatttcttgatgtgtccacctccaacatccggctgcataccaatatacccaccttacttaggacgtatccaaatcttcaacatctcatcatggatcatacaaatctgtttggttttttgggaaacgacaaggaaagaggaaaagaatgttgccatgagctcggcaggctgttggtgatgagcggaatgaaccgagggaaagaggtcgagcgttcgatcggaaactgggaaaaggaggaatcgtttagagcaactagaaggcgagaccaagatgtaactgaaacgtcaaacacaaacggcccacagaccacaccagaaagatctgtctccaatgatatcgatcgcatggccgatcgactagaagctctcaccactatggactacaatctcaacgcatcgtctcgggaacgaagacgaggggtccgaccgatgggaatctcttcattctctatccgttcatccaattcgagctcttcgacgaacaatcttgcccgaacggctctctcgaacgccacaacatcttctcatcacgacaattcgctttctactccaacttcgatcaactacgttcttccctcaatccctgtcctccggtcagtttctctcggaggcgaagccatactgacatcatctcagagaaaagaatggacaagcgagttcaagcgaggttggaaggaaggtctagaaaaaatcgtggagtgggctcttggcggagtaggtgagaggtacgaacgtagtcggaggaaagccgagaaggacagagtggaatgggagaagtggctgaccacccaggccaccggtgggaggcaaacagacagtccactagaagatcgttctacaggggctcctgtaacgaacgggaagggtaaagggaaagcgcacacaatatcttcatccaagatatctggttctgcagtaccaaagccgcctcctcaagtcaatctgtatcgattcccaacccctgccgaacgagcgtcccttcctccgttcgacccttcggccaatccgacatctcaactggttctcatatcgggtgattcaactgaagactggcgatccacctatgccgatcttctttcgagggatgtaagctgcgtattttgtacagtcccggaggatccgaccggtggtcctcttcgacgcggaggggagaatctcgtcaggctttctcatgggggcaccgagtctgctggtagtgggagcgtttcgggaagtactctacctagtggagtgggaacccccagaagttgggtaggaggatatcagttcgaagaagaagatcaagtggaagacaatgttgtagatagacatcctaacggctgtggccatgcgataggaaaagacgtctgggaagattggggcgactgagatgatctgttttcatttagcctcatctcacaagtacctatggttgagcgcgtgatgaccttattatacagtcatccatctataagattccggtggtcgacgatggaagatacgggcccaccatcctttttgtttttgctcatcaatgaatgaatcgctgtctgcacagcatgcgcgttaacgataaacagggtgaatagagaggcaagtcatgcatatatcaccaatggcgagagctggtatctgaacgacgaatttttctggctactgagagagaaagaagagaaaaaggaaggaggggagatatggcaactctgtagtcccactatgtctctggtttgcaaagaaacaagaaataagtaaagctggaaatggtatgaatcgagggaaagctgacgagcttatgtgtattgatgcgatacaatcgtccatttaaaaaagaggggaatggatgatcctgaagaagaagaaaactggagagaagagagagaagaagtgtccaacaggagatgctaaaattcaacttagagagcgacggcgccagcaccaaccacaacggctccgaggacaaggagaccagcttggaaggagaaggcagagccctgtcgaagagaagctcctgatacagcagaggagacagaggctgtggagacgattcgttgagagtgtgatacatcacatgtatttgtgagagactggcaatgtgaactaaaacgcagagaattacttacaagcagcagtagaggctttggtagaagcagaagctaccacggaaccagatgaggctcgggcagagctggcagcagatgatgcggaggcgacagccgatccagaggacgaggctaattggaagatagatgcaaaaaaagacgaacataattagtctcttatcaagtttagagaagcataatgtgatcgattttcttacccttagatgtagaagacgctgaagcggtggcggcagcgacaagaccggtaattccgttggaaatcgacgagacggttcggcagttagacaccgaaggggtggagtaggcggcagaaggggtttcggttctttagagacgtagatagataagcaagaagattccaccaaaatcagcaccgctctagggtttcgaaaaagtttctaaaagactcacactccgatagtgatgggcgttccagtcccggtgatggtgaactataaacatttgaatgatccatcagctgacgaagctacacctagaactgaacaagtctatgacttactcgctggtggaacgtggaagtggtggtggcaggcgatccgacagggtagacaccagggggctggggtacatcagagtcacactcggtaaaggtcccattgatggtcccgtaatcggcgggctgagaaagttgtgaatgttcggacattgattatttatagtctttgcgtataactagtcgcgattcaacataccatgatccagtagcatcccatcaagtcaagttcgtgctggcacatgatagcagcagagatggtgtcattctgtccaatacactctcggatgcagaactgatcgaaactcatgaaagccatccactcctcgtaattgacgtcttgtccggtaacgttgctagtgaggttaccacccacagggtttcctgaatgcaagaacacgatattcagtcatcaacagaatagcctctgcaaaacaaggttccggacaatcaacctaccttctccggtggcaccgtggggatcaagctctcctccagcgtctccatccctaatgatcaataagaagcgatgatcaaaaactgactgaaaaggtaaagtttctgaatgggctctcacatgatattgatcttcgttccgtcgaggaaaccgacgacctggacatagaagtcgttcttggtgaattgagctccgtagatggtaccctgtgacgatattaaggatcgaggtcggtagcagaaaccatgtcagattgagaagaacatcaaacttgacgaaagatcgtgtcgatcaacacgaaacgtacgtcagggataactcgagcgttgtttcgaggctctggaaggacatgaaacggggcgagtcatcagacgataaacatagagagaagcacgagatgttgtgatctttcttactggtacacctgttatgaaagtattcaagggggaagaatcattagacaaggccttgtttttgagaggaacacggtgtgaattcaagttactgaccaagctacgacctcggcctcctggtcgccgatggttcctccaggtctgtatcacgagcaaagaagtctttgttagaaaatatcaacaaggggcaaaggcatacaaaaagacacactcactcggcaggcgcaaagagacagaaatcatcaaccgagttgatagaagccaatcgggacacagaggtctggttgacagcggtacccaaagtaggagtagcagctgaaagaaaacggcgaacagagatggatgacggttagtcacctcgagaagagtgatcgacgggctcagattcaagggcgcgcccgtttcttcttctcgggaacaggagattctggactcacggttggtaactcccatggttcctgagacgcgtggaaaatcaacaaagtatcatcacaattatgtgcgcgtgcatcgcatacacatgttacgagtttgagagacacagacagcagaaaacgacatcggtttttctagttagcaaaaagctatcaccaagacgagaatgaaaaagagagaggaacagcgacaagaaatcaaagaaaaaagaaaaagaaaaagaaaaagaaaagagagtggaggaaaacaagagaatgtgaagagaaggtgaagagaaacgatgaaagtaagagaaatgatgggaaagaaatcagggcgaaccggtagcggtaacctgagcagagaccatcttggcggcgatagctccagagagcacgagggaggacgcgatggagagcatgactgagagaaacgagagttgaggagagacgagtgtggatagagccaagagagtggagaggaagaggagaaagtcgatggggaagaaaaacaaggagaggagagaaaggatgaacgcaaaagaaagaggaaagagtgattagtttgaaaaaggccaaggtgacatatttatttaaaaatagaacaagtcttggcgaggacttgtttcgatccttgaatcacgatcgtgatagtgtgttacaaagtgggtgactggtacagagttgagcgcaaaaatggatgtttaggcttctatccggtttactgaagacaaggagaacgaggtgaacggacgacaggatacaagaaacaaaaccgatagaacgtaaacgactagaacgcatttctctaaaggagtatacaaggagagaattaacaaagcctcagcctcaagtttctatgctagattggatgaggaagcgtcccttcacatactatcctaaagcttcgacagcgatatatgaaaatccgatagcgaggcatatggtcctcccgcaaaagactgtgtctacgaaaaacatagccacataaaagggtcgagttccgcaacccgatgtgccacacacagtaaacacgccaagttcagtttgcaccattgatgaaactcttgttgattagtcagctatggcacgttcctatgtgtgtttctcaattacgatataacatgattatagagttgtaaagctatcaaacacaattaaaaaatcccttcagctcgctcgggccaaagcaccggttccgttatggaaaatatcctgggtccccagaagaaatcatgaacacaagagagagcgaatcgattcaacccgccattctctagtcaacaaataaacgaaagtgaaagctcaccttgtaaattcctctgaagatccttgccagttcttgcctgctttcgtagaggggataaagaaccacgatgaaagccgcgacctgaagtggagggcactcgtatcagcttacgagacaccaaacgaaagacgtggacacttatcagaataagttacttacgaacgaccaggtcacactaacggcaacccaagcggtgaaacctttaacaggatatacgtatccacttgcaaaaagcgggatcgggacgagctaaatttcgacgtgcgacacaaagtgataagatataagtgcatgattgggtcacacacttgaactggaagtaatacactagatacttacaataatgaagaccaagaacaaagtgaccgatgcgtagacagcaaacttaaaggctttgttcagtccatggaagtcaatctctggtagttcaaccctcaaatccttcgcattcttcaccgtcgatatactctctaccactttttcatcgttctctccaaaagactctttctcggcattttcctcaaccaacggttcagaaacaatctcctcgttcttcgaatccatcgctgccacggtggagtgaagaacgatgtcatagttcagcgccctggtgatgtcaaagtcgaagtcctccgggtccacgagggaccagaccagactgacgaccgccccaactccaagagccacgcagtttcctgccaacatcgggtaatcttgaccagtcgtgtcaatcgtgactacacctccattcagcttcgcagcggtcacgagccaggcaacgagaccaagagcgagacccgcaatcgatccgaccgtgcaacccgttcggttagccttcttccaactcgtggctaaggcgactggaacgacagaagatccaatgatcgttcccatcacttttgaaaacgagcgtagacacaacatggcaaacgataagaacacgatgatcttgctatgttaagacttccgcggatagtcaagcaaattcacactcacattcgtacaagtagcctgtgtagcgattttgttgaaatattagcaactattttttctcctcaagcaaacatcaaaaacgaagagaacaagactactcacccatagaaataccaatgtagtaaaaagcgacaccaagtacacccatcatgatagccgcaaatgcgaccatcgcctgtgagaacctaaggatctgcgcctcattggcattcttgttaatgtgacgtttataaatgtcgtatgtcaggacagaagaaacagcaaccaattctccagcagtagcggatgtgacggcaagctgaaaggatataggcacaagatgtatgagatcagtactgttccagaagagcccaacaggaaagcaactactaaacataaaagaaagaggttcatgacatacgaaaagaaggatcaacattgctaccgcacctccttttccaagtagcgcagcagcggcagtgggagcaggaagtccagcagagacctgggcggcggtaagaggaacttcaagcgcgaccgcagccaatccgagagttgtcgacagagtaaacggaatggcaaaccaggcaagaccacccaatagatacgccttcacagcggtctgtggggtactggcgatggctcgttgccaatatgcttgatcattaaagacagtaccaaagtttccgacaatgttgagaacgccgaagatgataccgcccgtactcctcatagtcacgtacgagccgccggcgtttcgagctaccggagttttggcggaaacgttcgccagcatctcgtacatcttggcgggcgaacctagatcgatcgtacgtaaatggatgggtatacatcaggcctcgcctttgatttcttgatgtcgatcaagagagcgatatctcaccaatcttatcagatgttccataggtcacgaagacaaagagcaaaagaatgatatagaggatggcagtgtgggtgtagtccgcgatcaacgtagctttgggttgaattatgacgcgtacgcagaaagggtcgttagaatatgatgtctcaacattgatgaaaatgagaaaaagagagtgtgggcaatacatacatctcatgcctccaatccagacataaagagcaacacccaaggggatcaagaagcaagcggcctgggtcgacattccagtcaaatcgcttacggttgcgcttcctcccaaaacaagcatggtcctgagagagcgagaaaacgtaacaacttaagaactgtaagtgacgaggaggaaatatttagagcaaagaatctactcacgagacgatgatgttacaagcgagagcaaaaaataagaagatagagtggacgaaggaccccttccatcgacaaccaatgatctataagaaaaagagaatatttgttttcagcacttagtcctctattgagatagtcggttgatcatctcagtaagagataccaacctcaaggaaggtgtgggcgtagggcgcgttgagcttaagcttagcagctagctgagcaaacagcaaaacttgcacagtggctccagaagcgtaccagtatgtgccggagataccaaacttgtaagcgacagcactgctctgaagcagagtggcagcccactatgtgcgacattccaagacaagatattcatatcagcgcgagcaaaatagaaagaaggacaagaaaagttgagtgtttttaaaacacgtcatgactcacagtccaggcggagacgataccctgcgcatagatcaatgagtcgatcgtgtaaaatcagtgacgcccgaaagctagacgaagagaacagtgagatgtacggaccgtagcaatcagtcccggctttacggatctagaagcagatgagaattcttcggcactttcagaggctgtagacgtgtatcgccgttgctgtaggatataaaggatgcatgagtacaatgaagagcgttccgcaaagatacactctgagttgtccgcttaccatgaaagtgatgcccatctaagagttgaaacatccagagatcagtatagttaccctgactggcgattatgatgtgcataatataacattgaaactatagctactcgatacttaccatgcaagctgagaagaagagacccatgccacaaacgatcccatagcccactccttgggagagaacaggcgtgtcagacattcaaagaactgatgaaaggagaagaaggtaagaatagaaggagagacaagatctagttcggaaagtaaagagaaaagctatccagatgtaaagctgaccgaagcaacccttcttgtaagaaatcagcccattgaatggataagactgagcttcctccaaatatcgaaaaagcatgaagaaaagaagtgaccacattgatacaatgctaaaaagtggtagagataagaattgataagggaagcttcgactgcgcgatagttaaaatcaaatcaatccaaagcaacgcctgcttaaaccgaggatttcctaacgtaagcaaagtggcttatggtctcgtgagcatatgcgatagacacggactactgagataggccaaccgtttgagcatgaaagatacagatgataaaaacaggatgataacaacaggatagaaggtagaggaagatcaagacctgcaaggcagaataagacttttttttcattgatttaaaaatcagagcgaaccttcagtttgagccacatcgaacgccccgaggtggatcgttcggatcgatggtctcgacaatagttcatgagcatctctcgctcaaaaatcctttgaagaatgggcctattaactgaacatagcatgtaatgaatgggtcgatggatcgatgtctggggcaatggacaacggactgatagaacacgaagacagtgatgcgtcgtgagatgaactgcacgttcttgttttttgagctgtaaattcgtgtttcttccttcagatcctttctcattcagatctgccagtctcgacggtcttcacgctgctctcacctcgcattctcgggggttctcttggcttctcccgttctttaccgtccgacgcagaaacgtctccactggggtgcgcacatcagccaaaagcaagtgtaccacaagctggcacttcgtttatcacaacgacgtccacgtatttttctggccttcggggacggcgtattcccatcgtcttctcgtgggaatgatcctggcccggtaaaggtgctgttggccaagccgagagcccctccgctgctccagcttcgtaacgtccgggggtactggatgtcgagggcgtgcttcaagtgccatggcgagttctctggaagaagcaaaacgtgggcgctgaaagagtgtcgaagcatctgtcgagtaaatcgcgttcttcttaattctcaagctagtttctcagaatgatgtctcgggatagtgtctcgaatattgatcgttttctctgctctttgtgcttgctctcagatttggtgaaatggaaatgcccatctgtctcgcaccatactccacctagccgttcatcagaaagatgagaagcgagtatgcttgtattcggcactgctaccactgctccggtcgctaaggctgagactgttccatcgatgggacgaactagacccatggcccatgacatcttggtggtctgtggtctgagggcacttaagttcggaagggccaagtatcgaccattattggttgaagtcgatctcactggacctaaggctcaaagctgtcaaacgtcttacgaagccttcgcttctgtcaaggattgacctgagctggccttctgaagtaaagctgagatcagaatgatcctcttttcatcatcgatgggtctgtactaatattcctttttcttctgtaataacggtatttctctactccccttctctccttcctttctcttcctcccttaagctagaatttcatcatcttttccccttctttcgtgaaatcttcttttccacttgccatacaactattacgtcatctatcactgaacggaaacctgagcaatttctatacctttcaatagccttttgtagctcagagtcttcccgccataacatttcagcaaacgcggttcataggggcttcagactatacaatacattctcagataacagagacagtaacggtgaaagctgagggggaaagaaaaggcgcgaaggtagagagaaagatttcacagatagttgacgagaagaaaagctaactaagtaagagataggtactgatgctacacaaatcaaatatctccaacaccttctcctcccaaacctcttcagaacgagagttggtattgtagatctcagcccatcaccgatcctcgtctgttgttttcaaggcgtcttgtttgcttgggccattcatttactttgccgaaacacaaaactcttaacttcaaaacttgaaaggcgatacttcccgaggaaagcagcctgttctcccctcgttcccctagcctattcaacatcttcatcttcatccgtcgaaacaagttcgactatttgcacctgagggtcacccatccgcctcttggggaccatagtcatgccccaaagctcaagacaggcgaacaaagtggaaaccaaagtcggttcatcattcatgctcttctgtcaacatatatcgttctcaaaagctgataatcataaatattgctcatctgtctgtgatccagtacaatgttactacagattgtaggccttctttctttctgttaacttggatagaattctttcactcactctcgtctgaatcttccgctcataactcaatctgatcagttcctgacctaggccttcatgcggcagccatctcgggcaactatggcctcgctcactacgctcttactaacggacagccagtacgcccaacttcactttcttcctttctcatcctacaaccaaggtctctttagatcgagagcgaagtgctaagcttctattatttcccattaaaggaaaattctgttcttcacgggttgcttcctctgcatgcagcttgctcgggaggttctgagcctgtagttcgattgctgctcgataggggggctgacgtcaacgcgccaaggttggtatagcttattgataactttctactactccggacactgaccgaatgtatatccttatgttttccaaccttaggctgcctcgtaggtacagtaatgaaacgaggaaagcacctagcgtaggagtatctggtaagattagcttccttgtagcagtattttagtcacttgttgagatgcactgtctaatctggcatcattcaggatccggcccccttcatttcgcagctgcaaacggccactttgaaattgttaagctacttctctccaagggtgcaatctacaacaaactcgataagcatggccttacgccagaggatcttgcctatgccaacggacatgacgatatcgtctctgccctccgagcctgggaaactcttcaaaacagtatgcgggaaagagatgattcagatgggacacctgctatagcagaagagggctcgttgtttactcacgctgctcctcggccgaagtcacgggtcggttctgttgggagtgtgaagagaggaatcgagaacatcgtccacagaagctcacgaagagctagctcgggcactttcacctcggatatacatctacctaactctccctccgacctgctgtccctccgaaacttatccaaattgtcaatcacctctctctccccctctgaatcagctctgtctacccactctcctactgaccctccatcccgccgactagccactgaccctccgccgactcctctgcctgcacatatcattcagccccgtcagcgtagaccttctctgccatctatcattgagaaggcggccttccacgtgtctcactcgaaacagcacgggtatgatcctactccgtccattggtagatcaagatcaaagagatcgattgtgtccgatacagattctcggtcggccagcagctctaaaaaaaccaccagccataaatctctccttcatcttttctctcatcgctctagtcaggtcgttcctcatgtcgaagatgagttccagtcggacggttcacaatcctccttaccttccaatgccccatctcgaacggatgatgacagaagcctgttcaatacaatcaacgctttcaccaagaaaagttttcagccagcatctccccggggaggctctcttgatttgccccaagccgctcgaatcgatgaagaggatcttgcagaaggcagacactggatctcaaaccctcccccctcggctccggctgtacgaaccacattcttcccatcctctcctatcatccctcaatctgcatcctcttctttgtcttccactgctccgggcataaatttcagaatggataggactacgtcccggagatccagtttttccgcaccttcgccggacccttctgactacgaaagtggcttaggagaacgttcctggaatcaaaacaccagtggaggagctataaagttcagtgaggctgcctcgaggtctccattaggattagggtggtccactacagatttaaaccgacattctcatgttgacaatagttttgctggataccgtcgatcgatctcgggagagtcggcgccccgtcgaggcgatgccaaaggaaaaggacgagctagctcgtacagcgatggagatagtcaaaaatacctttcatcttcttcggccaatgaaggctcttattatcacgcctctccaatctcttccgaacctcactttcactttgtcaagccaacatcaccctggctatcattgtcctcccgaaaccatgagtacgactccgatcggggaacgccggtccgatccgtcttggaacggtccttcacagcaaacagtggcttcagttcggatggctcttcccttcggagagtagcatcagccaatctcagacgaaactctttccacgaatcatcaaaaacttacagcctgtccacaaccagtctcggcgacgctgcttctggattcacagcaatatcaagcggaccctctcatcatacaagtaggggagtgaagagcccaagatcaagtttttatggtcctaaacgcccgaaaagtctcacacttactgatttgagggatggtgactcaggtgtcaggggctttgaatcccctttgaccttaaatcactctccaagcttgtccaaagatacctctgcgtcagaagactatgcagctcccatcatacttgtttcggatacatctacaagaactggacggccccgcaacatcagcatttcctcagtttcctccgttggatctacgaagggagggcctacatattcaccttcatccagtgccacaaattttaccaacccgtcatttctctcgtccggagcacccagcacctcatctggaggagctccctctatcccttccgttcccgagaatcctcttacgtctcccacagatttcttgcaacaactatacacatctagatcagaagcttcgcttgccatttccagagaggaggctcatcaattggtcgagcaagcggagagagcaatccttgctgtgaaccgtaactcggtcgacggggcgaccgtgtcactctcagctcagctagcagcatacggagagaagcttgctctggaacgatctcttgcgcaaggcgaactgcacgagacgcgagatccgaaagaggcttcagatcgtagagacgagacagttcctactagaagcttcaaatccactttcatatcgccatcaggctcggtcacggttgattccccacacggatcggagaacgaggacccaatccgttcaggcagaaatgacactgatgatactctcaaggccgagagaatttcttctgataccgagttggaggggtcttcttcatttgtttcgacaaaactgccatctgttttcacaccagcaatttccaacaccatgccaacggctctgaattcaccagcctctagtttgagttcgaactttgtatctcgagcaaagatgagccaacaaacaaaagatcgaagagcatccaacaaatgtaagtagccactttgtttgaatttcgatcagcaaactaaactaacgggccgtgttcattggttttctgcattgtaatgtaagctcacaagaagcaatcagcttctacccctctgacccatgtcgcttccacctctctctctccgtcctcggtaccgggcctgcccaatgtctcccaaatctatgtgaatcgtgctgaggctttgcgaaagaaaggaatagagattacatctgctgtctcttctcccttggcgtatccaatatccccttccatccggaagggaactagctcctcaaattcaaaacctttcgatgacgacaatcaagtatggattatctctggacacaaaccgagcacctttatctcaacggtgccatccaagtggggtataccaccaggatccaaatctaacactcgaggacaattgccgttttccaagcccttcaatggaagtcccactaaagatttgaagacccatcgtaaattgagtgactccacaacttcgaacagacctctttcaggcaccggttcatcagtcacggctgtatcgtctattcatccaaatcaactttcttccaacaccccctctgtattaaaattcgcgagcaatcaacaccgtggttcgcctcggtcttcgcctctacactctccgattccttctcctcgtagtacacctcgacaatcccccaggaattctatctcgctctctataccttccggatcaaatcgtacttcctctgagctgatgagccaagagaaggatcataagctagatcaactgagaagctctaatgatgaggggaacacagtcggcaatcgaaatgttgggttgcatcatgatctcgaaaacgataatgggatgggtctgcccgacggatcatctcgaaagaaacatggttgggggtcgcgattcttcggaataaaccgcaagagttcttaaactgtttgttgttcagcatgtatttctcttcaggctgttgcatgatctacctcaacactcccaacaagataatttttgcattataaaaaaataacattgccgcactcttctcgttttgtttcgatcgtatatatcgatgtccctgctttaagaagacctatcttctgattagcgttaacggcactgatccgagttcctgacataaatcgacaataatatccaacttgctaaatcctgcttccttgaatcaattcagttctgagaacagtatgaagtcatgagacgatgatagagtaaaaaaagagaagaaaaagaaaaagttgatgaagacgagattcgaactcgcgccacgaatgactgcgaaacacggtcgataaacctgaacacagcgccttagaccactcggccacttcacc

SEQ ID NO: 987 - DNA, 2430 bp, Xanthophyllomyces dendrorhous
ccactcggccacttcacctgatgtctttatacaagcaaacataactcggtttggaagacaaaccttacctcacagtttcaatcttacagacaccatgttattttgtttgatctcaagatggcgatgaacatcattctgcagtacaagagaatgtgtcatcatcgtagtagaagtgcggaggttcacaaggaataaattccccgggatcgacaaatagactcatatcagcgtccgattccaagattgatgtagagcgattgcggtgaaggcaagggatcaatactgctttccatcatgatcactgttgaacatctttagatagttcggaggtcttaacgccgtctcggtgttactttctccgagccttcttctgtccctccttgtcctctctcttcagtctcccttggcactttccctcatacaacatagggaacagccatgctgtcttcgtttccctcaacttctcttatcagcatggacggacgttgatcaacgggttaaaaaaaacaggatgtaacctatcttttcctccattcatttcccttatcccctttctacgataaccactctttacttttctccctatcgcacatgacttcttttactcacaccaccacccgcatggctgcagttcaggctgagcccgtgagttaatagaccgctcggtagatgttgcgattaatgtgcctgactgcgttccattccttcatctaattatttaggtctggggcgaccttcagggatctgttcgtaagacggttgccctcattgaagaggcagcatccaagggcatcaaagttctcgtcttccccgaactctggctgcctggatatccgttctgaatctggttccttgctccttccctgtggggtgacttgtggaaaaactaccttgcaaacggcctcaagacagactccgaagagatgaacacgatccgacgagcgtgtgctgcgaacgacatctgggtgagtaatgattagtccactctggaccttacttatataatcattgacaccttcggaatacataacaaccatttctacaggtccttgtcggttatgccgagaagaagggttcaagcatgtggatgtcaacgagctggatcaacaaccaggtaagcttccgtgtgttgccctctgttgtcctatcgatcatctttctaactctgctttctcgcctattcatctacttatcttcacttgtctctgctggtctctcatgacttcctcttttcagggcgaggtcgtcggtcatcgacgcaaactgcagcccacgggtgtcgagcgtgtcatctttggcaatgcttcgggcgatacggtcaacaatgtcattgaatctcccttcggtcgtttaggttcactgcagtgctggtgagtcgtctactgattagctgcctatcgataattttcaagctaagctagagtttaattgcacgcaacagggagcatgctcagccgctactgaagtaccacacggcctctctccgtatgtacagacttcttctttgttagccgaactgcagtaaattgatttctcttaatctacacacacagatgagcaaatccacgctgcatcatggccatgtctctttccacacatgggcccagagcattctggcatgtcgaaggagggaacacttgctttgaatcaagcatatagcatggagactggcgccttctcgcttgttgcaacctgtgtaatgacagaggcaggagccaagtcgatgggttttacacctgagatgttggcggtctcgtttcttgccttgccgggtggaggtgccagtcgtatcattggaccggacggaagagtgcttgcaggagcggacctgcctggtgatactgagacccttctcacttacgacatcgatctggctgagatcgaggttgcaaagcagctcatggactgtgtaggacactattctcgaccggatgtgttccggtaagtcgcactgatcattctctattctttgtgattgtctgctgattctgactctgcatattgtagacttcaagttgccaaccaacacaatgcgccggtccactatcattctatcaattcaaagaatcttcccttgccggctccgattcaggggtttccaactctcgttcagaagtcctccactgagagttcattcgacttggtcgatgcaactagcttgatggctgacgcataatctgggtactattccttcctcactctattttgtgcttttcttgttgtagtttgatgtatgtacggatttcttaatcaccaaagccatgcatactacaggcagattgcaacatagacactggattaaataaaatatgaatagggaagatcgacggtcatctcgaactgatgcccacgcctcgcgaggaaacaacagtaaaaaatgaacaaaagagaatggacaaaagagagtaataaagtggacccagcagggat

SEQ ID NO: 988 - DNA, 809 bp, Xanthophyllomyces dendrorhous
tgaggggcaattctaagggagaggagccctggaacagagccttcgaccgtccgttcttcctctttctccccaaacggttgtagagccggggagaaagaggctaagaacggaacccccgaaactcggtggtgaggttcgggccaagccagtgctccggccctctccggaggatagggaggagtagactctcactcgagggtaccgagagtagagaggcttctccgtccgtccctcctttcctcagacgagcgtagcgaggaagaggaaaggccagggacgggcccagactccgagagtccggagagagaggcacgagctaactggagcaaagcgacagatagctcgggactcgtcctcctccatctctttctctttttcaattaaaagagaaagagataggaggagggctctccgagactcgtgaggagggtcctctctcatattcccgataatcgggaatatgaagaggtgcccggagcacccccacccggtgaccaccgatgggctctaaaaaaagagcccgaggtaagtcgccaggggcggggaagattcccccctcacacgagtttaagaaacgaggggggaatcgaaccccgaggagattactcgcagagtaatcgacgcccacctggcgacgatacctcgtctctttttttagtgagaaagaatcgaactttcagtgagattgtttctcaacggcgcgaagagccgtcacctgcccatcaggtggtcactatcaatagctgtagtagggggtcgaaccctacgagagaccactctctacagcaagagagagaaatgacctacgg

SEQ ID NO: 989 - DNA, 314 bp, Xanthophyllomyces dendrorhous
accacgctcggtcctctgttcaacaccacgatgttcgctcccggaacagagccaggcatgtactcgtccaacttttcccgactcgtcatgttcggcgactcgctcagcgacaacggaaatggctcccgagtgctctcgaactgaacgaaaccggatcccagggtaggtccttcgtctggtttctcgtctagcttctcgtctgtttttttgtctagtttctcgtctggtttctcgtctgtctcccttcctgtgggtcacacgatcgctgggtctgatgggtctgcttgtgttccgacctgacgaaacagatctac

SEQ ID NO: 990 - DNA, 486 bp, Xanthophyllomyces dendrorhous
agtagcgcagtggaagcgcgccgggctcataacccggaggtcgcctgatcgagacgggccttggcaacattgtctttttgctcgttttccctcggttttttccctggcccccgtccggccgtccgtgctggaggcctgcaagccggccgcatggtgccaccgtctgtacggccagccagccgggcgctcgacataccctctgggcacggaggccccgggcaagcgacccattagctcagttggtagcagcgcaagattccaaatcttgaggtcatccgttcaagtcgggtatgggtctttttttgttttcccgcccgtctgcctgccccaccacagggagctgtgtcgacctggctcgaccgtggtggacacgcgcacacaggccagaccggtcggacagacagtgacccacacaacggccgatagaaacagagtgcagagagagcgtgcagagaaaaagaagggcaaaaaggagggcaaaaaaga

SEQ ID NO: 991 - DNA, 347 bp, Xanthophyllomyces dendrorhous; identical to SEQ ID NO: 192

SEQ ID NO: 992 - DNA, 320 bp, Xanthophyllomyces dendrorhous
tccaacgaacactagacacgtcagatctcgatcacccatggactgcactagacgacgcactcaccgaggcggttctcctcatccggaactctccccgtcgactcgacaccgacagagccatcatccagctccccacccggttcggcggcctcggtgtgctctcgttcgccgacgtcgccccactcgcctatcaggccgcaaacgaggcagcagacaccatcatcgcacccatcctcggcggctttgacatgtcggacgtccagccaatgtcccaaagggctagaacaaacagcatggtcgaacacaagctgagcattctc

SEQ ID NO: 993 - DNA, 535 bp, Xanthophyllomyces dendrorhous
aacacaagctgagcattctcctttctcagctctcacagcatcaacaggactcactggctgaaaacgcgacgttcctcggccgcagatggctcaacatcatccccttcacctcctcgctctccctcagagacgtccacatcgccgccggtctccacttcctctccttctgccccggccggtccgacctctgcaacagctgccaccaccagaaccactacggacacgacgaggtctgccacggccgcaacccagacaccctcgctagacacggcaacatcaagcggttagtacacaagtcgctcgctgcgaacagcatgttcaacgtagagaacgaaccacttgtccctggcacctccatgcggaccgatctccggatcacttcgcccgacggtgtcgtcgagatcgacgtcgctgtagtctcgatcgcatccgacgccgcacgagagatcgccagacggacccatctgtacccacaggccgccaaacaaaacagatcagcctttgccactcggttcgccagacggaacgacccgcc

SEQ ID NO: 994 - DNA, 4287 bp, Xanthophyllomyces dendrorhous
gaccctaaccctaaatgagtcgctgggccccgtaaacaccgagaacattaagtatcgaataagaagtgtacgcccctggcaaaaccgaagtcaagttgcacaaggcgcaaggattcagtcggccgtgtggatactcaacccgtttgagagaacgaccgcattcatagaataagcctattttgccttagcctattaaaatgagatccaggccagctagcagaccactcacaaatacatcacgataaatggtcgcacttttcatcctaggttctcgttccattcaaaacccactagtctaggataaggcatgggggcatgcattgatatatatctgtgcgtgatgtgctagctaggtagcatagtagctgtgtgctgtatgaagtgtgaatgaagaccgatattgcgatgtgatgacctgtagaaggacgaaagaaagtgaatggcagggtagagattcgtcatgattttatccgaagccaatttacatcggcgacttatttgccttagtctgcagaaatgcatgggctgctttaatttcttgttacctcgtgaatccatacttaccttcctttctttctttctacaatcatgaccttgttcatgaaacgtgactaacatctcccctgactgattcaatgctaacaatgagcttagcatcattatcccatctgacatggtctctttcgttgccgatttccatctgactcgtcgaaatacagacttcgagtgtgagatgtcagggacggacaaactgagaactgatgaaagtggaacagatatgctgttgccttccaatgtgacaaaggttgtttcggcttgttcctacttcttctctttgcattcttgtctcgaaactgatggcgatcaagaaatagcatattcatctttttctttatttagccattctggtttgtctgagatctaggcagatttctttctcgttcggatgtctatctaacactctcgtcgctttgttgatcaggtcaagcctcgctttctttgtgaagctcgagcctaacggcaagtcatgattctcacagtcagcctccttactcgtctaccatgacgcttctctcctcgtcttctttccttgcgctcccatgcttctgatttggcctcggttctctagctttgttccttttctcgttccaacaggcttcttgatgttttctgctttctgttcgtttccgtatattgcccaactctttcattcatttcttcgcttttcttgatcttcgttttgaaaatctgacgtcacctcaaccctcttcgttggtgaccttctcgtctgtttcctactgctttactttttccgcaaactaccgaccttctcgaatttatgttaccagcagacatccagtagatcattctaacactcgacctatctttggactcatgtatcagaacgcaaggtaagtaatgaacattagagtgaatgatctcaggttggaagagcaccatatcgatctgaagaaagatgcgtatttcaatttctgattggctcgcgtctgagtaagggcgataagtatcaaatgaaggactgcatcctgacgaccgagaaatgataagataggtgaggtgaaccgtgacaaatgtcgttctgtgttttgacttcgatttgactagccatctggccctgccttggccagcagtcgccgaagcgcattgatagacctgatgagccttggcggtcggtgatgaacaatttatggatccttacccttctacttaaagttcttcaattcatcattcttcctaaaaatgaaaataaaatccaaaaaccatccacaacgatgagtagtgccgtcacaagagctaccaatcaagttgagtcgttgatcatcaagaatcggcgcaaattttagacacttaaatctaaattatagctgatatccggtctatctcatcggccatcgctcaaaaactgcaacaaggtcactcaattgtcttactccgacaagctggtttcacagatcctgtcgtctccctatcagtatcactgaatgcgggaatatttctcaacatctcagctgattaaacaggtgatgaagtgatttcctcccttctgtcctctctttgtatttgttccgtctttttggcactgtcctcgctggcaagatcacaaagcttcggataaagttatggaatgatagcacgtatacttgctagctcatcacgctttctcttctctgtgaaattttctctcgtttgtactctacagtcgttctcaaatgatccttgcgccctgcaatttactatgtaatttgatctcttgtgttccctgcgtattgcccaattttatcacctactctgctgagtacaatagcatggtcaattgttcttcataagtttatgatacagtaatgcttatatggtcatgatggagctgtctgtacgtttctatgcgtttaccatcttgtcctttatactctccacatcatatccggatacgttggaaacaggacgcactcttctattctagctaacagagcacgggaacgacaactatactcctctacagtccaatctaagaaaatcataaacatcctttctaattctagatgctcctctgacatccaaagttctatcaatgggtaatcatcgtccaatgtcacaaatgacaccaggccgcaaaatctaccaaatagtcaaatcgttcacttcatatctggaggaagcgctccgtgcttcttgatctgttcgatcacactgctcataccccatgcgaacagtcaagtcgaaaccggaagtgaagacagaagttagatcctcgtccacacattcgtccatatatgttcgtcacacacgcatcacacgaacaaggacacagaaagatgaacccctggaaggataggcacaaaaaaactcactctgaggacgtgttcggtccgaccttgagccccctcatcgtcggctctctctccaggttcctgtccagccatgccttcactcccgtcggaatctccacatgatcgatccccgcgaacggtgaccaaaacacccagggaagcgcgtttgcgtctgcgatcgagtacttacctcttcccggaccgaccagatagtctctgttccggagcctggtatcgagcaccgagtacagtcgtttggtctcatcttggtacctcttgatggcctgtttcgagagatcagtgcgtcagcacctactatactcgacaggctgaaactccgtagagagaacagagagagatacacacatatgggatctgctcgggcgcatatttcgagaagaaaaccgcctggccttgcatcggtccgatccctccgtggacgaaactgttcgagaaagcgagacggagtgatgagatcccgagtgatcaggatgtctctcactttctcctccatctgcgcccagcaaagcgagagacagaaggaagaacgtacaacatccactggaggatctcacttctgaagttatcctcatcagccgagtcgccgaatgagaacttgtggtctgggtcatagctataggcgaaagaagatacaaaaagaaacatgcgtcaggtctgcacttgagagcgcgaaggagacagaagagaaagaaagagaaacaagaggaaagaaggtgtgtctgccggacttactgcttctctagatacagcagtatggcggcggactcccacacagcatggtcccccctgttaggatcgaccaaagcggggatccgcccgttggggttgatcttcaggaaccactcctccttctgttcattcttctggatatcgatctcgttcacatgatagtcgaaagctgggtagatctgcttcagttcctccaagaacacagtggccttctggccgttcggtgtgctcgccgagtagagctcaagaggtttcttcagttcggtgctcatcgttctagcaaggattgtgcggagatcggagggtcgagtcagtcgggcaagagatctgatggctatggacatgtttgccgttgagtttcctgaaagatgggctcagtcactggactgacgtgatgcaaaatagaggactctcagacggccgaggaacggtgagcacttacctggtgatgaagtgtcgtcggtcttgcaagagagagaggagacaaagatgggagatgaggaaaaggaaacatgaagaacgatggacactgatgagaagagactttaaaggcttgatagaggttcgagcagttccgacaaggatgatccgatcttcccagcgtgagttcaagctatctagccccgcccgagcattcctgagtatgcccgggtgatgcccggtcaggacgtgaaacccggccaaagtc

SEQ ID NO: 995 - DNA, 21195 bp, Xanthophyllomyces dendrorhous
  misc_feature (9173)..(9182): n is a, c, g, or t
tccgaatcggtttcatagagcctccacaagtcttgaagccgtccgaacgaagggggccgatcataagcgcacctttggccaagcccgccctggtggtaagcaggccgacaaagaagagcttgacaaaagaaagccgctaagattttttatagagagtgcacggcgggagcttggaagccttcttacatatctccaaaagaggacaaccgattcagactgcagacaccttcatgtcgagcaattaaggctacctgacgtctgccagcttgcacaaaccaccttataatgaatggtcgattggacgtttattggcacggttaacaaaaagcgcagattgcggaagagcggcgtgagaagcttgatgaatgatctgatggacatgatgataagatatattcagctcataatcaattcatatttatgatcaacgcaaagaagaggaaagaaacaggataaacacaagagggtgtgataaatgtaatgaatgaagataaaaataaaaacaaaaaccgaagagacaaaagacgtatagcaaatacatatgcacatgtactcaaattgattttaaggcttcgactgcaatgtccaactcggcctcggtcaaataattctgagcgatatagtctatagtcgtcaagctcaaaatcgcggtgtatataaagaacaagaaaggaaacctgacgatcagaaccgatagatacttcacatgaagcttacttgccaaaagctcaaattgcataacagtgatcaaatttacactcaggacccatctcaactcgatcattttccaggttgtcgtgaatcatttcccacttatgtttcaattgatgcgagacttttcctatcttcgaaacactcaccggaaccaacccactcaagatgctgtcgtacactccagatttgcatctgtgtggtagggaagaagcagccagagggcgagtgagtgagcaaacatatatatagacacaaatgatcccaaaactgggtgataagaacgtagcgcatacacaacagataaaggaaactcatcactttaaatctaaatacaaagacctcatctttaagtagttcggttcagtcttctgcttgcttctctttatctcctcgcttctttttcttcttttctctattctctcgtcttggatctaagaaatcgttcatcaaaaacaggaaacataaatataataaacaacaccccatatcttcgaaggttcacttgacatcaaacgtctgtgctcttctgcttctcaatacacttcactaatcgcgcgacttcatgcctcatgccagctcctgcaggacctccagcaccgccgcatgatcctcgacatgagggtaatggccggcctcgttgaccatcctgactgtcccggacaaggcttctgctacgtgccgagcttcggctgctgggtctgagaaatccggatcttggcttcccatcaaaacgacagtctttgctcgtacttgagggatacaagattcacaatccgctttggatgcccacatcatcgcctgcaaagcctgtaaacgtccaggttcgcagagattcgcgtgcagtttgattgcgtattgcttgaggtcgggcggtggatgagctttgaacagagtcttgtaatatactttccaaaacccagcaccccaggactgatacatacatgcccagagtatgcctttgacaacgaagtttactggaatgtcgcgcacgaacgggccacagagaagaagtgatttgatcctaaggggagaatgagcagcagcccaaacggcactcccccccgctgctgagttgcctagtatgattgcatcatgaacatcgagatgatccaatagagcgacgatatcactgcctacagtagcagccgtgtagctagagaaggttgtgcctgattcgccatggcctcggatatccatgttgataactcgatagcccgcctgcgccaatttaggagtgagatgtcgggtcgcttgtcggaggtccccgatacctggcacacagatgatgacttgatctgacttgctgccagtgtcatcataggcaatcttgccttcgggcaactcgaggaattcggtgatggacatgatgatagataggtatacaagattggttcaactcggtttggttgggataagatggtcagttttacaacgatttggtactgctacgagagcgctatgcatcaaacatcatgccagaaaatgtattgtgtaagatctatgaacacatggcatttaaaggcaatgctagtcaacagcttgacttaacggccatctgatagatcgccgacgaaccatgcccggctcccgacggaaaatgcccgaccaattgtaaatttagaaaattcatcaacccggacacgcgactgtaaagattgctgacttcgcacaaaatagttccgctcggtcataaataagaaagtttcctcaacgagctctcccgggattctagttcctcgtgtcaagataagatttatctgacccgatcacctgcggcttcaactatcgtcaactgtcgaactttcattcacaggatctgagttatatctcaacccgtaattacgacaccatccagcgcatctaccccctcaaggctggtcggtctcaaattgatgaatgactaacacagtgtctgcggcgacagacatgtctccgttctttgcgaactatggatatcgccctcgcttctccgcgactgtgcgagatgtatctactccagccgctgcagaacatgtgagacggatccaggagatctatactttctgttgagactcgatagtcaaagctcaggaggctcagaaacggtttgctgacaaaaaccgagccaaggctcatgacttttacgaacgagacacggtaatgctcaagccgacgaacatcaagactaaccttgccagcagcgaactggactataagctgcttggtccattccgtttctttcaaagctgaagcgcacaggacagcacccgacactgagaattccggcttcgcctataacatttttctctctagtatttctttgtttcttcttctctctctcattccctcctgtctgaatctgttcctgtacatacccccttatatcttctcaactttctccgtccacattcctctttttcttctcactttaatcgtctcctatctcttttcctcttcctgcctattccatttcatatctttttatattgaccacctctggctgcactctcctttacccttctacttcttcgtatcctgtcgcttcttattatacttgttttcatatcttctccattctctcttcttctgtatttcacactctctttctcaaatcagctattgttcttgagtgtatttgcccttcctattccgatcgacactctttctaaatatcgctttctatctggcagtggcctatatatcatggctcatagccctggctttcatactgatctatgaagttttgatttttactcaactcttcgatataaacttatattcattctatccggctacggacagcagctcttccacacattttgcaatcttctcgtcatactctttcaaccaatcctcatccccctttattctctcctccgttctgatcacgttcggtggcagcacaaattccactctttccttcaccaactgggacttggttccttcgaacacgtttcttaaagcatcttgacatttgccaccgcctcttcccccgagtgtcatgatagctataggttttctcacccattcatgataaagatgatcaattgcaactttgagtatacctggtacggaccagttgtattgtggtgtgaggattatgatcctgtccattgcagctacccatgatgagaatgcctgaattcgagggtcggagtatgatgatggaatggaagttgggtcgagtgcttgtggaaccgatatgttcatttcgaaagggagggggtaaggaggagcagttagggacaagacatgaatagagaggtcgggatgagtgatggtgaggcgagcgagtaggtaggtacatataccggacgtattggacgaggtacgaggagagcctaagagaagaccaatgttctgaggcttggaagacataaccatggtgttcgactgtttcgatcgtcgttgtttgatgcctcaattgtaactggttccgggtagtgagataaggatatacctgtaaaggaagcgttattgcattctacaagtattccaatttccgaatgagctccttttatgcgatcatgagccgatataaatagcaacctgtggatgatgagaactttgacggcatgatggtctcaaccgaaagaaattgaatcttatcagtatatgctgcatcctgtgccgattatcaacatgaacatctgttgacctataccagtaatcccgttcaactgagaatgtttatcagacattggatgtctccaaagaagtagtaggtcaaagattgttggtgttcgtgattattgttgctctcgagatatatgtctaagacttgagatgcccgatctgggtatggaggatcgcaatcctgctgcatttatacccatatgtaaaccaacagaagtcgagcaatatcatcgtatcacttgtacatctcgtttgaagagtacaaccactgcgatgagtattattgcgtcggcaggaacgtgtacggcttccaagcgtctcaacgttctcgatcaggtcggaagatcaagaggtcttggatatcaatcatccaccccactgtctgaatctaaccctaacgccatacaatcttgtttttgggtttgccaatcatgatttttttgtgttcacttgataaagaattgattgaaagatttggatgaagaatacacacatctatctgtcttttttgggttatttatcttttgtttgatacacatcacacgattcaacttcatatcctcatcactagggtcgtctatgagtgttacaaacacacaaacacagacacagataacacacatgattatatacgatatacccactcacacacaaacatatgtttgaaccaaaattacagggtttgtaatcaggatagtctattaaggcgaaaattacataaacagtgactccttcgtcgtctacaacagccatcgaaggaactttccaatcttggtcgtaggggggttaggatcaaagtcctgatcgttttcgaaaacgcaaggttagcaaggagtcgtctgtctgaggaatctttatcaaacgaagaggacttacgatttcgggaccaggaatgttggacaccatgtcaatcttagaggctggtttgaaggatggccgcttggtgaacaaatagtgcccgaggaagagcgcgccgactgtgagaaaggaaaatcacgggtcagaatgataatttaactgtgcgatcatgattcgtctctcttaccgatgggaatattaatgtaggcgatgatgaaagaggacgtgttccatcttcctttgaggaagactttatagccattgaagaaaactttgtgtagaagatcaacaagtgtatgaagcagaatttcagcacatgtagcgaaacactgaaacccacgtcatacatctatatgtacaacacactcactagtgataatacaccagaagagcgcccagtaggcggggaaaggctggaagcggtctgcagatgtgttgtgagaggaaattagaccgagctcatacagcaagaggaaaagtccaaattagagatatcacgtactataaatgtactttgactcagacctgattatcccctgggcgtcgcatgccgacttgaaccgtaagaacgagacgcagatgaacgcccaggaaataaaggtggcgatagaggtcagatcagaaagccaattcaatacagtgttcgaaccactagacagagtcatataggcgagaaagaaagacgatgaggaacaggccaaagcgattaggggaagtccattcctttcaaggcatcgagaaaatatctttggagcctgccctcgaagggagagtccgtaaaggattcttgatgatccataaagaatggaactgccggcggaaaaggcggaagtcaggactccagcgttgatgaccgaaggaaggcctttgatacccacgcgcgtgaaggcaatgacgaatggcgatgaagcagccgttccagtcgatttgagaagccgcggctcatcagaagggactagcataccgaccacgactgtgagaagaagaaagatcagcctaaagctccgttaggtgacactgagagggacctactgattccaaagaagtagaaaaacaggattctccaaaagatctttctagtgcatccggccatgttggctcgaggattgacaacctcagcgcaagaaatcgcgatggactcgaccccagaaaaagagtaggcggcctgtagaagtgtctggaaacagccagtgaatataccgataggaccggcgatcggatagcttgcgaacgctccgggatctttccagtagcgaaacccaatctaagaacatcgattatagttcagactttgagaatgagtattatgtggatgagtgtgagagtggacacatactcgttcaccaacagggttacctccgagatcgacgataactcctccgatgattactgtggttatgatgtgccagacggagtgatgagagatgtgttttgtctgaggtgaaggcaatgactactcacaacctatgatcaaacatatcttgatcaacgcgaaccagaactctgactccgcataccacctggcgccgaggactgaagataaaacgaatctataagctcggtcatacagaaaagagacatacgccatatagtactaacagttgaacgaagcgcagaggaagagaaggagggtgatgaagccggcaagccttgcgttcgtcatctcgatccagtacccgataatgagcgtggccgagataatttccgtcggaagcgaaatgatgcttgagtaccagtctaagaaaaatcatcgattgcatgatcagcggctgaccaaataaaaaaaactatttcgaggcaaacaagcacgtacgcatccagcccacggcaaaaccggcggaaggatggatgtaacgttccgccatatggacctgtgtcgcaaactgtggttagtcatggtacgatcgattgagaaaccgttctgtacttacgtatcctccagagattggctgcatggcgaagatgtagaagattgttcagaaagcgcgcgagaagggtaggctaaataaaacttacagcaaaacagagcatctctcccagacattgcatgatgcaccagacgacactaccgatgagaccataggcaagcagggctccgcaaggcccagcttgggcgacagcctttccggatcctaagaagagcccaacaccaagcgtccctgcgagcgcgatcatctggacatggcgctgttccatcgtacggtgaaggccatcggtctagataaacaagaaatatcagagatgagtaacggatatgctcgattgcggcgaaaagacgagttgatgtcggaacgcacgataccactatgcacatccttcgcgacgtcatactcatcgtcgtccagaacggggacaacggtgacttcgttgaggtaccccttcttttctttatcttggatatctgtcatggttcaggagtagttcataaatggcttggagaataatactgagtctttagagactggcggtgaggatgagatcgtgaagtgcggaaggctgaaaacaggtgactgaacttgtatcgaaattgttcaaccaagtgagttaaagaaaatgaggaaaggtgacggaatgagaaaagcaggtgaagataatcgcaacggatgatctttatgtgaacgaaaacgtctacccaacagaagaatatcgtggggtccatcgcactacagtgaaggatgttgctattatttggccatcttctttgctcttgacgatatcggaggcacgtcttgagcgtcatcgcacgacggccttctccatagcgtggtagataggcagcacatggtagatgtctgctatccatcttgtctcgatcaactgattgaggggcgctgaacgttagcttccctctgatttacaaacgatgaaaaagtctgaagattccatatctatggatccgtatcggcttccgttatccagtaacgtcgtgctaattaaaaagaacgaatctgttcccaagagagcaggcgcccgtctatgataagttagcagcaaacgtgtgcagaaacacagtgattagagaccgagaggagttcaagaaggtttgtggagagatggggtagagccgaactctactcttcgccatccgagctactgcttatcatttctgttatcatctctcggttgccttgtctcgcttctcttcatacatccttctcttttttcgttttttctgctccggcctcttttcattctttcttatctgctcgatcctccattccttgattgtctccgcccttctttcctcttcttttgtctcgtcttcctcttgtagctatcttgttgttttttctctttgctccctttctccatatctttttcccctcagtcttcttctgcagtgccgtatcttgcttcgtccatccacctagccgtatttttgccctcacgctaggatgagccaacgatctttccttcagtcttgttgtcggcatccatgactttcatccatacgtaatgaaaagacaagaaaatggataaacaccatgcatgtgttccctattatttatcttgactaatgaaaatacagtttgtatctagaatgtttaacatagaaaagtgtgaaaagtgatctttcattctggcacttgtttatagccaggtcctccctggttttccatgacgacatacatgcctgggtggtgtttcagcgagaatggattgaaaaacgaggaaaacagaggagaaccagctagaaaatatatagcttttcggagatggagccttgggactctgcgcgaatagacatctgagggtgttgcctcaaggaggataaaatagaccgcggttgagactaaattgaaactgttaaaatcctgaaccggatgcactctatactgtcgattcaaccacacaacatccataggcacacaccgtcgatggcagcaacccgccgcgatggacatacggaaacaagacgataaagaaaagaatagaatataagagaaaagaaacgagagcaaaaaagagatccccaaccgggagtnnnnnnnnnnggtgatagggaacacgagggtatgtttattatattcaaaaaaaaaacataactcattacatatgtcacgcaaacgcacatgttcgttttttcacgcaccgacagcgaaaccgagaaggtataaattgtgtaaacctctggtctgcttccttaatctttctctttttccacatactgctgtgcggcagaatctctttcaatacaaggtttccccctttgctccttccaccacactctattttgtgtttcagtggttgtcgagcgtcaatgaaagtgtagagcttgttggcttgtcctcttcggagggtggtccggcggtcgtcttagtacccttcacttttgcactgttttgtagtgatgtacagcgagtgtgagagtgggtcggtgtcccgtacatacctgtttatttgtttgcctcttgttgaatatgacaatggatatctggaatctacttcgctggtgtgcatgttattagagttgcaaaggaaaagatcaggcaagaaacatcaaagctgagatgtgctcatcagtctgtataacgatctgatctgttgccaaactatcatcactcgtctcagacggcactcatcatctaccgaacgatacatctgtcgattcttcgatgtacattaggacaccagtccgcaaacaataaacggcattggtctgcaccatcctatataaccttaccagacccgattgttaatttctccaatgtactggccatacgggtctccagcggtgttgtcaacgcctgttctaccatccacatacccggatgaaagttcttctggtccatctcaactggatccaccactcggtctggctcaaaacagattctcctccttgtttgtttctgtgtctgccaacgggatttctttatggtccgccaaggtgtgtctgccatcttcttcttcacataagctgtatgtttggaccgctgtcctttaactcatctgtctgctcaccgggaagccgactgccctgctaggtatagtctggagagagtctgcttcaatagtggacgaaggctcgaatgtttctgcgtgtttctcatgggattcatctattgtctttgtcacagtgagtgattctcaacctttcatcttcaattgaactgttgaaaccaactgccgcattcttctcgtgttacagacgtctaaatccatcattctgagttactacatcattcaatcccctaccccttactcatctcttggtacggccgttcctcgaaatagtgatgaagtgtttcaatgtggagctggtgaaagcacagatcgattgggatggtctttagaatgggcgggaagctgtttgatttcaagaaaaatccaggggttagtcagattgattgattcttactctgatcaccctcttacgaacatctactttgtccttggtcctcaagtatcattccacatcaatatcatcttgatgtcgccgtccttttgcctaccccttcgatctgcatgataccttaccctatacccgcacctctccctgcagaattaaaatcagttcagcttgtattctcccgagagccaactcccggatgtactttcagtctcacatactcccgtgctctcaacacctactttctcgtattcgaaaatggtgatacctggattgcatatcgtgcttcaggcttggaccctgacgatttcgaagtggaacttgagtttgtgtatgtcagcctggtggagcagtccgctagtttaaattctcaagagaaaccagcttcagaatctggtccaaacatgaccaaacccaacttagatggaggtacggtatgtgcgctgaacgcgacattctgcatatcggctgtcggaaccgagtcgtaagtctattctttctgcttatcaagtctgatggtgctgatgattgcgattatcattcaacttttattcaaagaggccttgttcatttatttgatcttccactgtcggcatcatcacccccagtccctcatcttgcctctgcgctatcactacaagcagcgaccaacaatcgtcgactacatgtaggccgagtgacatctctggcttggtcaccagacggttacgctttagctgtcggctgggaaagaggctggggtatttggagcaccggaggaaaacttctaggctggggtgtgctcgacgaagacgatcgagacaggctggccactagtgatagtcacttgcgcggcgtatctaacgaaggtctactctgggtggcttcaggattagagttggtgatactgtccaaacccgttcaatccctggagactcatccagcttcatcttccaagcttggtcttctatatgtcctttcgtttgccaagtcttccttcacgagtcagcccactccctcctcgaccaagtatcctttgctcattctgtccaacaagttattactctcatcaacggcatcccttccttcttcaacatacctttcgtctctcacgccatcttcctccctttggatccctgtcaatcttcctcactcttacatcaacactcaatatccgataaaatacgctaccgtttctgaagacgggcgtctcattgcagtggccggcaggcgaggcctaacacattggagcaaaagtagcggacggtggaagctgtttgaccgcccagagtgggaagagagtttcagagttagagggggaatggcctggttcttgcatgtcctcgtagctgcaattgaagagggcaaagagttttctgtgggtcttcctctgccatactacgtgccagactgtgtgttgtgtctatctgatacttagcatcgagtcatgaacagatccggctctactctagagatgacgccttgactcctacctcacatctgacatccgtgaatcttccaacacccatacacttgatgtccctacacgacaactctcttttagtgtatacaacgggaaatgttctttaccattaccttgtctatcctacggaaagatctgtagaactgagactttgcggatccatgagctttcgaggcgtggtcgcggcgcccggaagagtccgagctcttagctggctagttccgtcagcacaaacaagtgagaaatcaatctgttggcattcttatctcgagcctatatgtcatctgattttgtcatgcgatgatattgtttgattcaagaattggggcatccggcggacgaccttcctttagctacaataattcttctgattaattcctcactggtcttgcttcgtcctcgaaagccctccagacatcatcgacgaacctcatccctaatgacagtaaccccagcatcggaagaagttaaatacgattctcaggtcttggctgataatatcgaatcctattggactcatctatctggcattggtacgctggaaaattctctgtggggatgggacggagaggtcagcaagtctttcatatgtcttctttatgctgagatcggtactgaagagaacttactgtttctgaattcagcaactacgtgtctggctagatgctctgactgttgatcgtgtccaggctgttgctgtcgttcgagcagaagcaggtgctaaagaggagaagtcgtatgccagggtaggagaagtgagtactcaatcttatattcgatctgacagtagcttgaattgactctcgtgcaccagagcgtcagcatacctctcgacttttatcctctttgtaagtttgggttgtctttttttcagatagtccgtgaagtcaagaaaaaggattgaccaatttgtgctccattatatgatcacgcagccgttttgatggataaaggaatcatcattggactaagctctgaggcatcaatccgtcaatctttgagctttgccaactacaaattgcaaacgtcaacgcatctgtttcttccatatctgctccgattccatctttcttgtgggcaagtgaaagctgcagttcgatttgcttcattctatcaatcactctcatattttgcccatgcactcgagatccttcttcatggggttcttgaacaagaggcagacgatggcccagccgccagcccacaagttgttgatggattagaatggcagccaagtcaactgtctccactatcacccatcgctcctgtctttgtcggggagcatccgccaggcctgcaatcggaatactcgcctgcgttcatccaagcaaaaagtccttcaacagaggattccaaacgtatgggtgttcttcctttggtgattgatttcttagatcactttccccaggccttagaagtagtggtcggatgcgcgaggaaaacggagatcgatcgatgggactttctgtttgatgttgttgggaaccctagagatctgtttgaggttagttgtcgtctttgtaatgtcgttctaatacccgctaatcaatcgctctgatctttttcatgatgtctaattggcacactccatgcggtctgattattccattttctttcaatcatctggtcgatctatgatttagaaatgcctcgatgccaatcagcttcagacagcaacttcttacctccttgttctccatcatctcgagcagttagccgatgcttcgatagatactgtccgaatcatccgagctgctatgagggttggtgaatggaatttgtgcaaggatcttttgcgatttcttcactcagcggatgagagcggagcattgttaatcaaggcgatcgagagtttagggctgtatgcttcgagagaggacatggatgctctgatcagctcatcgaacttcggcctcggttctgaaaccccagaacatgatgatctggggggtcatgcatctgttcctatatcagaatcatcgcctccgttgcaatcgcctccgttgcaatcgcctcagccttcaacaactactgtctcggttccgagatcggctagatcgttgactacacgtgcggtgtcctcgaccagccctgttcgaacagtgacttccctaccgccttcagcggagcgtaatcattcatccataggagcccctccgagcaacgccgaatccaggagtgatcggcgctggatttgatcaatgtatagatcgttgtagtgtagaagtaaccatctcgaagaagggttggagctagatgcccaaagggtatttgatgtcgtagagatgctctcgtgtaattttatgatctgtactatcgtatagtgatggtgttgctcaactccatcttccaaacacatgatctttaccgtaacagataatagctatacttctgcttatacgaagtattcagtttgttgtgaaacatagacgaaaagaatatggccaacgcatgattataatcatcactcaagaccttccaaaggctggcaggacttgtacattttgtaccgagcctctaggcacgacgttggcttgtactgctacaggtaactgactgttccaaaatcttcgaatctcaaatccgtcctcgcctgtcagtcccagctgtccaagaactcctcccaaggccgcacctctccgtccagacacagactcaatcatgccatcaggtccagataccaaaataagtgttttcttgcccttctcaagagctgtcggtcggccagaggaacttgcggtatccaacgattgcgtgtctggggttgagacagtcgagggttttccgaatagggaagcccaaaacgattcaccttcttccttcgcagccgtcacggtcgactggatagaagcatgacccggaatcaaaatctgtcccagatctttctcaccgaatctagagggtgagagatcagcgagctccagccgagcaggcaacaaggatggctcgggcagatagtcttctaggagagataatgtgagagcgttagacgtgtgaacgagggtgatggttggaaggtcaggcggcggcggctgaggtttgagcgggttgtatggcagtcgggggggtgaaagggtatgaagaagttgagtgaagggagtgattccggtaccaccagatatctgttataatgtgaagattggtttcgagcgagataatatttcagatcagctcaaaaagaatgatccatgaaagattgattatatgaaagatcaagaatgacggaccatgagcactcgatcccaaccctgcaaactccatcccttgagctggtcgatgttgggatcctgctcaatgacgctaggtcgaacaacttcaacttgagtcgggaatgggcctcgggcttcgatccaggaaaatctcttgagagaatgaataaagcgagacacttctccctgaggctcacgctttaccaaaatcgaaagctgggtgggtagtccatcgacgtgttcgggaggagaaaagatggtgtaaggctacagacaagcagaagagagacgtgtcggtcagcaaagaatcgttaatcaaccaagagaggcgaagattagcacgacgagtcgagatcggtgcaaagtaaagaaaagaaggcggaactgactctctcgatctgtagggaggaatccttgatcatgatgtggtagatcccttcttcatttgtctccaagtttcccagtaccttgggatggttgtcaggtagtctcatggtgaggactttgtatgttccgtctttgagtccggtcgatccagtctcatctcgatcgagcacctcgacccactctacaggaaacgctttgtacttgtcctggtcaagcaacggactgtgggccggcttgaagacaccataggtcacaaaggcaagagcgacgcaaccatagaaaagtgttcggagtccatttctagaggcatcggtttcaccgtccggtccaatgaccggtttcacactcggattgaactttgttatcttgaacagcgagaccaaacgctgcctagtggtctgttcggtcggatcgaactgacgacatggccgagagatcgataagtgtcttgatgtgaagattgtcgatttagatgaatttgctagtaaagcggcagtcgacggccgagccagacgagtggcgaacatattaacgaacgaaaagaactggctttctaacggtctgtgggtggtggataatgattgatagcctgccgagggtcaagtttgaatcggtcgagagtgtcgaagacgaaaaggacgaacgggagagcgcacaaagaaaaggtaattatatgaaattaacgaaattcataaatctgagttaactagctagaattctgtacctgttcctctttttccaacactagcttccgctccttcttttactcttgatctttcctacgtttcgtcatacaggtcgacatggtccgcatattcaatcaagttcacacctagtatgggcttctattttggaccgctttgtacgctatcttgtgttgagtatgcttgacgctgatttcccacctggtttccgctatgcacagcaaggatgactttcagaccgtcgctctggcctactttcttcgatatccgtttgtctttgttcattctttctgctttccccttgtcagaagggtcagattgatcagtagggctgacattcacttggctccttgctgctctcaggaacccgtttgcaaaacacatcatctcttgtgatgttctatcccgcacgatcaccccagagggaacgctcaagacgacgcggctgattctcaagtcaggaaagcttcccctgtgggcgatgacgctcgtaggtggctggggaggaggcctcggtgcctgggtactagaagagagcgaggtatgtggaatgtttcgtccttgattcgagcttgcccttgtggtgacatgagactgacccggccagatgccgggcatagacacaaagcgcacgagtagggctgacgtaacgttgcttcggcctgatagtgctatccttacccgccctacgcatttctaagatcgaccacccgaaacatcactcacggcaacatactttccatccatgaagtcagtctgtcattttctttgtcgcttccgctttggttttcgaccaggcatcttggttggtcagtcgggttgtcaggactaactttgactgctatggctcattgtcatgtagacatccctcttgaagccggcgtcgatttcgtccgaatcgacacaaccaccggtttccatgaccttgcacgaagtggagggccgaatactgtcctccttgaatactgttgaagcagtgaaacggaagattgagactttcggagagggcaggtttgcgaaaggattagaaaaggtaaattgtccagctcttgatttcaatctctaatcaattcacttattcgatttgtatctctttcggcggtggcccatctgtcgttcggtgtatcacagtcacgattgggtatctcgcatatcatacaaaaggtcaaggaacaccggcagacgcttctcgatcgtaaaaccattggtgtccgtgggttaggcttggagatatagtattgtcggttcccaatagggcgtcgcatttagggtctttctcagccctcttcatctcctctgtttttgcttgaacaatctctctctctcttgggttttagtctctcttgtccgtcgtcaacaatatatactgcatggtctgtcaagttcagaaatatgtatttatacctcaatcccatctattttgctcgcctatacattcgcttctctggccacgtgtcctctgtaaaatacatacctcactctatctatatcacaagactctgagaatatgcgttcatgaacggagtttgagcgagcatgatttgagtttggcttgaagtcgatgaaattactcctcaaccaatatgtctgtacatttgtctcgcatcaaaattctcatatcaagaatgcaagggccgatttacttcagaaagctacaactttggctttgggctttctagccggagccgagtgagcaggagtcgagcccacaggtcgaccagcaatgattccttcctccaaatcgacagccttccgttttcgattgagagtatggaagtcatcctcatccgggccgagtgaacgagcagaaggatcgagtgagggaggaagaagagtggtctggatagcgcggtctagcgaggaagacgggtgaaggaaaggctgtcagaatcacaagcggatagaccgttgaagtcttgaggaggaaaaactcactgtcttttcgcagctcgcagtccttggcaagatgatcctttccttgacagagaatgcaacccttgccgccattcgggtacactcccttgtcttggttttggggacactttccggctaaatggcctttgccgaggcacacaaagcacgaagcgaacggcattggatcagccttgttgactgggcggggacatcgaccgagagtatgttgaggcgagccgcaactgtgagagagagagaacatatgaatgattgacaaagcacatcagcttgacatacgacgagcaagaagcatcaaaacttgcgagaaaagaccgatacggaccggtagcaaatattaacagtgtctcttccgaccatggtcctgattccgtctatttcgaccgcgccatccaggttgttcgggcaatctttagcggaatgaccttgggaccgacaggcaaaacaggtcgtgttggcctcccgttcagcgattcggtccaaacgcctcttttctgaagccagtcgacgggcgtcaaattctgtgtcgtgaagatttatcaaaatggtgtcgataaggaaaaagagaagcacgcgttggatgtggtatttcataaccaagagaaccaggaaacccagggttagagactgccgctatagaaagagagaacaaaagtgagaggcaaacttatcgactatcgaaaactcacgagactgtctgctatcctttctcgctttctttcgttccatcctggctgcgtgctcctcgatcgtctcaccaggtttgggacctttcaatccggccatcgtctttcttccttttggcgcgtccggttttgaggctcctgctgctggtgtagtatcggctttgggcaaaggagctgacgatgtgctagaggaatctatagaagcaggctctgtcgatcgctcgctaggctcgcccgtctcagcaagagactcctgaggatcactctgtccatcaatgacctttcgattcttcttatccttctttccccgagtccctctgtggactttgcgtttcttggccacaggctcgtcgtccggtccggtcgtaggtgccgacgcggtcactaccggagcaggagcagggtgtaggtcaggctcagaggccctctgggcggaggggatgagatcctttcgtttgatcccgaaggaggtgattcgggtcatgtgaatatatgcgtatatatgtgtgtatgtgtgtgaggaagaatggactacgagccaagtaaggtcaaggtggaagaggattcgtgcggttggtctggaaaggcatgatctgaaattttgttgatttcttgtaagaatgcggggcgccgctgtctgattcattgtatctaatgtgatgtctgcctgagttcaattgagctggatctttgtacgacatttatatcatatcatatcaaacttgaactttgggtgttgcttgaaggactgccagaaggttgatgttgaacgttgactgcagtttgatgagactctgaagcacgaataggttgcttcttgacagagtctgcgtatctagctctggcctattagatcataaacggcgacggacaaggcatcaatatttgatgaggcactcgtgtttgatggcaattttccctggacaaagacacccactatagccagcctctgagctcttgcttctttgcgctccgaatacttgccatacatcgcgtggatgacggcaaggggaaggacgaggtagagaaagaaaaggaccgggtcgagcgtgatgagtgccttgatttgatcgactagaaaacgtgtgatttgatccatcgcagaaatttgaggttcgcttgagatcagatatggctgatgatgagctcttctaaacggtttctgctactgctgctgctgttgctgttgcttgtgctctcctttgtcatctcgtcctctccgagctctcgcactttaagctcacctggagaatcctcgggcagatggcagtgggcggtgtagggttgtatacttacataaggtagatgaatacttaggtagtatatttgaataaacaaccccaggcgcctgcttttctctactgttattgatttcttctcgttctcacttgttaccttcactcgcctgctctccatccgtccggctctctctctttcgacggatacacagatacacagatacattcatacacacaggctggctcaggatactcacgcgcgtgcaatctctcgctcacagcaatctcccgatgacggcctttctctcgtcgtcgccatcgccgccaatctctccgccagcaatctatcctacatcctcatttaataccattcagacacgttcgcacgatcatcagtccatcgttcacagtggtcgagatatttcaatacttcaagatcagaacaacgatgacgacgacgacgacgacgacgatgatgatgatgacgaatacggagattccatgctggacctcaagagcatgggcttcaacttcaactatggttctcctgtcaaaccatcggcttcgtccacaggagttgcagtcactgcaacctcgtccggatcatcgtctgttgccattgcttcttcaagcgcacatatcagtcaggcaggagctagtagaccactctcaccctcatcccagtcagctaatccatcgtattcccgtccgaatcccatatcactttcttcctccagcccacctgatcgactacccataggctcgaccgtcgattctactccttctctgtatggtggatcgcgaacattagctcccaatcatactgctagcacacctcttctgtcgaacctttcatcagcctcagtcttgggttccggaagaccctcaggtctgaccgctaggacaattggacgtgtggcctcggtaccatatccatcagcaggcagagatgtcaagagctctttagatcgagacgaccatgatgaccaaagcgaggtttgtatgaactgtctggatgattgtttttttttttttttttt

SEQ ID NO: 996 - DNA, 4469 bp, Xanthophyllomyces dendrorhous
gttcttctcatcgctaaactctgtgacttatcgcctcatgaaactcctcgttgtgccttggatgtttttcttctcctttctttcacaaattatagccgtacccgaaagcgagctcggtctctcctccgtcaacacttcccagaaatttatctcctccgccgcgaatgcctcaccgaaccccctctgccaaaccctctttccgtcctcctcctgctcacacatcttctcatgaggaccgtccccttcagactccctccctcacttctcgttctctcctctcttctgccagcgagtctactagacgagctcgcctacttggaccgcccattcggctgacctatgaggaggccaagcttcagcgagaaaaggcggagaaagaagaagaggaggaacggctagagagagagcgtgaggcttcagagagggagcgcgacccatctagaggtgatttaggtggagtacaagaagaggatgaaggacagtcgatagccgacatcgaccgacaaagcttctcaacggcctctacctcaacagacccagatcgcgaacgaaaacctttgagattcgctaaagacctcgatcttcgagaaagagaaaggacttctggactgtcgaaatcatcgactttaccctcccagatgactgttccctcgatgtacacacgtacgccccctcaactctcaggagagccagataagaaccgaatcactcctctatcttcttcttcgactgcttcaacaaatcatcacaacgctccctctccattatcgtcagctagctcactctccttccgtctcacatcatcctcagctatgtcttcgtccactcctccgtccggattgaatccttcgtacagccaaccaacggattaccaggttttatcttctggtgacatccagtcaaataccgacgactccccttctgccgctgcttctgcttcccaccgatcgacttccaccacctccaaacagaatcatctgtatcgttcctctggggaagagctcaatcgtctcaaatcatcctctccccaactaacaagcacgtcaatacaaccctcatcagatgctcattccaccgccgatatggctcactcttcctcctctgaatctaatcctaacccttatcgacaagcacaacccaactatacacctgtaagcttaccgggcaggcagttatactctcctccgataccaccctttcactcatcttccgaaaacaaagagaatcatctcgatctacttggagcctcctcgatatcgagcgctcctcaagacaatcccagcaacaagcgaaacactcggtccatctcggatcactatcaagcacccactcctccgaaagtttcgacatccctcatagaaatcgatattccccctcaaacaaatcttcgtaataacgcgccacctggaggtaatggacagatgggtagatatgcttctggactgggccagacttatcagatcccgataggagggccagaagacgactcaaacagagcgttgtatccttcggataacaatccgcaaagggcagctaccgctccacctggagcttctcatcagcatcacctccatcaacagcagcaaccaacccatacacatactcctcatgcgtactctcatccgcaacatcaacaccctcactcgcatcagccgcaagcatcagccccgccttcaaacatgatgctgcacggccgagcaaacagtgggattgcctctcaaggctactacgatacttcaatgcccattcctggaggttccacttcaactatcatgcagaacggaggaacaaacaccgtcatgcagcattctcaacagcaacaatatggtcagatggggccgcccacgttgatgcagccaggaggcacaaggcagggcatgatgccgcttcctggtgagaagaaagaaagatatctcgaagtatgtcctttcgagtttctatttgtttgcttctttgttcctcctcttgtctttcgtcatgacttgatctttctttgatctaaccgttggaaaaaccccctttttgaccctctcttcccatcatcacatctttaggtcaacggccggtcatatcaaaaactctgtcaaatcggccgaggaggttcttccaaagtgttcaaagcgctcaatgagaaaaaagatgtggtggccatcaagaaagtggcgctcgatcgactggacgctgaagcaattcggaactaccaaaacgaaattgacttgctcaagaagttgagaggacatgagaaagtcatcagacttgacgacgaggagacgacgaggagcgggagcggcaagccaaaagcaatctttgttgtgagtgccttgtttacttttacattgcgcaagaccagttattaccaatgggtgatatcgattgattgatcgatcgatcgatccgttcctgtgaatcttcaggtcatggagtttggggaagcggacttttcaaaactccttgaagagcaaaaaggaaaacgactaaacatgaactttgttggctttttctggctccaagtatgtcattttttctcatcttacacctcttttgtctatccctgcttgcataaaggctgataaatcatcctcaatctatcagatgcttgaatgcgttcagatcgttcatgaccatgggatcatccataccgatctgaaacctgctaactttgtgcttgtcagagggtgtcttaagatcatcgatttcggaatctctcacaagatcgaaggggacactgttcacgttcgccgagacaaccaagtgagtcgctgtatgctggtcgacaagtcgtcatcgacagagacttaccaatagggctttttgtatcaaaaacgatgcatcatagatcggaacagtcaattacatgtctccagagtccgttcagaaatctaatggagagccaaggattgttgtatgtcttttccgctcctcgttttcggatttctcagttaactgactctgagcatcgggattgcactagcttggtaaaccaacggatgtttgggccttgggatgcattctctatcaaatgatctatggccatcttcccttcagcgattttaccaaccatccggccaagattgccgctatttgtaatcctcgacatcaaattccatatccaaccatctcggttccgaggatgccgtcgtcgtcgacaacgtccgttctcggacctaatgcgtctgggtcaaattctgcctcgatagatacgaagacgcttgctagcccggtggatccgctggcgatcgaggtgatgaaagcgtgtcatatgcgggatgaaaagatgaggccgacgatcggagagttgattgagcatgactttttgaagccttggaaacgtgggtcattcttttcttccaaagttctcttctccctcttcccctctccagggtttaaaggtgacgacatgatgggcttaccgtcttgctttccttcttatggttttcttttttcacttcatatccggcaggcaccctggccaccaactcatctgcgcctcccgtcaacaagatggacatgctccccccggagtgtacttcgatttcgttcaacgttttggaacaactcgtcacttttgttagaagcaagcctaccgccaccgccgaggtaagcttccgggctcgttttttccatccttgcatttcattcatctcatgagttgaagcccgatttcgttcttcacttattgaatccttgatgaatcgacatcgtttcgaatgcttgtccacccaaacaggatgcgttccgaaaactgaaagaggttcatgctgaatactgggcaaaccattaatctagctaaattttcttaaaaaaaacccccatctcatctgtctatatcttgaccttattcttatagtccataaggaatccaaattcactgtccctctctcgctatttcttcccttgtttcttccttgtctttcagctcctctcgaggaattaacacccctccttttattttctgtctcaagttctttccccgatcctctttcacgaatctgcacgacgttctacgacataacctgcatcatcctgtctttctccttctctcttttggggttttctgatctaattttaattctaccttgctgttctgctctcaatttgaatggtctcttgttttcttgctacatctgtcttgtcagaataagaaagttcatcatctttggtatctctcccttgcctcttctcggtctgggcacgccttgttggtcttcagaagagacatgattgattgtctgttcctgactgactgtgtctttgatccgggcctcgcctcaagccgtgttcttagagggcagaacggaagggaaaagtgactaacaaagaaagagtgataccctgaatggtccatctttgagggtagaaagaaacaacaacaacacatatgtgcgagccaagagggatggacaagatggaagaaacacacgcgtaaaaacgtcgagaggggaggtcgtcaactcaagagagataaaaat

SEQ ID NO: 997 - DNA, 543 bp, Xanthophyllomyces dendrorhous
gggaaaggagagacatgtcccaaagaagaaactagattgagtcaaatcaaatcgaattgaatcgaaaccgaatcgaaccgaactaaggccagatcagatttagacggaaataaaaaaaagaaagaagaacggcatcaaccccttctcgcaccccaaccaccgaccaagccagccgcccactctgccacagccgtcccgccaacaccacccaacggtctgatcccactaccgagtatcccggacggcgcgcccgagcccgggattctagccctgcctcgaccccttccgccggtggcggcggtggaaagagaggaaagactggccatcgggttatcttgagattgctgacggagtatagatttcgtcgtcactgtattcttgcaagatcaggtttcgaaatgacagaggaccgcgtgaggcggatgagtttgatttttgaatgtaacaagttgcagtcgttgcgcgaaggaaaagagaagaggatggagaagcaggaaatgatgagtatgcataaccaaacaacaggatagaagagggatgaag

SEQ ID NO: 998 - DNA, 2700 bp, Xanthophyllomyces dendrorhous
aaatagtattgatatttgtttctaatacgaggccgccttggatgatttccgccagggtatgatgaacctaagaacgagatgccaagtcaagtcagatccatcggtttagaccccaagatgtacattggagaagaaaatcacagcaaaaggcaaagaaaaaaacaagacaaagaatggaaagacatacctcgtcgaaaccaaaaaccaaatcaagctcacagacattctcaaaaaccttatccaaagcctcgacaaagacctggatgagatccaacacgcccaattcggattctgcggtgtcgcacgtgaacacgaatgtcaacgtggcaaactgtctgaagcgaacgtgaacaaaagccgagagagagaatagtaatcagccagcctagaacggatatagtttcaaggaaagcaggaacaacagaatggaacagcaaataacgataaagacgatggaagagagaagcaaagagagacgatacctatatatgaccctaatatcctttccatcctcttcatccctctccctttcctttcccttgcctgtgctaccaccgacgccgccaaagaatccctctctcagttcgggcgcgtccagaaagctgcacatcccggtcggccggctttcgaccaaggcgtatatccgactgatcagcttcttctgttggatcggtgctgttggcgtgtagaacttggatagacgaggtaggccaaagttgttgaatatgaggaccgagaggatcatctgtgcgtttgatctgttccggtgtatcctcggtagtcttggtaaggtaatatgttgagggacaatcgggtcaaacaagactgacgacgatggtgacgacgatggtgacgacgatggtgatgatgatgagatgatgggtttctcttgaagcagaaggacgatcttgtttgggaggaaagccgcacccttggtcagcggtccagagagtcacgtgactgaagatcggttgatctaacaagtctctttctttcttctacttcttctacttgttctcttcgttcaccatcggtcttgaaagattgaagtgaaccaatgcatagatgcaagtgcagatgtgaaggctgaatagagcggatgagagaaaagggaattctaaacgaacgcaaaggtatacaacggaggcgcagggtgaacggagaggtgccgcattcaggatataagaagggtaacaacgagaaagatacggtaagcgaattagcaagcagggtagcaaacaaataggcagacacaaataaatagcacaagctgatggtagtcacaaccagggttgcgctgagacatggggcagagagcttggggctttcttttgacaacgaagcgttgcgcaatatacagaggggaagaatgaatgaatgaatggaaggtgaaaggacaagtgaaaatgagagacataagcaaaaacaaacgtatacaagcgcaaagcaagcaggcaagcgaaaaaggcaagcaaatagaagaagaagaagaagaacaagaaaagaaaagacatatcggcgcgattaaccgtcatcagactcctcttcgttgctgagtttcattcgaacaagagaaagcacaacgtcggcgtcaacagggatctcattcccctggaagccttccgggtagtttaccggaggcagagtagctggagtgaaggtactacatgggtacaggacgttgtgaggaagaccggaatcaaatcagctaatgaagcaacggagaagatgaagaggaaaagccaccaaccgagaaccccagaaaccaaagtactgcatatcaagaccacgagaggtaaactcatagtcgtctgtaatgggtcatcattacggtcacatcagtgtgaaaactgaggaacgacgaaagtagagacatagaaaaggaaaataaacgaagacgataacgaacgggcgaaaccgtccgggtagaagaattccatgaccgtggtcctgatctctggcttcatccagagcagatgggttagtccgttcccgtggacgcccatcaggatcgttgtccttgcggccaagcggatttgctcctcgttcgaaagcttatccctataaaatagaaagacaggtggaccgttcggaaccaacatttcagtttgagatgttgacacaaaacaagatggtggaggacgaacatctcgacaacgttgagctcccaatcatcttcgatactggctctggtgagtgtctcaactagacgttcgtgatcttcgggcttgagcattcgtcttccccaagactgtcggctgacgtaggtgacgaccggccgggggcgcataccaggaatgaggtccacctgggcgacgccgccgatgtggtccataagagagtttcggacgggcgcccaccagtttggcgttgatggcagaagaaatgcttcactagagtagaaggagaaggaagagaaaagagtcgcccggggtaagattgagaaagattctatctcgtttcgttttatcccttttaatgggaggattgactgtgaagactcacgaggcggatctttgagtggcagcaaagcggtcacctctgtaggcggcagcccgatcggcgaggagaacctgctcgtagacgaccggtcgatctgagttgaccgagtcctttttaaattcaacggtagcatttgggagcacagcttgcatctagagaatcaaggtactttgtcaatgtatgagagagagttaggaa

SEQ ID NO: 999 - DNA, 1287 bp, Xanthophyllomyces dendrorhous
agagagagagaaagagagaaggtatagtacataatgaaggacggagggaaaagagaaaagagagagaaagtgaaaacgtacgagcaaggcgttcattcctgagtagtccttccactcttctgatcctgttcgggcaaagatgagtctgtttggcatctgtagctgggcgtgttcgcctttgtcggcgatcataccagggatcagggacgagtacgtacgccagagcccgtaaaggcactctgcagcaaagtggtagtaatgattgatgacttgaattcattgtttggaacgtgaaaagaacaaggcgccgcgatcagctttcggagggcagatttgcgagcaagacagagaacgctattggatgatacatacattgtgggggatcattaacgatccagctgtgcccgtgttgaacaagagcgcctaggggtgtcccgtctgaggaataggtgactgggaagagaagcagagcttgggctggagtgatgatgcgaatgtctttctcagtgggttccctgaggggaggtaaaagtggttacgagagcgcgcaaagaagggaggaagtatgagtggtgagatatacgacggatggagaagaagaagaagaatatcaaagacaggtgttgacatgaaaggcacaaagaggcaaaaagaaaagaactgacctcgaccgaatgttttcgtgatcgttccggatgtcttgaccggtagagatcatcattctttctggaggaaaggccgatgggttggaggtgacgatgaggtaggtctggttgatctgatagaggttggtaaagaccgtccagccgggggaatggacgacgagctgggtttccgttgggtagccggtgcgatcatggccgtaggggatggcggttgtccctgggcgccattgagtgagcttgttggccaagccgagctggagaacgcgttcgtgaccgttgcgatcagtgtagctgatgtcgaggtcgagttggaggaggcagaacagggtgatcgcgagtaggctgaggagtccaaagagggagaagggtagcctgaggatttttcttcggaaggaggaggacggggagtaggaggaggaagaagaagaagaagaagaagaaggaggaggtgtgagagaatgtgagtaatgagtagatttgtgggtggatatcgggtatggcagcagtccgttgtgctttgtgagtgagggtgagggtgggccttgggccagtggcaaagaatccttttcgagtgagcgtaaggctgggatgaccagagggctgggtgtgcctgacatggggg

SEQ ID NO: 1000 - DNA, 2117 bp, Xanthophyllomyces dendrorhous
agagagagagagagagagagagagagagagcgtttctctcgatctctctgtcgctctcaaagggaagggcaaggaacccaggaaaagaagcgtttcagggcatacaggcacaaggcacacccacccatcacacacaaagagacaaaagaacgagaacgcgttcgctctagatgatcgaacgaccagagacaatgggaagaaacgctcacccacccctggcacaggcacaggcacacaggcacgatcaccactggcaggacaacacgagcgtaccctccacagtgctccgtctctctgtgttctcacacacacactcacactctctctccccctctctacacactcgaatgggttcttccggtccttcatggttcaatctgcgtcatacggtgactaacctacatactgcgcatctccggcccaatctgataaccccgcggcccttttgactctctggccttgtagtcttttttttcttttccccttgccttggctctcctctccatctgtactctgaccaacgcgttcatctccagtgattgtgctcgctcggctggactcgctctctctctctcttttctcaggcacaaaaccaccaggcacaaaacacaaggcaccaccacaccaccaggcaccatgtccaaaggcgttcctggaatcctccacacctacatccaacagcccaccgaactgcccttgttcgagtcggcctctctcggctcggccaactgtgtctgtcctcttttcttccttctccttctccttctctttgtccatgctcacttagcacttagcacttagcattgactctcactctcactcattctcactctccagctagtattcctgcccggtctgtatgacggcctggtgaccgttccctacgtggacgcgttaagaagacatctcgagcaagcaggctggtcactgttcgtcctttctatcttctccctctgtagatttatatattggtctatatgtctgcagtctggctcacgcttcttgctctatcgacttttctctctctcttcctttctctctttctcttctcacatcttccatctcttcctcttcctctttctctctcctccttccccacctccagcgcccagcctcagctcacagccgcactcaaagcttggggcagatcatccctcgaacaagacgcagacgagatagaacaggccgtcgaccatctccgagcgatcggtccgttctcaagatttcctccttccttgtctcgttctatctctctctctccttgtatcctcccgctcacattcaactctctctctttcaaacaggaaagacgaacatcgtcctgcttggtcactcgacaggctgccaacaaatcatggagtatctcgtccaacccaagaaatcaaacggaaagcttaggtcgaccatcaacagagccatcatccaggcccctggtcagttcccttcggccctcctctccccctttccttcttacctttgttcttccctcgtgaatcatcagttctcatctcttccccattccttccatttttcttccctctacagtctctgacagagaggcaaacacagactctccatcgtatgatccgaaaatacaagagaaacttcaggctctctacgacaacaccccgggggacgccaggcgggatacgctctgtcccccagagatctgcaaatactttggacttgacgtcaccgtctatcgcgcctggagcactctctgtcccggcggcgacgacgattacttttccacagatcttcccttgacctcgtcaaccaccccctcggttcttcgaccgctcgaccagacgtttggcaagctgcccaaagacgtccccttgtttgtcatcttctcgggcgccgacgagtacaccccgaacccagagaaaactcagccggccttgctcgataattggactcgcgccgctttcacaaacagcccagacgctccttcctctaccgccggcgcctccaaaggctcgattcgaggtatcatcgttcccggcgccagtcacaacgtcaaacaggcagacaagtcagaatggatggcccaacagatccttgactttatcaaaaagtgatcaacattataactcattcaatctatagtatccata

SEQ ID NO: 1001 - DNA, 437 bp, Xanthophyllomyces dendrorhous
tatatatgtgtgtgtgtgtgcacgcgtgtgttgagtgactataaaagtcgaacttgaaactagaaagaaaacaaaagaaagagaatcctttctatcaattccgttttatgaatccagctcttgatgttccgtctggatcgatcgctggtatgcctccaaacgatccatcgtcgagtctgctagcctggatgtagatatacatatggaaaggaaaaaaaatccccaattcagtcaaccgtgttcccgtcagtcagtgttcgcaatcaggtagactgatactgtcgaagaagaggaagtcaatgaagagaatgaaccgaaaacatcactcaccacgtcttccatgcattacttgccccaccgatgtcggtcccgaactcgtaccgaccatgaccgacgagcgggggcaacagactgaacaccccacctgctccctctcc

SEQ ID NO: 1002 - DNA, 15707 bp, Xanthophyllomyces dendrorhous
cttggtgaacaactgagcgtccctctggaggaactccaagatccgcctggcgcccgtctgagataatgagtagccgaacgtgcccaacggatgttccgaaggtcggacatacggatggtggaccggtcggttggctgtttcgtcagagaacgaataccctaagtagaccatctcccagtctccgtttccgtccggcgatggatcttttggaagcgctcgaaagatcgaagaccacgaccgacggaaatcccacgcgagatccacatcatcctccaggatgagcgtccggttgagaccccggtcgacgatcgaccgcaagaccgccagatgggaagtccaacaagctagtggaccgggaagggaggtcactccagagttgatcaacggaaactgagtgcctagaatggaacgcgaggcgtaaatcgacttgaacatctcttgtcttgatcctccctccttcttctccttctcctcatcctcctcctcatcctcttcctcctcctccgaaccagatcgagctagccgctgacggtaaaactctcgccaactgaccgaatgcccatcaggatccacaggtccgtcccagacgatcccgttttgatcctcccagagccgttcttcgatccaaatgacctctgggtcggtgaacgaggtggctttgaagaactcgaattccatgtcttgtgcgcgcgccagtagtttcatgtgatcccttcggtcttaggggggttgcgttggcagaaggtgtgagcgcaaagtaaagtatgagcagaccgatcaagcaaaaacattgtgtaaaaattaattttaaaaaaaatctcatcagcacaagttgaacaacctcaccttgtcgtcgggcgagattgatgacaatgatcttgtcaaactcgctcgcctccagagctggatccgtgcgttgttggacatcccgtctgaacagacttctggcaccttcccatgatccgctcgggccctgcgctttttcaaggaggaggaacgagtggatgccgggcgtgaacagtccaatgaaaaaagtcgcacagattatcactgccggccagacgaggatcaggtagacggcagagggtaaagaacggatgaacatctcgtaagcagtgcggagagggaggacagttgtagcgatataatgaaagagagaagcatgtccaagaacccaggtttggacggaggtcagttcatataagactctcgggcaaaagacatggacattcaaaacatagagtgagtgtggacatgggattcaaaggccccttgcctttgtaaggagaacttgctgtccgagcatgtatgcgcatgcatactatacacacacacacacatatatatatactcttaaccggattgatcatccctcatcaaacacacgagactaagctaggtctggagcgcatcacccaaccttcaaactcggaaacgaggtgaccgaccaagtttggtacatctcagagcgaggatgcaaggagagatgatcatttaaatgcttgcacctcttatttttatcattctctatcatgtgtccttcttttctctctttctttctttctctcctttctcctcgacaagagtgaaagtcaatggcagcttctgcggagcagaatgaactaaacgtatgacttcattgcccagtttcgtttttctgcatcgactcaatccagacggtgtgctcaacactcccggccaacctcacagccgaagtgatgcgccgaacgaaaagatgcgcgttattgaatgttagggttggatacctcgaatgactctcctctccatcgtccatcccttcacctccgagaacaagatcatctcaccaagcatcgatcgtcagatcaacacaacatctcaacacaatggattctcacatcgctccttcgtcgtcgtcgtcatcctctagattgactaccacattgtcggtgtttgatgtcctatagtcacatttgattcctgatgcgtcccgttctgcacactcactcacgagccttgttctctccgttcgtccagacatcctctgcccgtcctcaacatctctgaccatcacacccggaccaggcttcaacatcggtctgataactataaaagtacggtgtcagagtcttcttcttggatttttctcctcagggacgttgacaataccagtttgttccgaaatcacagtcgtaggagctctgatcggtattcagaaaggcaacgaggtcgagatcgtgaattcatttgagctcgccctcgttggcgatcagcttgagaatagcgggatggaaatcgacggcgaaagagcaccgggtggagataaagttgaggtagactgggcgttctttgaggagagaactgcaagttgtatgtcctgcattcctctgagcgtcttccaaaaaaactcatgtgtcccgcactgtcacaccatgctaaggttattcgccttccggaatcgatttgttcttgatttccgtttggacaatggtgtcactcaaaagtcaaacaggtcttccccacactcgatctcattggatggtactctgttgggaacacgccttcaccaatagatcgaattcttcacactcaggttcgtcttcaacttgctatccatcgagcatacagtcggccgactccgttgtgttctcaatcctttcctctatttctcttcttttccttttaaagtttcaagcaagagtcgaatccgcactcttccttcagctagatactttatctccccaattgtcctcagactcatcatcatctgaacaagataacaaagaacaggaccttcctgtagatctctatcaaaccgttcacctcgctggcgccgcgtctgcaaccacggccgaaggaccgacactcgccaaagaacatgattcacaaaagacttggtcgttcgaaaagatcagctggaggatcaagacaggagaagccgaacggatcgctgtagaaggtatcggaaaggccgggccagacttgctaggtgatacaggtggaacctctcgttcgttcctctaaggcttttttttaatttaaaatatttgaatttatttggtcactctcgatcagcccgaactcacctctttgaaacgtaccatgttgggcgccgaatttatcaaaagtgatggtccccgttcgaaacgcgcttcaaaaactatcgaatcggacccagctcatagtgagctatctcgacggctgtctccgaggagacctccgtgtcgatcaggaagtccttcgggagatagaatctctccttggaggtcttccggttgacggaggtcacgcctttagagaagaattcgacatggtcagttcgcgaatcgcttcctcgacctcattgatctcgacccgttcgatcttttgtctgattcttttgtctttgactttatctttttattctttgttctatcatgtttcgttcttgattctctccttttcctctctgtctccttcaattggataaactcaatataggaatgcgccgacaccatgttgacaaattatttgtcagcattaacaaaatccctacacgctatgaacagtgtgagttcctccttgttttctcatcctgatatcagtgcctttcctttcgaccaaacctaccgcacttcctgacgccggtttgagcatttcccgacatctaataatcatccagacgaccgacaagttcaccttccttcacacatcttcacacgaacgtggtccaggagggatatcatctgtaggggggctcaattcgaccgacggatcgtctgcaagacgatcggttggaagtcgaaagaaagtttgattagatcgccccaaaagaaaaacaatcccctttttatactcctactccttctcctccttgctcttgtttctccttgagcttcctctctcttcactcttcctgcatccaactattctgactggatcgataggctttccttcatgagagagaggaaagtagatatatacatatatgttttgcatccttgctaggcgcgattgattaccagtaatatacatatataagtctttcttttctcaagttatagacaagtatgtctgacgactatcgacccttgttcttcgtttgtctatcgaaaacaagttcaaataagagaaggaaggcgttgttaatgtttcgtgatttgagccttgcatgtttttttcgaatccacacagaaagaatgggaagaacgaaccggaaagtaaagtcttttcgggtgtgagcaaactcgccaagcttgtgaccgatcatttcttcagtgacgttcactggaagatactgtgtcgcaacaaatcaagacgaaagaaaggaaaggcatcaacacaagtctttcactgatatacgagcaaataatgaattataagtagaacaatcaaagcagaaaagagtacgaacccgacgaccgttgtgaacctcgaacttcagcctttcagatcgatagcgaaagaaaaagaaaggcgttaacgacgtcactcaagttgacaaaggtactcaagagcgtccaatcaaactacgaggctatctgagtcactcggataatcttttcagacatgtctgacaagacagtctccgaatgctcgatctggtctcgaagaactcgcaatttgacttcaagtgggttcgaacgtgaacttacccgacaaaggatggcacgatagtcgcgtttcgagcttgcgtcctgatgggagtcatcgtcttcgcatgctcggccaaattggggaacggtgggaagtaaggacctgaaggaagaccaagaaagagtcacgaaagaggaagagaaaacggtcagttgaggcagatctgcgagtcgactaaatcggaaaattcgaccagagcgaagaatgaagagcggacctttccaggccgatcttgccatacgagacacggtggggatcatgctgaagcaaagggaacggcaagtccgatgatatggatggtcacagaaggagagctgtagatgtttccagacagacgtagggaagggatacatcatgcattatgacgggttcctagaaactcatgatctatgcatttagagaggttcacttgttctgatatctcttgatcgttccatctactcgacgttatctatccatcccatcaaccaacttctaagagagagctttgtccgttgaagatgtcaacgttgaggaaaccagaagaactatttgagtggcttacagtagatctagcctttcccgcgtctcagaccttgaagctctcccagttcactcggtaggtctatgttcgagcttattcatatgtgtgtccgactgttgtgtttatcttttgatcaccggtctgttccatataaaacatccagactatgtcgagggtctcttcatctactactccatttgctttcgcttcatcttcttggcatagtgccgacattgcgcaccaggtctgagcttcatcggtaggtgtaatttttactgagcttgattctttcgaacctaagtccagagctgagagttctctcgactgcacgcgtaccatagttttcaggcactttcaatttccaatcagcttcctggtccaacgcgatcacttctgtttccctcggaatcttcctacgcaacctgtcatcgaactcatgctcacatgttgcgtctctgtgacaagctggcgaaagcacagaaagagttgaactcgatactggcccttactcaggacggagagaggtcgagagatcaagagaaagagagaggcgtaaggcagagtggaagattgaaggtactggaggaaacaaaaatcgggtggattgaaacttgggagagattggaaaaactaagaggaatggatgcagcagaatcaggaaccaccagtttggaccatattgtgcgtctctactttcctcacatctgctaatactcacatactgtaccatttcctcgaggaatacgcatatcagaaaaagtcttgagaatctgacaaatgcttcgggctatctcttgttaaccgtatagatacttcaaaaagtactcgatcaactgactcgatttgtggactcagctaccaaatcaaaatcgcgcgctacacagtatcctacttcattggacatattcaacatacgtgatctgttcgaaccactgaaagaatggatcaccaagataaaccatcgaagagaaaggcatgttatttcttcgttcatccgattggttacaatatgaacttacacatgctgtgttattctcttgagcagagcggaacgacaagatacaaagggtggtgataatactctagagatggatcatctttccgatactctctttgtatgtagcgaatggaagagtaacatacacgttcaaaattatctcataaagagtttgactgatgtactggcttgccgttgatacgaataggaccttcatagactccacatcgaacttgctggccgctctttctcaaaaacacagtcttccgcaaaactaagttctgatatggaaccggagagaccagcagaggattttgttggtcataaccagagaaactacagactcaagtgggaagaaaagctgaggagacgattagaagacaggtataatggtgatcaggacaaggttcaagaaaagatgttagtactcgtaatctcccgaatacagccttcttcatacccggtgtcactcatcatgtcagtggcggcaatcactgacagttagaagttgtgttttgggtgtcacctctttggaatcacgctacaggaaatctgtacttcagaaggttcagcagagaacagacatagcgttcgagaaacagataaatcaaacatcaatagaagctataatgaacaacagatccatcgatgctgtcaagttgaacaacctgaagaaagtttggaaggggagagaggagaggaagttatatcttgacgcactggatgttcaatgggtaggtctcccgtttctctgaaccccacctcatttttgtattataattattttcctcctactgatcgtcggatgccatgagacagcgcaagatcacgagagatgtttactcgctattacaagtccatgagcgccttgtccaatcaatatctcaacacacacagtcggtctgtcctctcacttggccatcttgtgtctctaatatctcttttcgacgcgctctcgattagtccagcatctacttacctcttgttgtcgtttctgtcgatttgaccagatcgacaaaacatgtatcgttcgagacaatgtccttgacgcaattcgttcatcgatagttgggcttgaagtcgagcttgagaatcaagtcagtcaaacgtgtcagaaggaagacgcaacctcaggtcacccgaatgctcgtacaaagaacggtttgcaggaagaggtatttggaaagctggcagaattggtttgtctaatgccgatttgttgtcggtctttatcttccattcactgaccatactggtccttccgacaaatgctccgtcttgataatgatccaaagacattcgaaggaaaggtcttggtcatggaacgagctctgcgcgaaagagcagctctgacaaaaatgattgacgcactgggacactttcgagaagcgcttacggctgctgagaagtttgtagacaccaacacttgtgagattcttagtttctgcgccgctctcccgcgcttcctcttttcgagcccgagtcagtctttcagtttctcgacggacatagttgcttatatcgtgatctcccttataattttcttcgaaatagtgttgaatacagaaaattctcaatccatgaaatggaaatctcaactggataagcttcatgatgcgctctctcagaggtcgctagacatccaagaggcaggcaaggagttcagtgtttacaaacacgagatgtacgtccttgatgattttcactttcttgcccagtccatgtcacaacaagtcgcctggctatcgagtgttacaagttgatgagatgttcggttgtgccttctgtggtgacagggatgcgttgatgactggaaaaataggccagcgaggcaagaaactgggatagagataacggaacttcaggatctggaggcgctcagagatgtatcatttcaggcttttcaattttctggatttccacaaagcttattcgcagaccgagcgctacccagtacaagaaacagagaaagtttgaccgatcaggactgctaactacgcatttcattgagggcaagacatccatgcacctgtcggggcaagttgtattcatagacgtgatatgtaccaacgtgcgaagagacaagaaccagaagtgagagatataatgggaatataggctccatctatatttacgtacaacaatcgcgagatagaatattctaaaaagatatcccgagaagatattttgaattcctgcagatggaggacacacgagaataagggaagaagaagatgcagacggaaggtgtagcgagaaggaggaaaaagatgaaggaagaaaaagatgaaggaagaaaggcaccagacgactctattcgaccatagattccactccgttcgtatcggtcttgataccagaagctgcagcagcggcagcggcagctcgaacaggctctgtgagaattggtcggatcgttcggtcagtatacaggggaagaagagatgactaggcaaagagaacacagtggtcttatatcaacgaattgagagaacagactaaagtaaggatgttgttgagcttcttcggccgttactcgagcctgatggtcaaatctgataaaaggataacaaggatgaagatgatgaggtgtaaatctagctatgaacacagggtttataaaaaggaacaacgtatgtcaaggccgctacaccggacacatacctcaatagacaatctaggaaactaaacgcttccgggctagtatatcgctgattatcggcagtcacaaatctagatacggataaaatcgccaaaagagcatccaaagtcgtatggaattttcaatcacatgcctcgatactgacaaaaccaagcaacatgatattggaaagaaatggaacaaaccgagaccatgatttacgcgaatatcggcccagaatatcgtcaaatatcggattgagttctatgtcatatttttccagatactgtatcagttgacgaaaccaagagaatcatacggtcagttcatgaaagcagagaacatgcatgatgatagaaaatacaagagtgaacggacagtgtatagctcatcagttcccaagaccttgcatatcttgacaagctggtcatggttgtcgtgtccgtggaactattgtaccagaaaccacacaagatggtgagccgtcagatgctgcaagctctaaatagtcagtacattgctttacaagaggaagagccaggacgaacaaaaggatccttcctaaagatcatgcttgccagcatacatccaagactccacatatctctgacagtccacgaccaagaaaagattgagagcaagaaagaatgggggttggacattgaggtcaacttccattacgtcgaaacggaagtcaggtatgatatcgacgcacaaactataatcgtattcttgaaaatcgacaaggagctctggtcctttaaagcatctagacgcgactcgaacattgtactcggttccaggatgatagaactctgctaatccccagtcgatcaatctcagctgaacgtgatggccgcggtatggaaattcccagaacgaatgtattaagctacaagggttattgagagagaaaagaaggatggacgacgaacagaacgtttttcatggtcgatcatgacgttatgtggctttacatctcgatgcatgatccctttagaatggcagaagtcgagggcctgcgtacgtaggaaaaggtagatacggcatggtatgataatatggtggacagtcaacatcgatgaatcgtacgactcaggagtggatgcgacacaccttgaggagctcaaaaatgtagtatcggacatcaaagtcggtaaaagttgggtagagtgtcttgaagtcgatgttgttgatatattcgaagactatggatggtgtctttgactagagacccaggagggaaattcaaatcgatcaggtttgatgaacaaagatctgctagttggatggatgaccatgccaccaccagctggaaacatagatagtctaactcacctggacgtctcgaacaacatctagcagttcgatcacattcactcctcctcgtaaacacaacaagatttgaatctctcgtttgatctttttttttttgacaggcttcagggttttaatgacacatctttcatttgttgataagatgactccttgaaagacctgagctcaagcagacgcgagtgatagtcagagaaagatctctaggaagagccgaggttgagatgatcaggtggaacgtacttcagagtattttcctcgaccaactttccgaatgatctcatagtgatcttgattaccccaggtgacttgaagattgtctaagagtgagagacaacggccggatgaatgtcttgtcgtcactctaaagaacagagaaagcaagacgacttgaccaaccataatcccaatgttcgggtcctaactgctcgttcgcatcggcgtaaaccttggactaatcaaaaaagcagaaggcagaaagaaaaagaccaaacatcaatctggattacttctaactcaaacacaccacaagaggtagcactcacgatggatttaccgtcgggcataccttccttaagaattcaatgaagacttgatcaacgttgaacacaacggcatcaatcgctgcaggcaccgatgtcgaccagccggccggcgggctggttacgaccaattgattacgcgtcacatccggatattgctacaaacacgtgactaggacggcgttagctgacgtaattatcgatcgataaccggccccttgtccggcgttgagtaacaccttctgtttcagcttcgagtgaggtgagttgaaaaacgtgttggtactttctgatctgacaaccattctcatctttctcatccgttctatctgtagtgtcaactccgatcaaacacagtcttcatatgtcgtcctcgggtacgtcgtttaacgatggaaaggatcttcgttcctctccggagacgatctcgccagttgcagattctgggaacgatagtgacgcttcggctgagcagggtcaacctccgataagattccaggcgatcagccctcccgaatcaaagcaatatctcccaatgtacaagtctgcgctccctcccatgtttcatatgatctcccagattgcccagtccaacgatatgaaggatcagccctcgcacacatctgtctcgtctatggatttctccgacattgaatccgaagtgcaatcacctgttgcaggcggagatgatgactgggtttctccgtttatccttcataagcaaaagaatggtatgaaccacatcagcgaagcgatcggggatgatgatgatgatgatgatgaagtagaaaatcaagaagagatggttgatcagttgggtaccatgcctggccagggagatatacatcggcactccgttttcaggtcaccctctttggattcgcaggacctcgcagcacgacttgctcagctcagcgtgtccaatttcgttggttcgtctggtcctgaaacagttgacgaatattcgggagctggagagaacggttcgaacgaatcttccacgcgaatgagcgatcagaagtctacatccgaagaggatgaattgacagacgaggagaagatggatgccattgtcgacgtgtttggcgagtacgtcaaacccggagaggaaaagtttgtctccgaaaccaaagggggattcttcaggtacgtatctatcgttacacgaattacggccgagccagctcaggactaagcctccttcgtcactttttagaggggtggttattctgggaaacttctgtaagtatccctcgacggtgacgatctccaaaatacatatgatctgtataccatcagccgttctgacaagaagatggtatttgtttcatctagatttgacgacccataggttaactttcaacgccatcattccttcaccaaagttactggagaggatacaaggaagcaattcatcgagagactcggcttcgatgattatcaaagcaggcccggtaaccgtacaccggaatagcccctacaagaagaagaagaaggtctggctagagctgggacatgatacttgtagtgtttatccagtaagagatcttttgcttgctgaatgttcatccgttatctcaattctatcgtagctgagacattcagaacacgacaacgatacttatcgttccatcaactccaggacgcttccgaagaaggaagaacaagacccttctatactgtattgcgttcgtcgatcttagcctctttcgtccatgttatttcgtttatataacgtgtgcatcgttttcacagtctcatcttgcaagcagatcttgccggacgaccctgaagatccgctcagcatcagaatcgtttgtatgtccgatacatatcgacttcgttaacatctgataactaatctacggatgcgcctcaatcatttcctcaactagatacgtctcctcgtcggggcgtccttgaaacacgccggtttacttttgacactcgggaagcaaccctctcctggcgccgggaatttgaaggagcttttttccatatcgaacgtatgcggctcatacaacgcaagtcgacttcacaaaaagaggattcggaatcttctgcagagagcgctgggtttggtaagaaagaagactgggatcgaatcaagatcagtattcctcttgaacgaatcgtcaaacacgaaaccagcaactacatggcttttgcgtccttgctcatactttccgtcgataaccgaccctccgcagattatctctcagattcaacatcgccttcgtctattcctaccgctggacgcgaatctctagtcaaaatccagtttacctgtcttgcttctcatatgttcttcatcgaagcgttccagaactcgttggagctcgctcaacagagaacggatgcccagggaaagattagcgcccgtccaatgttggatttcagtggttcgtcgaagcatttcatgaaaaaatcgatcggcctatcagagtcagatgaggacaaagaagaagacgaggacgaggaagatgaggatgaatcgatcgatcgagaggcaggcgagaaactttcgaaattgagagcaatctttgggttaagcaagtctgagccaatgtggggtaaggcactttcttcgttctctcgagcttggtatcctctactctcgtctctggtttgctgattatgtatcaccgttggcactaattacctgtggccgcaatttattcagctactcgttgtgggttgtccaaaggcctgttagtcctttacggtcaactcttcgtcagctctcgatacataggattttatcgcaagaaattagccaatacaacgatggtacgctttgacagtatcttttcctcaatgcctcctgagaatccatttgctgatcaagaaatcctacccattcgatcaaatcagcaccgatttcctattcaggacgtgagaggcgctatctcatcgtctaacttccacatcgccatgaaagaatttactttacagatagtcggacattccgacatgcacttcaactttacgactaaagttttacgagatgaggtgagcgtatatatctatagcatacgatcgagccaacgaaatgtttatgagtctcatcatcttttttacgaccgaaggcaattggaagaatcaactcggcaattgaacaaaagagcaagaacacccccacaagtactcctcgaccgctcgaaaatgctctcgatccgaacgaggacgacattgtttctcaagcatctaaaacgtctgaatcctgcaatgaatacatgcgctctgttcgagaagagcataatcaatcaggcaagcagatcgacccgcatcgatcaaagactttagattccatgtgggcgccagttgtcatcccagaaggctcgatgcatagtttgaccgataagcaatacaagtgagtgaatgtcctcatatttctttctctcgaatcattttcccaaattttctactgatgttgacgcgcaagcttctttctctatcgactcaaagttaccgagcaaaaattgtcaatacacccttcataggttcagaaagtcgaagaagcgtggatgcccgacattttatcatgctgacgattgggagccggggagatattcaaccttgtatgtattctattgatctgataaacgttatcgaaaccagacgtgtgctctattcgctctattggctgacacgcctgaatcgatttttagacattgccttgtcccttggtgtacgttcaagtctactcttatctatgttatcatctacacctcactagctttcgctcaatgtgtgatatcgtctttcacagttaatgaaacatggacatcggtgcacaatcgtgacgcatgatgaatttaaggagtggatcgagtcgtacaagattggatatcggcaagcaggaggtgatccagctgcgttgatgaagctctcggtgggacacaaggtaatatattgcgcctgaataccattctttcaatgcttcttctatgacttgataaactgaacctttctcaatttgatccgatagatgttttcccctggctggttcaaagaaagtttgggatcttaccgagaatggtttgatgacctcatgcacgacgcttgggttgcttgcgaagatgcggatgtcttgatgtgagtaaacatcagacttggccgtttccgtcaccctcctactgcatgacggctgaccacactcaacaaacactcgtctgatagcgagtcgccatcagctatggtcgggattcatattgctgaggcgctcaagattccttacttccgtaagtaacatagctagcctatgatgaatcaacgttccgatcgttattctaccaaggctcagtacccagtgtttctcttgactctgaaggtgctttcactatgccttggacgaggtatgtgaacaagatcgtcatattcatcagggcagtatatttgagtaccatgtcacttatacaaactgaaaccatcctttcaacacagaactcatgatgttccccacgccttcatgacacctgcagtatgtactttatctgccctcaagatgaccgataggcttatgcatccttcatgaaataactctggtttgtttcttcataggtcgagctcacaccgaatctaaactacgcggtttgttcccatctttcttgtctcattccagcttatgaagtctcgcaattgcttaaactctaccatcttcatgccacattgatacatatacagacttatgttctttttgacaacatcatatggaaagcaaccgctagtccggtcaacaggtggcgaaagaaagagctgggcctcaggtcgactgtaagtttttcctctgatatgcttgccgtaacttgaatattttgtctgaattaatagaactccaatactaccatttgaagaacatggaactgcttgagcaacgaaacgtacctttcatatataatttcaggtacgagactgagttgaatctcgcttttcctatcatgcgcgctaacgagtttttggtgtgctattcggtgcatcgtttctatatcattagttcggctgttttgcctcatccaatcgactggaaggtcagtctatctgaaattttatata

SEQ ID NO: 1003 - DNA, 15801 bp, Xanthophyllomyces dendrorhous
attttatatatatattttttcgtaacatgctgaacgttgaatcagtaattttgatatcaaaaggacaacatgtgagttgcttggtattccaatccatttttggtatagcttttatctgtcgaaaccgtctggtctaagtaaacgtcattctggtttacgtacagcatgatctctggatactggttcttggccaacagtgatgccgaatggaccgctccagattcacttattgcgttcatggagcaggccagagaggatggaaagccgatcgtatacatcggagtaagctttctgcatctgtttcatttatttctagcctcatctacgttctgttgagacgaaaccttgctctgtttattccatcagtttggaagcatcgttgtgcccaatccagtcgagatgactaagaacatcattcgagcagtcgagaaatcggacgtccgggcaatcgttgccaaaggatggtctagtcggggtcatgagcttgggggtgagaaggcgcctgtggatgttcccttcccagatagctgttatccggtctgtcgtccatcttgttcagttactctaatggcaatcttttttttaaatgtttgctcaccagatcgtttgttcaattcatgtcaaattcaaacgacgtcgtcttgacagatcgacaaaatccctcatgattggctattccccaaaatcgatgcctgtgttcaccatggaggcgcaggaacaacaggaggtatggtttttcttcatgactgatatgttctacctatgcatccaaatgaaatacactctgacgctctttgtggttgatccctcctccctgtgtaccactcacagcgagtcttcgatggggtcggccaacaatcatcaagccttggttcggagatcagttctgttgggcttctcaagtaacaaaactcaatgtaggctctatctttttatgcactggtctgttcctgacgtaaagtcccatactgatgacatctctatcatattcaggtgggagcccgagtaaccaccctttccggctcagacttaaccaacgcactcatcaaagtcacccgagacgaggccgttatcgaagcagctggcaagattggcgaacggatccgagcggagaatggagtggcaaccgctatcgagtatctatactcttacttggatcgagctcgtatgtccctttcaccttgttgtttttcgttgttgtttttttctttgagagttttgttttcttctctgtagcatgattgaacgaccatctgtgatctgctaatcattttcttcacgcccgtttgtaattttgctcgcacaggcgaccgacacgtctcttacaagcctgaagcaactcgaactcttcctggcccaaagcttactttcccattcagctttagttcttgaaatccttttcttttcattctcaattgtaacatcatttcggtttttagtatcggctatgcctccttccttttgtagttacatggctcagttagtctccttctggttgagtcggctagaaggtgcagcaggtcgtttgcgatgatatttgaatttatcgtttcatcttacgttgtttccgaattacttctgtaacaaagaaatagtgacattcatgataaacaaaatgatagaagtacacagtgggcatgaagcgcagacagtaaatgaaagaaaacgtgatcagtaattaaggataagagtggtaacaagaattatagaattaaagggtcaagctaagacccgactttgaattaatgttgattagtgaatatcagttcaagaaactttggtagatacaaagtcgtgtcaatatacagacaaagaagcaagacctgtgccaatctcttcggtcagaaggatgaatctttacttggatgatccggttccaatcccgttcaccagaacattcagccagccgctcttcttctcagtcgtcccactggctccctgctcctcctccttcggatctcttgaccttgtctttccgagacttaacctcctcatcaacgggtttgaagttggagctgggtgagagcctaccggaggaagcttgtattggtgcgggaacctatcttctgagattctagaagaaccagacccttgagtctggacaggaccttgactggttgtggtagtcgtagtggttgtagtcatagagtccgcagacatcatgtgtggggagatcaagtgtatgatcgtctgctgaagagtctgggcctcgctgataaagatcaaagtgtcaaaagaaggtaagagaggaccaagtgcgtagacgtcagatgagaccaactcttggtgatgacgacaagaaagggacacgtacggatctccactaaacaactcgccaaattcccactcaattctcacacggccatcataagactctcctcccatgacatgggattggtttcccgctgggacgtccaagattactgttgctggagctcggccagagctacgtcccttagcgttctttgattgaacgaacgaaactgacgatgagttaggtatggcggacagaggtacttggaagtaagtcagtggctggttctattgacgataacgaaaggagagcagataacatgatctaatcagtcaaagagcggaaaattgtaacggattgaccaaaaagacgaacaccgatgctcaatggccattcatttgtagatcctgtgaccaggggaccgcccattgatttgctccgtgagttcctgagggctgtcgattcatccggagcaagatccctatcatcaaatgtctcttcgtctgtcggtcccacagtctgattggtctgttcagatttctgcccagagcccatcatgaagttcgcaaatgacaagggaggagctcctgcccgtccttcagatctagcgttattgtcaaacaaaggtggtgactcggtctgccctccttcctgatggagacgggtagctgacttagcgtccttgttgccaaatgatttgagtctcagctttcgaagtccagtaacaggatcagtttcttcctccaaagcaagattgtcagaagtagcgcctggaggagactgagcagagccactagaagaaccgaaggagaaagaaaatcgcttcttattcatctgcggaggtgacgcaggaggagaggcaggctgggcgattgaggtggcaggttgattagagacgggtcgacgataagctgcaggagtagttaaattgaattggatgagtttctgacaagggtttccccgttcgtggtttcattcagccaaaaagagttgagttcttgtgtcatctcgataagctgaatgataggaggaacccgaaatgtgtaccaaccgatgtgactagaacattgccattcatcacatactcccataacgctccagagctctctgcttcgccaccaaagctctttcttcgggctccctgggtctgctgagggccgctagggagggagagtttgcaaacaatgggttgagttttgtacggcctgaacccagtgggctcggctggttcaggaagtgaagcagaatgcccaggaggagaatgaggaggcgtcgatgcgctaatgtgagtagcttcgatttgtgaagtcaacgaagtaggtggggttgtaaaaaagtaaatcattgtatcagagcgactatctcggtggtcagtggtgtcaagaagtgtgtgaatatgtgaatgtgagtatttatgtattgggtggaggggaccagaatggtgcgacagagagtggagatgggaaaagatgaggaagaagagaggagaggaaatgaaagagaagccggtgggcttatatgaagatgctgatcggtcctgtcactcaaggaacaaacctatcaggtcatcaggtacggacatcaacgctaaaaaaaaatcaggaacctgaacgggccaggcacagatcagcatcacacatctcctctccatcgcatcatacgtcatggagacgaccgagtccacgagccaagacacaaacagagctgccggtatccctgtgtctctgggtgtattcctcccacactgctgacgaccactcggaaaccagggcgcaatgcaggacaaagagagatgcatgaaaacaggaggaggtttgtttcgagtggccctcaagcacattcacccttgttgccactgttttcaagcacagccgggtagacccaagcgttgaaattcttgactattcctctggaggcgtcaagaatagctagattaactatcacataagatcccatctacactgcgcaagtcttggattaaaatgaaaagatggagactggtccaactcagcgcgcttggtgttctatgagatcgatccactttcttctccccaccgttgggatctcaatttgatacatacaaaccggcctatacatacctaatcgacttctccgctctcatcccaggatggtttttatcaggctatgcacatcgtgtagtggttatgtctacgacaaaaactcttttctagatattatttgactatctacgcgagtcaaaatgcagagtcacgagatttgcctgacttatccctacttagagtttgtgtgtctgttttcagatggagtcgggtctaaacctgcttgaaagacggcattaaagaaatcttgggcgtctcagtttgatctcaacttgcgttatgtaatcgtatataccgtcgtaacacccgcacgtagctaccgtaaccattacaccatttctttctctttatcgtcttaacctttctctctcttccttactcgtacacacacttttttttcatcagcccatcatcatgtcgtcctctgcaccaggtcagctcggatcttttttcatcgctcagctattcggaaatctttggctgattttctttttcttttgtgtctggttgtgtctggcaaaatttgatagttactgtcggagtcattggaggctctggtttgtaccagctcgataaccttaccttcgtgtaggtgcttcagttagatttttcttgctttccgttgtagccttctgagatacaatctcaacgataccttgttcttgatacaatcttttccagtcgagagatcaacgtcgaaaccgttcgttttctgaacccttcacttctgtattcgaccaaaatgcgcaatatccagctcatttgtttgtaatcgaacgattaaacacgtcttcatattcagccctggggatctccttcttcgcctatctcagtcttttctctgccctctgatccctcgaaccctgggcagcctggatcagagatcgctttcatctcccgccacggcaaggctcataatatcactcctactgaggtgccctccagggccaacatgtgagctcaatattgtctatatatttttagccaatctactctctgctgatcaatcaatgtaccggacggaaacagtgcggctttgaagagcattggtgtccaggctattgttgccttttccgctgttggatctcttagagaagaaattgcgcctggtctgtgttgctctgacaattcttttattttcttaatcatgtacactgattccggttgttgttgatctcacaggagacttcatcatcccttctcagatcatcgaccgaactaaagggatccgaccgtccacctttttcactggccttggcgtcgtcgttcatgttcgtcctctgtatcggcatcactctcatgtttttgctcatacaccagctgactgggtcattggcaacccatatatgttgaatcatattcataggccatgtttggagatcccttcgacaaccagcttgtcaagcacattactcctctcgttaaatctgtcctttccaccgcatccgagtccggaggcgaagtcaaggtccacgaggacaagaccgtcgttgtaatggaaggccctcaattctccaccagagccgagagtctcatgttcgtcctactcattgcatgctttcatctctatcttgcacaatcaaatattgtgcttacttctattctttctcatgctgtccgttctttctctcgtatccaccaggtatcgacagtggggtggagatatcatcaacatgtcttccattccagaggccaaactcgcccgagaggccgagatcccttacgcacttatttgcacctctactgattacgatgcttggcgagccggagaagccccggtgactgtggaagaggtcattaagaccctacacaccaacgcccacctgtccaagaaggttgcagaagtcatccttcccgaggtcgtcaaagccgtccaggccggtgacgtcctgacggagacaaagggttgcatgaagttcagctgtatcaccaggaaggatggttggtctcaggaggccaaagaaaagttgagctgggtattggattacttcaaggaggagtagacgaagcagtagatgatagaacaatctcaaataagaatgaacgaaatagaacattgcattgtccggttgttttttttttagaaaaaaaaacttgatcgaacgagcgttctggattaggtagtatttattggatacatggcttgtagacaaaacaagtggcgagttggaatgcacacgtcgctcgaggcgtgactctatggatgataaggaggcacaggttacagaaagaaatatcgtggcagccccggaatacaaagaagaattcaaaatatttcaaagacgtatgaaagggatatcgctcatgggtggtcactccagaatggtagtatgggcacaaacgccagtttcattctgacaagatcgatctctttatgtcgactgcagaaagagattcatttggggattaccggggagataggtgatgcagtatcgtaagtatctcatacgagatacaggtgagcggaggaatcttaggagatgggcatcttttagagacttgatcgtcgaggtctctcccttgcttgcaaaggaaccccactagaaggaaagtactttgatggagaggagtgtttagtgctggattgttagcttgatggatgttttaacgcaacggatgtaggctttgagaagaactaacctcaaaagtctcctccaaaggtgtcactaacaggctgttctttcgaccgctttgcttttcaacccagacttctctcagtggaggcatcggccaaacggccgcatcaaactctagaggatcttcctcttcattcagtccctctccgtcactagatagcttccaatgtggtatatggtaagagtcggacgctggttccgagcgctgtcttgggataaacctctcctttctttcgccgactgtttcgctcgttggtgcgtcgtggtacaatccaaacatcccttccgtcaaactagatcgaatagtggccagaggcgagatgctggtgtattcataatagtcatcattcagaatagagatacctagtcctcgggctgccagatcaagaggaacgaagggggtaagagtatcatcaacatctggaacagaatgattgatcttgtgctctttggatattgatgcgcccgtaaccgctgaagaaacgagggatgtaaaggacgcctgctctggtgagttaaccaggccttcaaataggacatctttctttccaggtccggatgacatgattgaagaagacgttgttgttaacggagattcgaggcattcagaactgtcgctcgagaccgaccacgaaagagaacctggcggagactgcatggggtccaacggcgacggctgacagtccgaattcacgtctgggtcttgatttgagtcttggtttgaattgagagcacggcgggtagagccaaaggaggctgggatacgagacgtacctgccatagacgtcagattcggaagcacacaacgtctagcagaaggtagccagagaaaaaagtcgaaatctatcatggatgatgtatcagaagcttggtcggctgatgtagaatattttaacagccccaaagagggaaacgggaggagaagatcatcaggaactgattagcactcttctctcgaattcctagacgaagagggcgacgttgttatgaaattacttgcaatcatcatccttgacatcatccttctgggtgtcttcctttccagacgagggccagagctccgctccattaaccccctcagaaggagaccactcgagcttcttggcttgaccaaaacgaatttcagcttccagttcatcactaaacaaagacgaactcggcgacgttgacgccaaactttgtctctcgttatgtgtcggttcttcgtttggagtgaagagtattgactttaataaagaagattgtgaaggttgagtaattgatgaatgttcgggcgcagtcgcatgctgggggcccacaaaggtggtccgtggactgatcggttcatccatcggaacatcaacagcagacggaccaggagatgtcgcgttcggcgggggaaacgagaaggtggagaacgtctcgttcagtgcggtcgagatgactaaagaactctgagcattccgcccggaatttactctagaaattccatcacagttagcctccctcttaattgttgattgagcctggtcgggttggatgatttgctcgtccgtttcaaatgtacccattgtcggtcgaccgaggggcataaacaaatcgggtgtagacgggacggaggggatggtttcatccgacgccgtgctcaccctcgacgcagactccccttctaatctgttcttcgaactttgacctccttttttgagcccaaagctgatactacgttttctgaaaaacttccgtaacccatccagcggctcttcctttctgggcgcctgattggtggccgagggagcagacacaatggtgcttgaatctggtacgggaggtaaaggaggagaaagagaagggatgttcgggtcgactttggacagcggcaatgagaagtttctcggtttagattggtatagaatttgattgggtatctttgttggaaaagtgctgaacgaaggactctgtcgattatcaacaaggaccaacttatgttgtcagcaacacttaatcaggaacgagcaagccatgaaacagacatgtagaaaggaaatacccagaccatctcagtagtgcatctgaccaccttccggtcgtcttgatagctcaacctactgagatcgtattcttgggtatatgatttatgtagggacaagaaatggtgaatgttttgagttttcaccgccctactcactgtaggtttatccatcgacttcactgggagattaagcattattggtgtcgtcgaccaaacttcatttggtatctcggtgtttgttgaagaagccgaagacgtcggaggacaaaggacggatgccatgccgtctttggtcggtcaccttaggggaaagcagaggtatacacaaggatgaggatttggacagagggtaatgacgtccagcatatcaactgatacacgtcgagttgcttccctcttactggtttgttgttcctgaacacaaacaaagggtcgaatgttggggcgaagggcctgaaaactacgtcaatatctgtcagaaacatactgctcgtgctcgctatcaaattgtatcccaagaacttgaaatcttcagcagtcaattgcccgggtcaacatctggaacgacctcgctcaatacaatggaagagtttcgaatacagcggcatatccgagcatgacgtcatcacaagtaatgatacagcctagaatacatgtgctcaaactaggtaaagcacagaatctaaaagagatcgatagcaaaggagaccaacgtcaatcttggcattcaacctgttcaaaccaggcttgcctcgagatgcaatgacagcgtaaggaagaagaaaacgaacaattcatcatacccgtcgtctgtcaaccatccctctgctcaacatatcaataacccaagctttaagcctgcccagatcgagagcccttctgagcctatgacgagcgtgttcagttggctgattcagatttcctccatctggtcgtacttccaatatcgccgtctctgccctggcaagaaggtacattgagaagaaagacagtgttttgtagaggctcagaaatgttcttaattcgtgccgagaagaggaataacaattaattagacatgcagtgagccaattgagagaaacaaaattgaaggtgagggagcacaaacctgacactgcccacggtgacaaatccgacaatgagaaatgccccgattcttggtgtgttttcgacagtccggattcgtcttcgtccagtagcaatgccggggaagatgttgaacatggagagcatggggaggaggctcatggaaaacataagcgagagaaagctaactgagccaaccaaggagaggccgaggagaaacctattgactagactggtcagtgccgagatgggaccggaggacgaagggagatgcctgaattccggacgaatgggatctgcggtagcggcctgcgcaccaaaaaacgacagtacagactctttccaatttgcttttggcgcgctcggctgctgttgaagacctccgggaagatgatgaccggaccgatcaaacaaattccagataaacctcaatacgtcttcaagctctcctctagcaaagacgcctattgcgtctttaatgatctcgaacgcggtagatgtgggggtgaatcgaatggtgtcaatcggttcacaaagaaggatggaagcgaccgactggtcagcagatcgggcgttcagtggcttagatagtaagaacagtgttaacatgtggcccgtcacagtggtcagtgtcaaaaacaaagctgttgtcgttgtcaatagagcaactgtgtaggaaggttggaagcacgaaagaactcagtcagtgtatcctaatctgctggttccgcgtttgaggtcagaattcgatacctttgttggtggccaagccagagattcgagttcgggcgaaatgatagtcgaagccgcattgaggacaagacctgataggagaagaacgacatcgaccgaacaagcaaatacacacgtcaacccggaaagaacgagacaggtaggaaagaggtatcaatagacagatcaggagtgggcgactgaagtgtggaaggtctagaattctgaccagaaagccacatcactagcggaggatgttctccaactgtttaaacaagacactgccggaacacgaatcccgttggtgccagtgtcaatgttccgttagaggtcagcaacataagaagagaataaaggaaggcaggattcactgaccgtgtacatgctgtaatgaacgaagtcatgtttgtctcattagcacagtttgtatcaagacaggcgagcagcagttcagaacaagtaagcgattgcccccactaaccctcatactaccattgcagacgcaaggacttatcaaccgtccaagctcttcttcgtcttcgattcctccgaaacatattcgacactgtttctctataaaattgccggactcaaaacgacggtcgtcgctgttttcgatcgtctcattcctctcgccatcgggattttcgaccggattagcctttggcggaaacaagagtgaggcgtcgacgtcgtccagatcaaccccgttatcttctggatcttcatgttcaagcatattccatgacatttgttgtgtgtaatttctctgttgacttgactgttaggcgactgagatgagcctcgcgtcagtacgtgagggaaagggaggatgtatggatatgtgatggtgcgagtagggggacgcgggtgttacactgttctactcagtagctacgaatcctgatcggtgttactcgtccaccaaggtcgagctcggccccaatgatgacgatcaatcttattcacaactcggtgttttcttgttccgaccgaccgaccgaccgaccgtccgtctgatagtcgaggatgtatttaattcgggccaagctattgacatagcttaaagaagaaaacgcctgtgaccacctttcctactcgttagggactcacatcctgtcttttgatttccaccttctgctctcatgacgcgcacgtgctgatcttacattgctgatgtccctccggtggtccactgcgctgaccttctattcttacaacctttcatctggaactcgaatgtatacatctacgccgcctggactcactcctttcttggtagcctttttgaattgaaacaacatttgtttccatgtgttggaactgaatgctaataatcgattcagcttttgggatcaacccgctcacctgttcaacccctaagaaagtttttcatataataaggacacccatttaagagcatacccatcgggtatctctcttcttcttcttcttcttcttcttcttcttctcgtttcctctgcccttctctcttcgacactcactttaccagctgctcttcagacaaaaaaaaccttgaatcctctcttctcgcatcctaaaaaggaattaaacatggtctttgctcccctcattggtgccgctgcgatcgcttttgccggtctctctgctaacgcccttgtgagataccttcttcttcccatctcatatgctttgctgcttactttgctgagttttaacatttcttctctccttctttactttctcggcctccttcgcagcctctcagcctcaactgcacccagtccctcgcactcgccatctcggccgacccagagtcgacctgcttcgccacgcctgcgctcgaggtcttcttgccgacactgatcggctcgacgaacacctcgatcgccgccccgctggcgacctacctcgaggccgtctgcccggcgcccttgtgtacggatgagcagatcgagcagacgtttgctactatcggcgctggctgctctgacctgttcgctgagcttggcgtcagccccaccgtcgtcagtctgcccattcgttggcctgcttctgttttgtgtgtctctttgtctggcttctgaacgcttctcggtctgctctgcgatatagcttggtgggatcgtccctctgctgcctacagtcaaggagtacgtctgcctagaggccacctacgatgacccctccgatgatacgcccccagagttctgtgttgtcgatatcatcaactcgaccgagactctcatcggcgcgaacttgactgtggacctcgtcttggtaagttatttcgcttcgactgtataaattcgacctactccttccgtcacgtctttcggtctctaattcgttctcttgacaaatcaaatcagggtctcgtcatcaacaatggctctatcgccgacatcatccccaacaggactaccgccgagcttcaggcgcttgctcctcaagtctgcactgactgcctcaagacctactactttgccgctgtgaactcggccgaggagactgatttcgaggccaccgacggcaacaccactatcggatatctcttcactgaggctactatgttcctctccgaaatctgtggacctgatttcttcggtcagtttgtcatacgcacaagtcttaatctacctcagagacgcttcaagctgacacaaacagatttctttactcctctcttttttcgatgtttctcttacatacagacgctaacatccctgtcttggtttacaacggaaccacttacaacaccatttttgactaaattcgtttgcctcaaacagtggtttgctcattcgttttctttttcgtcttagttttcctcccgatatttcttccggacccttttcttaggttgttttactcttcatcttgtacactctgtttttaatcttgctgtcttcatatttaggaacaaagtccgatatacatccatcctattaatctcgttatttctctgaaactcgtaatctatggacttcatacgtgtgcagacggatagacaaaccccaaactcttggtgtcaaagttaaagatcaaaacgaacgggatgagcatgataataaatctcaaagcatgaattatttaaacgtgataaccctaacatgccccatgccgccaggtattcaaatggacccgggactttgccgtgcatgccaatgacgttgttaaattcttcgtctttcaatcctttccaaccgtcttcttagccagactgactaaactgactgtctgcctgtcggccaaaggtcatcaacgatgtccgtctgacgcgccggtagtgacatcacctcgccctagctttgctctgctctgttacgtcttggagtttgtggcgattcgtacatctttcttactttctatctctgacgttcgttacgcgctcaccgctcatagcctcatacgtactggcttggatcttatgaagagtttcctataaagagcatacatactgactacttatcaagctgagcgtgaccacctcctcttcttcctcctcttcttcccctcaccttcctcctcttcttcctcttctccggcttctgttaccattgccatcctcatccttctcaaaatcgaatcgatttcctcacaatcaaatcagacatgttctatgctcctctcttcggattggctgcgattagtttttcctgtttctctgccgacgcccttgtgagtatttttatttgctcctctatagatacacacatgtattttctactgccttttctatctatcgctcgtcagcatatgtttcctgtttgatagtctcacaattttccttctctcctttccttctccttcgcagcctctcagcctcaactgcacccagtccctcgcactcgccatctcggccgacccagagtcgacctgcttcgccacgcctgcgctcgaggtcttcttgccgacactgatcggctcgacgaacacctcgatcgccgccccgctggcgacctacctcgaggccgtctgcccggcgcccttgtgtacggatgagcagatcgagcagacgtttgctactatcggcgctggctgctctgacctgttcgctgagcttggcgtcagccccaccgtcgtcagtctgcccattcgttggcctgcttctgttttgtgtgtctctttgtctggcttctgaacgcttctcggtctgctctgcgatatagcttggtgggatcgtccctctgctgcctacagtcaaggagtacgtctgcctagaggctaattccaacagcgcacctccggaatattgcgtcgtcgatgtcaccgatgcaatccaaactttcgtgggtcagaatataaccgttgatctagtgtcggtaagtacagcactttatatcctggctttgacctttctctaaataccttctctatctgtgtgtgtgcctccactataaattttcatctttctaactcttttgatatgaaacatatcaacagtctctcgtttctggaaacgtcactctcgccggtattctccctgagagaaacaagaccgaactcgagcaaataagtccgctcgtctgcaccgactgcttcagagcgtacattgatgctattacagtcgcggtaaacgacacggaattcatcgaagacaacctcaactcaacggtaggagttctctttgcccaggctactgtgctcatattggaactttgcggattcgaattcttcagtcagtcattttgagcatctacataaaaccttttgaaaacttaaattggccgagagcgttctgacctgtttggtcctgattttttgttttgttttgttttgtttttgcattttagacgtttccgccccggtgaatgtttacaatggaacgaacattacgcttgttgtttgaaagcacgaatacaaggactggactgttggttttactgcttcgaatgattgggactatgaatcctttgttggatgaactttcccccttactctatgccaatatatcgtatttagtgtgattatcgaaaactatcttaattttcaattcataattatatctaatatctgttc

SEQ ID NO: 1004 - DNA, 43892 bp, Xanthophyllomyces dendrorhous
tctaatatctgttcggtctatctctaggatctgtacatatctgatcgattttttgtccgagtgcaagccaaagtcaacttactacagctatggaatttatcaaaacgatggtggaagagaagatacgagtgacacgtgacaggcggtgatttcgcctcagatcatcgagttctcgtcctgtacagaatcatccctttgtccacctcgaacctccatacaactccagtttctgtcttcactcttcgctcattcaactagatagatcttgaagtatatctgtcatgtccgacgctcgactcaggagaatcactaaggagatctcaggtacgtcttgctctttctcttttttcccattctcggttagatcctttcgggccgatcaagccagagttccgtccataaagcttggaacgtcttgatctcttttgcaggatatcgagcttgttgtttacctctcagaaatattgcttcttctgttgtaatacacgattatttggactcttagaactccaaaaagacaagaccctgcagattactgtgacaagtacgtgtcgtctgagcaggcctggcggatcgcagtcaattatactcacgtcgaccttgtcttttggtttctcttacctctctagtgattggtttgtagattctccactcgatccgaatataaatgttttcttatatatctgttcctggttaaacctaattaacgacccacgcatattgatgatcggctttgttcgcattgaataacgatgatagacgagtctccatttcatttgctcggaacatttatcggtccggtaagcatccgccttggtcatgacgttgtgtggtgtgcaccagtaaagatacagtcagaagctgagtttctgatgaattttcttttgagaatatttccagccggatacaccgtatgagggaggtcaatatgaagtagtaagttgctttgtcttgccactctctagatatgagaggagatggttgatgtcgatcttggcttttctttttttcttttttcggctcgcgcacttgttatattttgtttaggacatcattattcccgaccaggtaggcttttgagctgattcatatcgtgattcatgtatgatgctgaagataatgggctttctggctataatatagtaccctttcttgcctgtaaagatgaagtttattacgtgagtgcctgaatatttgatcgcatgaagcttgaacgaacaagataagcctgaacatatctctgtccgaaatctgctgttttcaagacggttataccgtatgtctggttttagccgaaaagtttcgagacgtagtagactatggaagactaacaaagacgatggtggctttagacccgaatgtgtcatctcagtcggtacgcctatcgttgtcaacaaagaaattcccaaggtttaatgaattcatactgagagctcgatccttattccttgcccactttctgtggagaagggagctatatgtctgtcctcccatgattatctgtagtcaaagtagaaaacggactgactggctttgtaaccgtttacgatcgatcaggccttgatatcctaaaaggtttgtctagcgattctccgacctaggcggggctatctgaatcccgagacttgagcgccttttgaccactccatctatttcagaccaatggacgcctgttcttaccctcaagtcgacacttatctccctgcaatctctactgtgcagtcctgaaccgaacgacccacaagacgctgaaggtacattcaagtctctttctctatcatccgcgatgattgagcagttttcaatattgacttcggctctcgttttgacccaacagtggccaagcattatctaacatctaggttcgtgtcaacacataaactcttgcaaacgttcagcctgatggcaagttaaattatagatcaaggatgttcatcgcttcttgcttgtctaccaattcgacagggagtctttcaactcgaccgctcgctattgggcgcaagcatacgccggtgcgcctggtggaaactcttccaagaagactgggcccgacacggatgggattgccctggcagggctagcaatggaggatgtggctaaattcgaagtggtcagtactatggccataattgatctacagtcgtccacatgaagataacgaaataccttttaccttgtagatcggtttcccgagagataggattgtgagtgggactcgtaactgaccaagggactgaaaatgtgtgtgtttgttggctcatcacactctatactctcctatcgtcggtctgtcacccaggttgattgcctccgacgactaaattatcgagggtgagcggttttctcgttgtcttgaatatctttagaaaccgcaggctcatacaaaagctgtgttggttggctgtgtcttctcctctgcccaattagaaataacgtcaagaatatctctgatgaccgagtggtggaggagctgctcaaatagaggttcaaacagagaatcgttcagctgctttcgtttctttcctatttttgatgtatagactatcagattgaatggaatatacccccttggttgaatgaagaggagaaccttcacgggcacagttggtcgagggatgttcattaaactgggcaactgacgatgtgccggcgggcccggcctcggcggcggcggcggcggggctggtacagttaaatgagatcagggtccgggaacgactgcggttcggcgatgaccgatcggtcgggcttcggtcgccgcgtctcgctcgcctgctctattctgttcgagtcatatctcttccttggtcgtatgccacttcgatgatgattgataggtttgatggacaggatgtgtgtacgtgtatgtgtttgagtatgcgtgtatgtgaatgtatgctggatgggtaacgttagacatgctgacagaagatgctcttagtggccgaacgaaggtgcatggcttcagcaacacatctgcctacaggatattgattaaattatctccggcagttatcccgggcactggtgagcggagccgagccggggttctgatattttagcatgttcagtgaaattgctttataagaatacgccttctctcgttatcatctccttcgtctttctgttttacttaaaagaagcatactctcttagcatatcttgtcttcctctcccttcaaccatcaatccttatccctgatcttccccttggtcgcctaaaatgtccacctctgtttccattccagcccacctggtgtcatcgccctggctggtgttttcgacgtacccaacggagacagaagcgattgactacttcagcttcaacccacatcctcagtggcgctcgtccgaaccttctgatgatgaggaagatgaagaggacgaggacgacgtcgaaaaccactctgggtacgactctccggacgacgctcggttcgaaatctatgaacaagacaaatttaaccagtgcaagaagcctcaaggacttcggctgaaacctgcgagcgacgaagtatggtctgaagaagatgatgacgatgaggaaggtgaagatcactggtccgacgacggatcctcattcgctggcacgtctgatcgaacgttggtcgactttgagtttgatgaatccccacctaccacgcccggaggagattggacatatgccgcgtccaccgaggcggcaccactgccttccgtgtgcagccccctgtcagagtacactccgttcgcccgctcggccatcacatcggatggtggcactcggtcaaactcgccaatgtctttgtcctcgtccttttcatgctcaaccggtgtatcccatacgttcccacttacacccattcaggaaactccctccgttcatgctcgggttacatcctcttcgtattcgtcccactcgcgggaattcaccatggtacttcctccactcaagaagagattctcgctgtcctcttcatctgacatgaaggtcagaccgatgcgcacctcgtttatcagaccagacgtcggtgatattcccgtgcataaggcacaagggaggaaggaatccgttcacgtcgatacacccttcccctctttctagaaagattgtctcatttggtctttgctcttcacctcctggatccaatcctcataaatatcagaaccaaacaccaccactcgaatcttgatattgcgagataactatatcgcacgtgctctgattgtacagagcggaggaataaagattgcgaaaggtatgcagaggttgcgttaagatttcaacaaatgtttctcgtatgggtgttgaaggctgaccaagttctcatgtgtacatgtcctgggctgttttcttccaatctaggcttccacttcttttttctccttcatcggattaataatcgggatgattaatccgacctcttgaacgtgcggggaaaatatcttttttccgatctccccaatgacgttcaaacactcaagactcatatcaagatcgccgatgcttggcatcttatccgttggcgatgtcattatctcaccaagagctttcatgtatactttgattctttctctatggcccttctcttaacgcaccggttcacattcccagatcacttttttttgcctgaaagagttatcatactccccacccttttctgtagctttttttcttgtcttttgtcttatctttttaggtacaaaggttccatcattatcatatcagaaaaaaacaagaagaaagataaaagattcattaagccaaccaacaaggtcaaagttcggaaaaaatctattagtacagcacaacatgatttacgtaaacccccaattatgaacacgaaaacgccctgaaatctgatcctagatatatgaacatgaagccgactagtctttactctccgttaaaccccgagatcctgaagttggcgacgattaaggctgtggctagacggctgagagtgttccggttgatcggcaagcatgctattcggccagatgaactctgttgaatttctcctctgatcggatcgatcgtcagatataggaggtgatggcggatgtggcgagcagaacgctaacatctgctgctggctgctcgagaacggaggtagaaacgatatggggggaaattgaaatggcgtcgtcggcggtgtagctggtgacggcgagatacgaagagaaggcacaggggaagacgtagatgacaacggacagaccgaccgaacgaagaatgggctctccgggctattcagcagcggcgaagtcaacaaggatggaggaattggggtgtatagcgagcttctaggcagatggtgaagtaacacaggacgtggatgacccgttttatgtgatggtcgacggtctgcgtcaacaaagtgaagcaagaggtgaagatgagtgagaacattgatcaagaaaaacaattcagatggacaggataaacatacgaatgctcttcccagaaggtgttgttgttggtgtgcccttccctacgtgttcatccgggctgacacctgacgaaaccagagacgacttcgacccaatcttgagtgccccacaatctatactcgctctacgtggttgtctcggcttcggatgagagatacgtgaatcacgctggtagtgaaaatgactaggccggttgttctggttcctatccgagcggctctcttcagggctgaccatatgctgggtcattgcttcgagtgaaggcataggcgtgtcgagttcggtcatgttccatataccagcgagcgaagcagagtcaggagagatcctgggctaggtatactgaagaagcacctttggtagtctatcttgaacggacgttatgtatggaaagcgaatgcatccaaggaagaaagagaccggcagcataagacccatgtttatagaactggcgaagaaaaaacgggatggttcacactcttctggttcgatggaagtagaagagacggttgttgagatcgtgatgacgagggccgccgcgcagtttcgagatcacgtgcaaaatcgattggccaacgtcaatcgatacacatacacagctttcagccgtctcagccacagaaacacacaagcaatctccgttcgaaacagtctcatcggtcttttaaaccccatgtgttttttgttttgtttgtaacattgcctgtcggcccgattggatagaaagaaaacaatcaagaggaggaggaggataaatcatatataccaccaggaggaaagaaacgtttacaacaggacgagggataaggaaagaaaacaaaagaaaagaaaagaaaacaaaacaaaacaaaacaaaacaaaacaaaacaaaacataacaagccaagacaaaataagaataagatagaatgagagacaaacgatgggagtaaaccccagttgatttgcctttaattgatgcagatggaaaatcaaaagataaggctaccaattcagaagataaacaaacgcaaaccacaagaaagggtagagcaaagccgatgtatcagaccttgtaggaggtaactaactatcagttcggaagcacatccacataacttcctgggaaagaccctttctgtttagtagaaccaatcattccctgccacctggattgcgcaaaccccacacagaacaatccaaataatcatcagcaaacgataaacggtcaaaaccagagttgactcgaacggaccagtcgttttttgtttgtgtcatctccaaaatcaatatgatgtctccttttctgaacggaagatcaccactctgtgcatgacacaaagaaagacaaacataagaaatccatacagatgacagtcagaacacatacgaatcagcagccactgatgtgaagacggtacgaacctctacgccttcaaaagtgaacttggcaacagcttgaccaaccgctccatactctttcatcaacgagtccatctcctgagcacccttgttcacttgtcttgctgaactggctccgttcgatagagagtcctcgccgccagaactgtccttgagattcaagttcgcgagcgtgggtatcaacccaccaccaaaggagttattagccgccagcacggctgcctcacttccacttctcgtcctacccaacccaatccttgctttctggcccaacgatccccaatcctcctccatcatcgagggtccgtctctatttgacggtcgggaataaatgcccctactctcataggaattcaagagatcgtttcctccgcctgagcttgatcgagcccggttgaagcttggcggtacgtttctcgacgttcggcttgatccgtctgttgttgttgggcggaaatcgtcaatgggtgcgtcccaaactcgtctattgaattcttcagaaggggaagcatcaagattatgtcgatcgtcggtgtagctgtcagttgactgtcgatggatgtacgagctggagagtgaggacggtaggtaagacggtcgagtaacagcagtgtgactagtggaaagtggaccgttgtcccacgaaatcggaccattgattgagccgttcgacccagagtttcctcgccgtcgtccgtcagcttcctcacctgctcggccggtcctgtctctttctccaccatagccactatcatcatcatatggtctatcagactcatcctctgaatcgtagtcaaacctatgggcaaactgaggagtgcttggcttgggcgacgcgatgtacgactgagacgacgggttccgctgaaggaaaggaggtggatgtgagtgcgagggggagtttgcgaacggaagtgacttagcaaccattgagggtgagggtggtccgccattaaagtactgatccgcctgggtgtatgattcagaggtcgttagccctggagaatccaaaccagacttggaatttcctcgctttctactaaaggacgacatagatgaaaacaaacccggcctggtaggagtcttgtttgaatttgattttcgactgctagtcgagtccgctcgagatcgggttaccgcgttgtcagccttttgctcagctggcgtgtcattctttcctcggctgcccaagatacttcgacttcgagttcgacctttactttcgagtgcgcctgaaggcttgaccgattcttttccgtcggaacccatccctccgaacgcataactgcttggactagaccctctccgatcgttcggtgaatcgtagcgattctcgcgatccgtcccatctccaaattcctcactccaagtaggagagtgcgtccgtgcagtgaaattttcgttggactcatagtttcgaggagaatcttccacccatgcccgaccgcctggcaagccggtcgacgtagtcagcttctcaatcaacaactgcgcccatggtgggggtgggaccattccagatagtaattgcttcgaggtcacgtttgtcccataggccagtcggttcgcactgatatgatataaggcatgagtgcatgatgaccagacatagccacagttgtataacttcaggtcacaagtaggcactcactcttgtcgctccacaatcacactaccttctagactaactccgccaaaaagacctttagttttagagtatgtgaacctgataagcagtttgactggatcagtgacgaggaatgagtctccaaacttgacacaatccacactcacatagccgccacttttccctttgtgttcaatgctcccatcccttcggcattccgtcccagtggcccgacagccaactatcaaacagtgtatcagtcaagactctttgcttctaaagatctttgatgtccacctacactcatgttccctccaatatttaagctgcctgctgccatgaaactgttcactgccgctctagagtttaagacctacagcaacacagatcaaagcttgagaaacgtgtttcctgaccagatggacgaactctgcgacgcaaagatctggcaaacttacgatcaaaaaatcggtaacttccgctccagcctgaccaccaagtccaacaccacctgtaccaatagcagtaggcgctgaccacgtgccgtcggacagccgagcgattaccacgccagatcctgctcggactgaaacgagaaaccctgctttgacgacggtaaagatagcgaaccctttggcgtgctccatcacttttccgtgacgcgcggagaagaatatacgaaggacgcgttagtcgacgaatagggacaatgaagccgagattgttcaccttgtcgaggaatcatcttgtctaatccgttgtttgaggaatcgacaaatgaccccactaaatgaggaaatttaccccggtgatcgtgccaagaaaagatgatgtcgacaacaataagcatatacagtaagatatccatacggattatgatactgatgataaaggtacaagggagaatataggaacttgcgaatttttgctgcttttctgcattcttcgggaagattgactagtacaaggatgaagaggatgaagaaagtggaacgattgcagtaaccaaggtggagcaattccgaacgagcatccgaaagaaggttgaaagtgcaaaattgagtccaaagaggaagaaaaagatcagaggacaaaatgcaaagataatcaaggacggatcttcaatcctacctggtaccggagagttgagacccatgatgtgagctgtctctacgagaagagtcggacgagatggtagttggaaaagaatgatttgagaagatgagccgatcccttagtaaagagtaatatgcgtgttagggttggaacctatatctcgggctatgcccgtgcctgtgcctgtgccggggcgagcggaccggccgaggctggtcgttcggaccgaacgggcctagactcggcctattttgggtatatttggggcgttgtcagggcacctaatgattgattcgtcattgatcaccgcttttgtccacgtgactaacgaaccccgagaatcgcaactacaacggcccagtttcagttgctttccttcccggtcttgtctatatggatgaaccttctgtccatcatcctgtgtactcgctcaccttcttctgctgtccagtgacttagaagaagacaacactagcttataagagacacagaacgactaagacaagatatcatttcgtaggctttttcgctatcattttgcgttcccggttaggaaaataacgttttccctcatgcctcatagtaagcagtcgtcatgctaggctcaatacctcttgggaatctcaactctgggccgcttcttcccaagcacaatcgacatgaccggtcctcttctggctcatccagtcctcccgtacctccctctactggacgcatcctcttcaatcttcgtcgttataaacagcttcagataatcgcgctcttcctggtcgttctatccctccttgttttctacactcctgatcgagcctctcactttgagctcttcccttcgagcggtttcaaatcatcatcatcatcatcatcatcgatatctttcgaatccacgaacaatggagaaaagtctacattcccaagcttgtcagatatcggccgggctattggttttacaccagagggcaccttcggcgtgttaggctctggcgagaaatcttgggtcaagctgttcagagaaggtctgacatctctgggaagagaagccgacgaggcattcttacttggagaaaccgaaccagttgcttacatctctcaactcgaaacgttcatacagatgagctttcctactcatttgaaggaagacatcttaacctcggttcgtactttctggaaccgcgccgctattgaccctgaagacgcaactgcggacacactacggaaacttccagcgatggttgaatacaagaacgtttggcagacggacaagaagacatcggacgccgatggaggaggctggacggcaaaaaatccaggatggaagtgggagttgatggatgatgaaaaggcggacgagtggcttaggcaaacgttcggggttgactcgcaaagtcaagaatccaagagtacagtcgaggctgtatggaacgatctggagctggggattctcaagagtgatatgtggaggtatctggtgttgttgtgcgtatcttcttgctccttagccctccttacttctcggttcaacagtttctcccaaaaacgggaataaaagggtctcttgaactgaatttcttgcgagatacatgtctcacagaattgaaggtggcgtttacaccgacacagacaccacctgtctccgtccagtccatcaatggggccgaggagctgatacctacccaggatcccattcgtacgggctaccaagtatgattatcggggttgaggccgatgtcggctctagagaagactggcacgacgtaagtctattaacatgttcatttgttccgcagttatttcaaccagcctgatgagtgtattttcgatgttttagtggtgggctcgaccaatacaaatctcccaatggacgctctcttctgcgccacatcacccgatccttgtagatgtcatccgcaggattcatcactcaaccaccatcgcgctctcctggctcactcatagagaatcactcgcagtatcttatgaagctgctgggaacgctgaaagggcaaagaaaataaggttgataagtttgcttgagtcaaaaggtgttgaaggggaggatgaaaagatcctgggcaagggggtgagcgtaatggagtggacggggccgggtgtttggacggatgctgtcatggcgtaagttatactgttcatctttgctctatttctctttttttttgtctgcttctatcctcgaacgactggaactgatgttgcataagctacaggtatctgaaggcgcgacatcaagtaacctggcccacgttcaaaaacatccaacgtcagatctgtttctctttttctcctattcttatgtacatccgttatctcacgtaatcctcatcttcattccaaacacaggcccattacgtataggagagattgttgtcttacccgtaactgggttctcaccaggtgtcgggttgtttggcgcgcagaaccagtggcatgaagaagctatggtcttacattctgttcgttttttgtgttctttgctcttctttttgtggtcgagtcttgtactgatgtattgatattatgatttctgtgtgtggggcaattgatcaatccttctgaacgcacatacttttagttctctggaagttggaaaactgatggataagacttatgcattttcctttgttctcatctacattttctccctcctgataagatcttagttacacgaacattatatgtcctttctcgttcttagctgtacctagcttcgtaacctttttcatacaaaactcttccccctttatacaattggtacccatcgctgcatgatggggcgaatgtaattatgtcaccttaaaccgaagatcaaaaagactccatttctaatcagaacccaagaaccctcacgccaaaggaaagaaaaaatgggttctcaagtttagaactcccgtccgatacctcccggtccaaagtactcctcgatctcccatcccattccccagtacttgacctggcatttcaatccggccgaagctccttctttcgcaatcctctcctcgagctccttgtgagttcggacgagggcaagatcttggctgttttggcccacagaggcacagaggtttgaatgacagaaagaagaaaaaagttgaatcagagactttgaagaggaaagaaaaggaagaaagatgaaattgaaaacgaacgggcggagacgaagaatagggcagaaatcgttaccaccatcaccaacgtagatcaccctgtcgaacggaccgttctccttgatgtaagcatcaagctcttcgcctacagatgatattaaaggatgaaaagacatgacgcaaaaggagagaggaagtctgtctgtcagcatgttgaaattcctcaagtttccgcaacacagaagactaagagaaaggaaatatacccttgcacatgttgggagagcagccgacctggcagccatgctgagtagcatctggcgagatccttcgattgatgatcaatttatcgttctcatcccacttggaagggttggtagtaattcggtcgaacaactcggtcaacctgtggtgcttgaggatagtatcgatgtagacctggttggagttcgagagcaagaagaaagaagacttgggctcggacgcagccttgagaccaagagtagctcgcttcatggcggggtgctgtgagaaaagaaaaaagattaaaagacgaggagggaacgttaagatcagcttgaacactgaatacgcacatacgcgcgcgcacatacaccttcactctttacgctacctcgcacatcacccaaggatagaaacacgcacaaccggcagatcgcgaagggcctcctcgatctgagccttggtgataccctgctcgttttgaagcctcttgacagtgtgtgcgctataacaaagaggaaagcacgtgtgcgaaaggtatgagagctggttagtcaccgacaacttaaaaaatgggctgtttggctttcatcaacatcggatgtgatgtccgaaaacgaagggtgcaagtcaaggtcactatcactagctgggtaatactcacacagcatcagtgtactgcatagacttggtcttgctgagagtctcaagttctcgccttaggggggtgtagtgatactcaagcacatatcggtcggtatcctggtccacgtaggacctgtaaggagactacgtcagctaacagtactgtgaatagagttgaaaaaacaaaagcaaagcgagcactttaacgactcaccaatcaaaatcaaagactacaagttgcgatttgggggacatggtgaagttagtttgaacaagttggttgtagagatacgaacaaggcagggtaagaaagaacgaaaaaaaagtctaaaaacgaaattccttacataagcaaacgctaagacggggcatgatagccgcttacgtaatatattcatataatattcttggttttctggcttctgatgaccactacccgtcagatcagatacatatatcccatattcgctcttcattgggagatgcgacagtcatgatcgagaacaacaattctacaaagcttgagacggcacaacatttcaacgagagacgaggtcaactttgtccatgaagcttaaaagcctcttctagtcagtcccgaagctcatcatccctagctggagagaagagaagagatttgaacaccaacagaaggagtgagaacttgtagtatatttaaaagcatcctaggttcaagagcaagcatgaaaaggcgaacatggtgtaagtggtgtatgtgttaagcaagtgaggtttgtctttcagggacggcgcagatactatgtatattgatgagataagatgaggaatacatttattgaccaaaccctacgtatgatcatcagattaatcgatcatcttcaattcgtttttgacttcgatttttgtctgcatgaacattctctttctgaggttgacgatgatggcatcgattttccagtcggctaggccagccttcatcttctttttgatatcatcgatctgggcaccaaatctccgatccgtcgggtcaaaccagaacagtcgtagttccgttcgattagactcgagcgctcgttcattcaccctcctggataccacaagagttacagacctatcatcgctaggtgtgtctgatcgatagtgaatagagaggctacccggaagaaacaagggcgcgaacaaagtataaccgaacataaatccagacagatagacgagatgagataaaaaacgaattgttgcaagagctcaacaaattccagacctcttctgttcttcttctctacttccatgaaaccttcatccatttcaacattttctgaatgagtagtcttcctgaagttcactatgtcctttccgaaggaagcaaaaagtgggacattgggagctaccacatacgctcgcgtccttttctttcgtcgtcatcatcgtcgcaaacggtaggatcttacaagcaccgttaacatcaacattttttcgtgatccacaatagaaaagacatgttgaactaagcatgtgatggaacaggataagtatatatgtatacaatgcagaaacaaatcagacatggactatgaattattcaattggctcggatttttctacatgttttcgaatctgaccagattttcttacataagcaacatcgacacgtgacttcaatttttactgtgtggtctttcacctttttgctttagcaaataattgcagctcatccatccatccaccgggtcaaccagcttcgcctttcttcctcttctcttctctcccctcccaaaacagatcaacatggccgccaatctgaaagccattgctcccgttccctcggcgtcggtgcgtagttaataattctggcttagttatcgtggtctgccttgttatatttgtactgattattctcttctctttggactccacctccttataactgtccgccttgtataggacttcttggacattgtgtaagctgacttctatcgaatgcgggaatcttgaatgcatgttaatttgattccatacattgtactcccatagcttgtccaagacccagcgaaagacgcctactgttcgtgttgctattcggactcctattgtcgtagtaagacttcatgtggcctaatattctcctttgacttgtcttttatctctttaggtcattcacaagaacttcaaggtatgtcgtgaactgtcatttaatcttgacctatttcattcatgcgaactaacgattcgagtgtacctctcttctgtcctacatagatcagtcgtatcagaaacgtaggtttctcacccgcgccacccgcgctttgaacctgcattagcccactgctaacctggcctatggcttcttcatccgtcacatcgactttccagttctatatgcgaaaggtcaagttcactcaggacactatcgacgagaagctttcatctatccttcaggagttccccatcctcgacaacctccaccccttcctttcctccctcctaaatgtcttatacgacaagaaccactacaagcttgctctcggtcagatcaacacagctagacatctcgctgatcaagttgccaaggattattgcagacttttgaagttcggagattcactgtaccgatgcaagcagcttaagagggccgcccttggtcggtgcgtattttgttcactccggttacgtctgacccttggatggtccacctctagagaagagaatcaaaatttgacaatacgcgccgttgtccattgcccgttttattttcacgtagaatggccaccattatgaagcgacagaaggacccgttggcataccttgaggaagtccggcagcatatctctcgtcttcctactattgaccccaacacccgaacactcctcatttgtggttaccccaacgtcggaaagtcttccttcatcaacaagatcacccgagccgatgtggatgttcagcctgttcgtttctctagtgctttctatcgatacaattttgccactggaactcacttttgccctttcttttactttttacagtatgctttcactacaaagtccttgtttgttggacacatggattacaagtacctccgatggcaggttatcgataccccgggagtgctcgaccaccctctggaagagatgaacactatcgaaatgcagtctattaccgctcttgctcatcttcgatcagccgtgctctacttcatggatctctccgagcagtgtggttacacgatcgaggctcaggttagttgttcctttgtttgagatcgttctcgtatgttttctgaaatacggcttgtttgcaacatattttttcagtgcaagcttttcaactcgatcaagcccttgttcgccaacaagccaaccttgcttgttatcaacaagattgatattgttcgactatccgacctgactcccgccaaccgagctctggtcgacgaaatcaccgcccagggcgatgtgactgttgttcaggcgtcatgctattctgaggagggtgttatcgacgtgcgagatgccgcttgcgacgctttgcttgctcaccgagtcgaggccaagcttaagggatccaggatcaactcggtcgccaacaagatccacgtgtctcagccgaaacccagagatgatgtcgagcgaaagcctttcattcctgatgttgtcagggacaggaagaagtacgataaggatgatccggatagaatccgaactgagaaggacatcgaaaacgagcagggtggaccaggagtctactcgttgcccatgtggagtgcgtctgttcctctagcctcattttctacatgtttaaggtttcagctacttaatgcatcttttttcatttcttgaactatcttagagaactacttgttggccgatgactcttggaagcaggacactatgcccgagatcatggacggcaagaacgtggccgacttcatcgatccggagattgccgagaagctcgaggccctcgagcgagaggaggagcggctcgaggccgaaggtttctacaagtccgatgacgaggagattgtaagtatttccgcgggcttgttcgtagtgcacatatcgatcgctgaccgtatgatttcatcaattatctccagttggattccgacgaggaggagttccgatcgacggccgcgcagatccgagagaagaaggcgtctatgaagcgagtgtctcaggacaagaaccggttgaagaatcgacctgtcatcccccgaaagcaccaatctcgaactctctcccagctctcaaccacccttcgatcggtcggtttggatccttccagaatcgaggagcgagccaaggtgcttgccaaggctcgaggtgtcgaagtcgtcgatggcgcccaaccgagaggtctggccattcctggagagaggcagggcaagaggagaaagggagcgagcaggttggaagccgaggccgagttggcattggaggctgccaaccaggagatggacgtcgatggggacgaccagcctgccggcaggtcttccggaagggttgctgccgtcaacccgagggcacccaagaccaacagagctactgctggacttacccagtcgcaattcgacaagtcaaacgagctcagggactttgctcagcgaccgcgaaactacaaaggaaagggtggagaggccgatcgtgcaatcccgatcactcggccgagatggatgcttgccggaaaggttcgtttcttgatgtttctttctctccttccccgtctttggcagcaaagttactgatttgccttttccttgcctacttcgcacaaacagagaaaagccggaaagaccgactaccgataatctgctttctcttgcgatcaaaatttcacctgcctgcctgcctctttccattttgtgggctcccaagtgtttcccgtcttccttctctattttcccctctatcttcttatactttgttcccatataggcaattctacatattttgtttcctgtccttttcttgtggtcgcttcccttttgcttgtgggttattacatgactttctcttgatgattgcagctgaggaaaagtaaatgaaaaccttatatagccttaagtaaagagcttgacaacatatactctcgacatctctaacttgccatgccaactaactttccatctttttgcctcttctcccatcctttcttgctttgattgcctttgtcggcacaatcgcaagcactcgtcaagccctgtccgcttgctcacctcctcctcatttgatacgatggtttcatcgcttgccgtcgcttcgtcactagctcttatatgggcaaacaacgtccttggcgtgtctgccgccaaaggagttcctgccgacacgtctgatttgactgaagccgtgcgttccctgcattcatctcatcatttaccatagctctgctatcttccatctctactaggtgtaaacctgaatcagtgccgtgccttctgtccaaaatcttgaaaatacgattgacattggtcgttcttctgactatttctgtgcttctcgaatcggggggctggcgattcaatcttgggttatcatctcagacggtaccattgagaacacattccttgtacggtcgtaagtggcggtattcctatatgattctcttctctagatttatttatcgtgttcttcataggagatgaaaggaagcaactaacaggatgtggcttgccttttcgtcggaatcgactgtgctctatgacagcctacgttgacaatgatttacaaagtaagacttggctcgtataaaccgaatttatcttcttcacagagcattttgggtgcgcgaaactcatcttgcttgagtgaatctttgaacttttctgatgaaaaatcaatagatagatggtgggacttcggagcgtgagtgataatcttaatgcgttcatctttgtatctcttgaatggcctatcgacctcgtgttacaatctcttcccggaaattccagggatactatcatcaatacaaacaagggaattcgtctgactcaagatagaccgtctgagcaaggttggctttggtctcgactaccgttaacaagtccgaactatcagatcgagtgggaattcaaagtgagtcttttggtcgttgaccaaggtttcgttaatcagtagtccataggagacccactgatttctgattttgtaacggaagattgattctaagggatcaaacatatttggagatgggatggcaatgtggttgacaaaagatcgggctcaacccggtcctgtattcggaagtaaaggtgcggtacctcgttctatatcaatctaccgatgattctgatcagtaaacctttctttactgctattttagatcagttctatgggctgggtgtctttttgtacgttggttttataaactcttgacatcaacctttcggtactactaagaattctaatcagcgcgattattatatataccattgcgctcttttggaatatagtgatacgtatgcaaacacgagacattcgtacactttccctcgagtgactgccatgatgggtgatggccgaaagtcgtatgatgctggtacagatggggctcaaaatgaattggccggttgctcggtgcgcgctcgttcctcgccctctgtcttgtggtcatagcccgacatcagattctgactccctctttgttctctttctaaaggcaaactaccgaagaacagaggtgccaactaaggccaggttgacctatattcgagggcatcatctagaggtcagaaacattgttgtctggtgttgatttgtgacaaaagttctgattatttgttttcgacacacagctcgagcttcactacaaaagtttgtttatctgtacattcgtaatgtgtttatatcaaagttttgacacttatacatatcctcctctttatcattgcttcgattgtgtctaggttgggacgaatggacgccttgtttcaaagtaaacgtgaccatgccttccagcccatatgttgggttctctgctctgacaggtcaagtttcagaatatcacgagtatgttgtttcttatcaacgtacctacctcctttgaaaccgggattgaagtttacgcctccccttgatctttgtggatgtctttcctctgctatttgtctagtatcatctcggtaaccgcctcatcggctgtgctgagaggtgaaaacgcggcgttgatgaacagaggcaggggtaacggtcatgctgataggcacgacaagaagacaggtctatcatggtttttgttcatgcttaaagggataggttcgtctattcttcttttgtgcccagtttattgtacccgttttgaaaaatcacgtggagacttatcgtgcgtttgatgtcctcctgttacagccctctttgctttggtcgcttttggctattcattctacaagacttgggcggcaaaagcacggaagaaagctcggatgaagcgagaatggtagtctagctcagagagaggacatgagaagtcacaagaagagagagagaagaagacgtttaagtgggagtggagatgagattgattgattattgatcttctacgatattcatggctggaccaagtcgatctgaaactttaagcgtgaataaacaaagaccagacgaatgatcacgagacaacggggcgggcaaacaagccatggggagcattcgctttcttccccatcgattgatgaagaacgagaggttctcttcttgagattcagtcgaggctattgagacgatgtattctgtttgacatctatcgtttgtctttttttgtgacctctgatcttatatcaagattgtctagaggcagtgtatgccgacaatagcaagcttctcacgtcttgtgcgatcatgaacctgaccagaagaccatctgcacaaccaagccatctgagtcctatgccagaaatgttcatcttctaatcgctgtaacgatctcatgtatgattgccaaggctttatacttgacctctagtccacctgacggcctcttcaagtagttcccagcctgattcgtttgattttttttttcgttatgtttatcgttcacagaaacaacaccaggaaatctttttagtacatgatttgacaacgagagagcaacagacaagacaaacaaagaacggaccttctccttggaagaacatctgaccaaaagggtttccatcgttccaatcagccgctacccaaacatcgggtacagcttctctcaacttgatcggcagtcggtcgactgctttgacgatgttgtcagcataattcctgacagtgtgagacgccaaagcgagccctctatgcgtgggaagcgtgaagagtgcagctacggagactgagtatcccaaaatgaccaaagagaatcttgatgagcgggtgacgcgagcggatatgagggacgagggaaatgcaacgaacgatcttcgtagagaaaacaccaggaaacgatccggcgctctggatcttctaagtctcttatacaggaagatagatggacaagaggcaagaacgcctcaacaggatatttcccaattccttggttcaacagctacatcactcaaagaaataatatatcagataccggttcggtcgagacaaggcagctcagaggaaacaggacgaacatcggccatttcttcggctcttacaacgctcttttcaaacctatcggacaagatcttcccactcgccacctcgccagcttttttctgaaccttgtaactctttccacctccttcagaatccatgctctccgagcctttctcaaaatcatctaccaatccgtcaggaagacctccaaaggcgaccttgagacctttgcatgtcgtctttagggcctctaaaaactctgtgagaagggcctggcgggaagtagatgttacggatggatcagaaaatccaaaatgaatcttgaatcttccttccgaatcgttaagcgggcgcacgaaaaagatcgcccatgatttctgctccttctcttccgacgtcacaggtgctggtgaagatgatgagaacaactcggccggtcgttcaaagtagaagatcttggattctgcaccgtaaaagtctaggacagtcgaccattctggagccttctcttcgcaaggaaccgggtagtcagtctgagttatgaatgctgccaaaaggacggattgcagattcaacgattggggtaatgacggcctatcagatagcctacgaacgatatctatcagagaaggagcaggggcggagggcatatctgctagttttgttcttttttttcgcgttcttctctagaggatctttcttattggtgtcgtctaggagcaagccaggatgagggtctgagggaaatatcattctgtagacagtcttttataagtgttggcttggcgttgagcaaaaaagaagatcaagaaatggaggaaggaacagttctcaatacagagggcacgtgacttgacctcatattctttctccaactccttcctattatcgtccactccttgtccaaactatagccaagactagtcttttcgcgctggccggcctgagccacgagagcaggatggaggattgttttgcaacacttgacaacaaatatatatattggcgcggacagatcgggaaaaacaaacgtatcaaggatacaagatagtacagaagaatgataagtcgaagcaggagagatgatagcctgagctgcatggatttccttgagagaagggacgatatgcttatagagaatcaaagcgcgtagacaaaagaggtaaggaagaaaagaagaggcagacaagaagcagaaggcagacagcctacgctgtgaagcaaaggtgacacatttctacctgtacctgacgaaatgttacaagctgaagagactgaacacatcttcccaatatggtcaacttgatttctagttctttatctagataaacctgatctagctgttctcgaccttatgaaattccccgccgttcggtagaccttctctagcgcctgcagcgggaacctggtccagtggtctaggcaccgtctggcccatgttcgctatcccagacgagcgcgggttcttgtatgcagatcccgatttgattcgattattggatgtggattctctgtgattgtgcatggccaatcatgcgtcagtgttgacgtgcaaaaccaagacaacatatatgatcatcactaaaagatggccggaccttatttcggcgatgagatcctcaagtttgtaaaaaccaaggggaccaaaagggaagttcttgatgtaaaacgaagcaagatctagtggcccgaggaatgcatggagtgtcagatatggaagcgaagcattcagcgggtcctctgtttgaaatgatgatatgtcagcggggtgcatatatacaacgtcagtttggtagacttgatgatatgaaaagggcaagcagctgacggaacgaactgaaaggtccgacaacgaatcctatactctctgtgagcaagctagttgatccctgaggtctcggagggaataccggtctgctctctacctcttcatcttcgacagcagtactagaagaaccaggcgagggcgatcgggcgatagccgccgaagagtatggatagagagacgcagaagaacggatgaagcgttcatggagaaggttgtgggacagttgcagaagccttgacaacaaaggtatggatgctggggagaagtcgtatacggtcgataggggctgcgcgatcagcagagttatgtggcctggattagaagtagaagaaacagtgtgagcatttgtaaatttgacccaaataattcaaggatggctacagcatgttctgtatcaaggaataacttgtgagcagcgacgggcaagagcacagacaaacgaacctgcagaagcaagctttcttccttttgcgttctccaggagagcagtgacttcgctatcagagtagatgatctctgaatctcgaagtagctcatctggaacacaaacaggactaactctgctgttgataccggcaccggtgacattcaaactctcaccacctccgcccaggggatgactagaagaagaggacgtcatgtatggatgatagacgtctgagtgatggatagatgtgcaaacgcaagaggttaacgaaaagaccaagtcacctgggcctataccttcaacggtgactaaccgccacattgaggacgccatctgagataaacagagcggacactgttccaaccttcaaccacgatcatcctcccaccaacagcaagtctattcgagtccatcttggtcaagtacatattggagttctgagagatgtccgtcagacagctctacgctcgtgagtatgcttggaagatctcatgtttctgttgacgcttgttacaaaacaaatgagacaacctgttcaagtcgctttcttgattactatgttcctatcaccttacagccccggcggatgacttcctctttcttcctccgactcttcctccttcctcctcctcctcctcacctgctcgatcatctccttccagaactgtagctccgcctgctcttgttcttccggaagcttctcggtcaaatttcccgtctctatcctcgaccaccaatcaatcttttaaatcctatcgtgatcaattcgtgtggacattgggaacttctttcttatcatccttccttgctcagcctttcgaatctggcaaggtactttctcagattcagtacctacctcggaaaagacttcttctctctggcggagcctccgcgaatgcaacctcatccagagaacctccaccggtttccgaggagccaatagatcctactgagctttctgacgaggaagatgctcaagcatattttgaagacttagtcactgaggcaaacagagcaaaccaggaagcctcactttcagtccccattcggccgagagagacggatgtggacggctatgtggtccgaagaccctcgtttagaggaaggtccacaggcctcgaccggccggaagatcttggcgaggctaaacttgagtggattatggaaatcgggtatagcggcgatgggccttgggcaatgacaaagaggctatggaatgaagaaggtccggctggcccttggaaaggtcagtgtctccaatcattgtccctctttgtatgattgaatagctgacagctatggtctcgaatgacatcaacccacgacggtctccgcttaggtcttaccctttcttttttcctcgacaatatcagcaccttccttcctcgcttcctctcctcatttatctcgccgttcttcccctcgctttctgctccgctttatacccgaccttctcttgccatgccaccacgttcgatatggactcctctctttccagctctgctctctcagacactctccgggttcctcctgtcgccgctgtctttgctgcacactcgattaattgctcagccgacacacagacttcatcgaacatactccccgacaaatcctctacaaggacttgctaccctccgcgcacaagcaggtagctgggcgaccctctactttcacccgagacttctctggccgacattattggatgtgaccgttcgggctggtgtcgcactgtccattccaatcatcatcgagcatgttctcggcttcagctcaatcaactctcccttggcgtacaaggctctcgaagcagcgctcaacattggttctctcgtcgtcacccttccactcgagacggccagacgacgacttcagctacagtcaatcggaccaaccgccgagcaaccattcaagacgtgcgtcgagatccgaccggcaccatatgccggtgtcggagagtgcctgtatagaatcgtcacagaagagagcgttagtggaggagatggctggtttggaggtgtgaagcagctgtacagaggacttggcatgaatttcctggccaccagcgccgttgtcggcttggagcttgggctctgggcgctgggtggagagagcggcaggactggaggtgaaaggtggatggagatttgaataatcttttactcatttcctaaagttctgacctatccctcatctccttcctagtccatgatcattgtctatactcaatcttaatcagaaagtcccaagattctatcctctacttctcttgatttttatcaagcaacggacgagtgctacatatctctgcctgactttgagttcatctgtcttgttcttttctattctctatgtgtcaacatgttctctttcttcttcaaaagatacatgatgactttctcttcctctcagaggcttatctttatcgagtaggtcaacctgtcggatctcaagatgaaaactatgatggcctatcatatagttggttaataaacatgttgatggatacagtgttgatacattgcatcagaaggatccctcgttgaaatcgagaattaccgcttcctgaacaaggggagtcacgaatttctaccgtatcaaaagtaaacaacaccatcaatacttatcaaagcaagtattttcgagaagaacaaacgacgagacccaccttgaactcatcatgggctggatcggtgtggagatagtattgcctgtcatcatcgttctcgaattcaaccagaaagatttccttttccagttttgaaacagtacccaagacgcgcatttagcatcacatatctatcatgcggacagacgtatacatcaagagcccacctgaagacctctagtcataccctctggactgttctctttaccacctactaatcgcacgatataccgtgcgtcggtcgtgcccgatcggacacaacgttccttcagttcaagaaatctcgaagccacggttgacacagacgatgagttagcgtcgagtttatatttaaaagctacgatgtgctgaataggcattgtatgtgtttagcacgacgataaaagaacgtatatgatgtcgagatggtgagatattgaatggtaagcagcggctagaaagagacgagatcaggggaaattgattacaagactttgattacataagattattgatttgaatcatttgagcgaaaagctattctactactggttgatctctagcaaggatcaaattcgcccttgaacggggatactcagatatttacttgttcactactggaggtcttactaagtccatcgtcgttatggcagcgccataccgaattcagagaagcagagtgtccgaccagcagactatctgcagtgctgttggtatactatttcataatgccgcggtgaatttgattatacgagggctttgctgaagggaacggtacgaaggacctctgattatttcataaacatattcatatggagcagatagtttgaactaggaacgtagtcgtcaatatcacagatagatatttgatgtagatgctcaaagttgtctagcaaatgcgcgggtgtctcgttgtcataagagtacatagatgatgtgtgttttcttcttggcaacctgttggtagtgtaggctgccatgtcgttaatgccggaaatagtcttcatgctgaaattggcgaaaagaatttagttatctacacacatcctaaactcgaacttcagtctcctgcagttctcctacgcacacagcgaagaaaacgagctcccacctttattcgaccttttcgatttgaagaacatagccaggttcttgatggcttccccaaaagtcgagcatacttggacgtcttcctcgatccatttaggtagtttatttcggatggaaggttgcgaaaaacgtttgtcgacgaggatcctgtatcaatgagcataagtgatggtgtgttgttgatcagacattgaattgcctatcaacaaatgtagagaggtaacaaacaaaacggcataatcatttgcatgccgtatggctcttcctatatataaagagagaggtagagagtgtatcagaggcggcgctcagctttgaagttacacgaagaatcgaagctcgaacctatagattgattcactgctttcatgcagagattctatgatatgtgggttatattcggtgttaggtaggtcaagtctgggagttctttgaaatgtggatgactgaccatgtaaactaaacgaaagcaacaacgaacaagaataccagtcagtatcactgtagggattgctgaagacatatggacaaatctcacgttctctcccggctttatcgccctgcggctgcttattagcaattgcgacatctgtcacatacttcatccgttccttgagctcgcatgaggtcaagttcgggaacggaagtccaacctgatcggaatgaaatgttatcaagatgagaacggcccttcgaggtagttgtgaagcagagaatccggaacctaccatgactaccgctctcgcaagcctgcgccaacgacacggcgatacagagcatgagataccaagtcttacaaacgcgaagagcgatttttgtttcaagctgagatcgacttacttgtcagagaaattgataccttcgctcaattttgcacctaccactgctagtaaaagcgcaccagatttcttgttggtggcagatgatccctgaaagagaataagccgcgcccagaatcgaacgagagactacgtcaacgccgatatagagacaatggtgatgaaggaaagacgtaccaagttgatagcagtcgagtactcctctagcactgtttcaacactaccaccggcttgaggctcatagaacagctgaaggtaggttattgacaacaaggcattttaagctgaagatcacttcaaggaaacaaaagccaaacttcgatgtagcacgaactgattttttcattcctaactttgctagcagaccactcttttcccaagtggttttgagcttttctaaaaaccgatagctaggtaagaatacgacaacaccatctgggaccaaattgcacacgttagagagtacagctccgagctcgtctaactgtagcgatgtttgtcaatttttgcgttgatcaatatcggtgatgtacatcgagaataatacaaagaacgcagagatcataccaggtttgtatcgttttgagtttcaaacttgaactctaaatccttgcccttgggactcttggtgagaattattgttttgagattttccttcggaatgacatgcccgcatgagaaatttgcaagtcgagaaggttccacttggggaaaaagttgaagcttgaagtcgttgacctgttaaatgagatgaagattctctttagggaggagttcaggtgtgagggaaaggtgaattgattaaatcaacacgcactggctccatcgttcctccagccagaactatgctccgtgcgtccgctacgatatcactaaagtgatccatcggattgagcaacacatattttagtgtgactagttgcttccccgatgacgatggagagctagtcgaggacaataacacacggccatcggcatcggcgttggagagagagaggagaaatgactccagctgatgcatgtaagagatggcagcgtgtcgggtagtagcacgcgtttgagaagttgtcgtagttgctgagaaataaggcaaaattaagcaagtgtttagatagacgtccgagaccaagatcgacatgtgaacgattatgtacctttggccagctcctcttcgatcagcttctcagtgtagctgctgacctggatggtgttgatcagaatgcaaatattaaagagaattcaggtgctgatcaggagaacacaaacaacgacttactttaacagcgatcttgctctccttgaagtacccaacgatctcgtacagattgacttgatctagtcccttccccataccctgcaccaactctccaactttcattagcttgctcgaatccttcgcttgttctatcgattcacacaccgtgattaatccggcgagtatcaggagaacctgtttgagcattaccgcgttcctccctttcaatctgttcttgaattttatcaggtatgttcggagctgatctctcgcttggatcagtccaggaagagagagagattgggaatggatggagagaattgtatcgatcaagttatgtgcctcgtcgattaaaagaacttgatctttgagtgagatcgaaagcgcctcgcgcgcagatcgttggaggatcaagttgtagggaagcgtaacgatctgtacggcaaacaaagcaagcgtcaagttgaaattaggttgtcaggtgttaacattggtgaaaagactatatgtacgtacatctgcttcagggatggcggcccgagtgccataatatgggcatatatgagtttcctttcccaaaacaacaagatcttcgatatcctggatagtggcctgtatatatttcaacacagacaccacaaggtcaacggtcgctgttcaaaaagatatcgaaaaaggacgactgactaagactttatcagtaaactctctccctttggttccttccatccctccttcatctcttccgggaaggtacttgcaccccttaccttttcccgcactctgcaaatccaggcaccgctcatctattcctgtttcgccgctttttctcacttcatcgttaacgcacaatgtttttcttgaacctaaggcgaccgcccgagttgtctctgcaaatgacgtcttgcgaagttcggacaagatctgagatagctgggagtgtgtacgtgaggtgaaaaagattttggtttgagtcggaagaacagcgggaggaggcgctgagggatttattctgaaggaagacagaaaggaaggagggcgcgaattcagtctatcgcaagagacaagggtcgtcgagaacagaattctagcggacatactgagccatgagtgctaatacatcgggcgaaagattcaggccttctgcgttggtttgaagtctgtttgctgatggatcgtgaggaagaaatctgtcttcttcatccgtgttatctcgatctgcgtgctcaaaaattgtaggtctctactggtacaccatatgttagttttaaaatcccagttgcatggattggaaatttaatgcgacacccaccatccgttttcggtcccggccttgcgctcttaatgtttgctttcgttcttcttcttgtcgccggacttgttgtagtcgttcatctgtctcttgcctagcggcctctagttccatctttttcctctcaaacatccgctcggcaacccaaggaggatctgaagccataaaaagtacgattcacgtcaggatacgacactgatgaagatttcgtcatttgtatcataaggtttaccggttgatttggtcttcaaagcgagctcttctctgtacgcttccagtgatgccgtcgttgttctacgcaagtcatcggctggaaggagagaaagtctagagtagtcagtgtcaatatctagataatcttgttaaacaagaccaacgacgtacccaaccaggtcaacgttgaacacaagagcgagagactctttccctgtagaggttatacagatgcgcgttcgaccgaaaacatcaagttgtctatcaattgcacgtataaggatattcaggcctgttgatctgtagctcgctcactcaccgtgcctgttgggctttgaacgatggccacactcttaccctcgatggctttgtacacatggtgcatcagatcagactggatgccataaggtgttgcgtaagggaatgagaaggattccggcggaggaagcgccaactgaagctcttttggttcaacggttggtgcgcccatcattctataaaaatccgatggtcctccagtatcgtttgccaaagctttggccaaacagaatggatgtgtttcgtgtttcgtgtttcgtgtttcgtgtttcctggacatgctgaaatgttgaacaatcctccgacttcggacttgagcgcctcaattgtcggactttaaaaatcttgtgattttggggcttttttttctgcctccttttttttctagatcctttctcctcttctctcccacagatccgaagtctttcccatctatcatatccacaatgtctaactctgagctttcctacatcatgatcaagcctgacggtgtccagcgaggactcgtcggagaggtgtgtacttctgtttctttgatttggttatctgaaggatcttttttttctttactggttgcttttttgcagccctcatcgagaaataagatctgacggttctcttttacttcggacatctcacaattacctgctttaccttccctggttgggactcagatcatcgctcgattcgagaagcgaggattcaagcttgttagtctttgatttccttcctttccttttttgtctctttctttagagcccgattctgcgtctctccatctctcaaagggaacccgagaggtcctcactcagaacaggacatcacataaggaacgctgctgataactatttctgcccttgtccatgccccatcccttaggttgccctcaagctcgcctccccctctgaggagcacctcggaaaccactacgccgacctcaaggacaagcctttcttccccaagctcagtcagttctcgcttgctttctgttatcagcctcaacatggttttggatgctcatctctacaaactttcccggcccttacagtcaagtggatggccagcgccggacctgttgtctgcatggtttgggagggtaaggacgtcgtcaagaccggccgagttatgcttggaggttagtattatgcctttagttgttctcaagcgcttgtagcagctgtacctgtcatattgatgcaaacaatcgttcgactgcatatcagccaccaaccccctcgcttcccagcccggaaccatccgaggagactacgccatcggtcagtcatcgtcattgctcttgtcttctatcgctgatgaaagaatcattattctaaccgaaccctcaaccgatacttcaatgtagatgtcggaagaaacgtctgccacggatccgactccgttgagaacgccctcaaggagatcgctctctggttccccgaggtccgtgatgttcattgtctccgtccgttctcacacaatactcatcgaactgttgtttttgattggtttcacagggtcttgctcagtacacccgagctgacgccgccaacgtttacgagtaaacgtttttggtcttcacttattgattatttcatatttccagtctcatcagttgttcacatatagttcatgggccttgatatcactagaatgcgcttaaagttgcattttacattgaaagaaacacattcataaaaccacatcaacgactcaaagagagattcattgcaactgccacaaatgacagtttctctgtgttttccttaatctgctggtcaaccgacttgcccataccgtgtccagtgctgggaatgtcaatgaaacatatgacatcaaccagtctagtgtactaccgagaattgatttgtttccgatgtatcacttactctgtgtagatcctgtaaagcctgaagaatcaaagatcgagagcgtcaaacgcagactgatagtcagtgactttttctatacaaaaaggaatcaggcaatcgaaaaggctgtacattggggcctcattatatgattgtctctctacaagactcgaaataaagtcaatctactggatcatacaaaccaaactaaactgttttgggagagctctcgtaccttgcaacgtagcggcaaacttcaacgtatgacctacgaatagaaagttgaggatgggtcaaaagttctttcgaataggcatggcctcgatttggtgtaactcggtagagagagacatacctggaatcactctggagtcatgttccgccgtggtgagaaagcatgccgggaaattttgttgagaggggatatctcgttaaacagaaaagcgcaccaacaagataggatcagccgagtgcttgaaggagagagaagctcgagaagataggtagtttctgataactcactatgaagtggtgatatcttcaaaaggctcgcaaattcctctatctcatccagaatataaaggcatgaaaaaacatatagaaatcataaacgatgcaactaaaatctcaaacaaaagtaaaaaaggacattacgaaccaggatcttctggtgagccatactctgccgtccacagtgcgcccatagtgaacttatggaaccggaggagatcatgtactcctacatctggaagagtagcatcaataagatctggagcttgattcgaaacagcactgcagagcaaaccacctaaacagaaaacaaacagtcatgattaacgtcagaagggctccggtatgtagtatgagagaacctgataccgttggaggctccgtgaacaactatcttgctactcagtcctgtttccttcaaccatctcgcagcctacaaggttgaaagaccatggcgtgaatcaaggtcagtctatgattatgacgccagccgagaccaggagaaaacctagatggaaagcgcaaacgacttctggactgacctctaggaagtcatcatatcccgtttgtctcttcactccaactgcagctttatgccattcgtttccatgttccccgccacctctgatccctgccacggcaacaatccccttgaagtccttcatgaagcttgcaaacaatggttcccatttgggctcttgagcccagccgaaccctccgtatccgaacagcaaagtagggtgagcggatttagattcgagaaaacttgagtagcaaatatgcattggaatgagtgtgccatctttcgatgggtagatcacctactgacagcaatcatcaggcgacgattacaagagcatagtaggaatatcagctaggatgaaagaaagaatcttgatacctgtgatgatagaattatagattaacctgcttctggatatagtcggattcgctccatccgtcgacattagagcaatgcaacatgctaaacacgacatctccatcggccactacacctcgataaagcgttggaggggcgatatagctctcacctgtccgatcagaacgcgagtcggattcgtatatcaatcctctgatcacgctttgtatcttgacctgatatcagaaagttatgacttacagagaacactaaattcgtttgtattcttgcctgtgtccaaactgttgacgactcctgtccaaggaatttcgtcgtctcggactctcctgatggtctcgccctcatcgttgaaaatccatagttcattcgcaacatccacagcgaacacaactagaattaatccggatcctattgagatagcgcgctcgagaacaccttttggatgtgagggcacaatttcgatccactgggactgagttgtggtcagatctaggtcgataccagagatcttgtaccgaggagatgaatcccggttagttttgaagtacgagatgcccttggacgaagtcccgatgtctgtttggtagcgtttagtcagattgtctgaacgacaacattggtatacgtgtcaagacctctcacatatgtaacttccatcccatggtttcgtcacttcgctccagatcagatcatgtttgactgctttaccttgggcatcatccaagcctcgcacgggagtagtcaagagtcgcacagtagggtccgtcgatttaaacagagaggtaatgaggtgttttttatcttgtgaaacaattggaagatatgcctggcaaattgggtcttcaaagatctttaaatcctctgactaattagagaaggcgcagaatttcaagggaatgtgtgcagatgttttagtagttcaagttcgatgtaagtagaagacgtcaagtatgagatgaggacatacttgaggagttccgatgtaatgaatcagagagatgtaacccctctcagctgtatatgaacagttaacatggatggacgtacagaattagatgatctccttgaaaattgcctgatgtgtcaatcggctcaccagacgtgttgtctttatgcttggtaggcccgatcttgtacacgaagccctacaaaaaattcgagattctctcagcacaagacatacaaatatgctgatactaaggtaagactcacttgatcgcctaaccaagcaagtgtccagcagaacttgacattcaagagctcctcgtccacttgcttttttgtctgagtatcgattatgacaactgtctgccaatcggatctgttgatcccgaatggagaaaaaaaaaacacacagagagagaacagaaagtaagatatcgaatcagcttttgcagaagattgtcttggatcgttatcatgatgttaacataccctcctctggatattgtggtggcccaatacttccctgaatcgctgaagctgctccaagcttcactggcagaaccctcgctctctgtcgaatactggttgacatcaaaaaatacttctgcgtcgtgccagttgtccgccgttgaaaccttagtagatctcaaccaaacgggttggtcaaaatgtccaggattggatttccagtagaagaatgagccgcatggggatttctggaacgacgagacaagaggaaaagaggtgattgaacgaagagaggtcttaagagcagctccatggggaaacttgagaagatatctatccgttgtctatgttcaagtttatgaacaatgcctgccgaagcgtcagtctcaccgtacagtggttgacgatagaggccgcttgagttggggatcttgacgcacatcattctgtgctttcacgaaagactttgtagactctgcgaacggatcttccagatgtctgtccatcatcccaggccatgatgcgacgtttgacattatcaccagcatccagcaaacaacccataaaagaattttttaagtctatcatccggagaagtgtgtttcagaggaaaccatctcacagacctgtatggatcctatcattcacacacccatagcacgccccgtagagaaggatcactcagtcgcttttcgacgatcgcccccttgtgattctttccattcccattccactcacttttatttccttaccgtgcaggatatcagacgtatcgtctttgtgtatcttgggataacttattgccatgatcgagaggaagatagtactgttcaagaaaacagtttcggcgagatgaacacaagaaatgataaactttgcgaaagtaggttccatccgatatctgataaaataaaataagcaaaataataaaaactcaaactacttctgtatttgtctatggcgcttccatgcgatcattctgactatttttccaagtctcaacaacggaatcaagaagtcaagtaagattcagagagacacaggctagcaccaaaacggaagatgataatatgtcgagacacagatacaagcgaaaagaaaggaataactgctaccgtcgtataaaatgacaccccaagacatacagcccaaataaatatagaaggaaaaaaaactaatcccaaaaaataaaagtcaaaaggatacaacatcagatcttgacaagtctattcgattgacattctccagttagaatttcggtatgtcctattttcagtccgtcccatatttgaatgtacacataaggtcagagaagagcagaaaaccaaataaagtagaagaagcattcggagaggcaaacaaaaaagactcacgccctatccacgtcactcaactcggttgaggaggaaccctgttttctcctctctttgtcgtgtttcgcccttcgatccactatcgagcatcccgaggcaaataacgacgcgtacgttcaacgagaggaagaaaatgaacgagaatcagagacgttgctataaccaaggtgaagagccaatgtagaactcacagccttccttgaggcccatcccgaaacttcgccagattactaccgtgaaaatgaacgtcacgatcaagagggacatggccaatgcagctagaagagtcgcgtttcgtgtaaggactcggaacacatcaggcttccgacacgttgatgtcgtgtgtttttccatcctactggaaaaggggggaacttacaaaacacagtcaaacttttgatgatggtgctcaatcctatctgttgccaaattcttactgtcttgaggatgaaatacccaagtcccacggcgagaccgactaagaacgcgccctgtagaagtatgagggggaaagagaatatgccgatcagggcgactgacattgcgtggctctttggccggaatgacaggatccaacgttcaccgaaaccctttctcaggttgaacagaaagatagatgctgaaagaatgctgaacgtacaagcccgagccgatgttcataccgggcgctcatccagccaaggacgagcaaaagtattgtaaagggacacgcggctatagtaaggtagtattcccagtcctttgacaatacgagatatatcatctggttgaagacgcagtgttcaatcggaatgcaagaaatcaacctgagtgtacgagggaatctgtaaagaacttgaggagaaaaggaacatacttgaaacgaaaatcccagaaagaaaaacactgtaaggtccgcgcacggatgccgaagcgccgacacgtcagattgatagcgtgttgcttcgcgtagaagaataaagcgtccactcacaatcaaatttgcataggcaaatgaatacgttataatgaaagaatgattttttgagcctcctatcagctccaagagctttgtagacgtcccatccaaattctttatagatgaaccaactaagaatgatatacccaatctcacacaaccctatcattgccgggatgagactcgtaagaagcaggacaggaacaccattgaccagacttgttgcatcggcgttgaaggtcgtaccaaacgcgattcgaatctcgtcgatctggatgatcgagtatccgaggaacattgcattgaagacgacaatgccaaaaatctgaatgacatttcttccttggacggcatcgagagccatgagaagaagataaagatgcgcgagaccaaagatgcctagatagactggcaaacgcttttcagcagcggatccggtggaaagatggaaagacgtgttaagttggtaatattggtacaaaaggaacccttctatggcgaggtcggcaagcgtttggatgatgacgagaatgacgaacaatctagtcactagagatccaggcacgtaggagcggagccgacctggggggactgttttcgatttgctcgctataatggatgcgtccggcgtaggagaaggaggaggaggagagagagatgatcgtgggaaagtaggagacgtttggtggaagccatcaggcgtttcactcatataatggctcataggatgggcagaataacttgattgatcgttgtgcatccaatcctgttgaattcccactgattttccctcccaattgtatatggtagactctgaaagccctgttgtgagaggatgtaacgggatggggtcgctttgaaaatccgacttcaagttccgaggtgccgaggtgtagtgaggaccggttgacgaagaaggcggcgagtgattagtctgagatcccaacggcaagcgcgaaagctcaggaggagctcgatcagtatggtagataataggcgtggttgattcataagactgagcgctagatgatgatggaaaggaatgtaatgagggaggcagggccagctgacgtccgggctgaatcttttcggaaggatagccatctacatgacgggatgcataagcatatggaggagagaggtggtctaatggatcattatagtctgtccgtgaaccatccaaaggaggaccaaaatcggtaggcagctccgctggagacagagtggacggagaacgcgacaagtttgatgtatagtagtcgaacggagggagccgaagaggatcctcgtcgacggttgaggttcgttccgattgtttgtccggtggacgactggcgtcatatgggaatatcgtcatgctggatatctagatgttctttgtgctcctacgtgtcagtgagcgtgtaccaacaacaaacagacttgctcgttaaagtgtttgctttggtcgatgtcgtagaatgtgttcgcttgttttctcttgaccaaacgagccaaccgcgcggggttggtccaacccggttagtaaccggggttcaacctaatcgtgttttacgaccgatgatcgttaacgatagcgccaatgaagggatccagatcatgtgcgatattaggatcaggatatgggaactgtactgacgaggtctcagacgattgtttagttttcatttgagtatgatcgtatgtcccgggtggctctgagttttctgatacagtcgatcttatcccaaagaatactctctgctgtgcgtatgatggctaatgagctaggcatacgacacatcatgaggttgcaagcagcgcaaatcaaaatacagctgcggcttgatacaaccgatgaccagacaaaccaaaccagacactgatacaagagtgtgcaaacagagtttcgctcaatgctcgacggcaaccgaaaccagagccacagctactttcacggaaaaaaactcaacatgttctttgtgcgctccctatgtatacttcactgagcttatgctgttccaagagtagaagtatctatgtgctgaaaacacgatcgccgtctatgatggtaggcgtggtagcggtcgtccagcacattgtgtttaataagtacttaacacagatattcaaatatatcgctgactaggaatcaaccgcgtttttcttcattctatactctaaccggattgatctctatcactcaccttctttggtttctttgtctgttcggctctctcttctcgtgcatacgaacgcacacacatatacacatacatcgagatgacaggaggaagaagtattgtgagtaaagtgtttcaccacaaaatttcaacagcccggcctattcggtcattcctcgtccagtctcagttatatatccttcccgtgtcttttccgactggccgagacgcttgtccgactgttgactggccagatttgttagaggctcatgtctaattttgtaactgtttcaatcacaggccagagtatatcctgattccaacgagaactttggtcgttcttggtgggactatggtacgatccgtttgctcaatcgtttcaaacaatcatcatgacccttaaattggggccgagaagtattgtccttgaggcttacaccatagcttcttattttctttttcttttgtttttctttgatctgttgctatgcatcttgctggacgtgtcctctttgtgattctaattggtaatctgccctattcgggggtcatccagacaatcttcaggttcaatggggtagtcaagatcaatatgagatcgtccgtaaagtcggcagagggaaatattcggaggtaagttccttcatccttctctgatctcctcttgagatcaactatccgattcctctgaaaccagagctcatcgatctctttcttcaatcatttttgggcatcttgtactctcctcaggtctttgaaggaatctcgttaccttccaattcaaaatgcgttgtcaaagtgctcaagccggtgaagaaaaagaagatcaaacgagagatcaagattcttatgtgccttgccggaggaccgaacgtgatttcgctcttggacgttgttagagatgttcaggtacgtgtcacattttgtcgtatctcgagattagcctttcctccgtttggaaagcgctcaacaccatcagtcattctttgcaaactgacaattttaaaccacgcctcggatcgctgctcattccacaacaacaaacagtccaagacgccgtccatcgtattcgagtatatcaacaacattgacttcaaggctagtgaactctgtttgttaccaacatattctagccggttctcatatattaacgcgccaactatctggttcttcgcatccggcaggtcctctatcccaaattcacagatttcgatgttcgatactacattttcgagctcctcaaggtttgtttcatcatcttcaatgtctgtgccatatacttcccagacaacttgttgcttattcacgtcaaaatctcaacgtggttcaggccctggatttctgccactcaaaaggaattatgcacagagatgtcaagccgcataacgtcatgattgatcacgagaagcgcaaggtctgtctgatctctcttttaccttgatgaatgaatctgaactcttcctctattgtcattcaaaacatatcttcagttgagactgatcgattggggattggcagagttctaccaccctggcaccgaatacaatgttcgagtcgcatcgagatacttcaagggaccagaattgctagtcgacttccaggaatacgactatagtctgtgagtctctccttgatggatgtatattgatttggcgcaagccagcttccagacccgtttttgtctgacgattggaatacatcttcctcaatgctgaccctttggttcgatagggacatgtggagtctgggagcaatgtttgcatcaatgatcttcaggaaagaacccttcgtaagttcatcaaatacatctccatggtcatgctcatttctcacttttcttgtttcgatactttagttccacggatcagacaactatgatcagctgggtctgtcctttgatctggactggtatatatagcattgggcaacctgctgacatctataatttgttctcaccagtcaaaattgccaaagttctgggcactgatgagctttatgctgttcgtttgactttgatcttctctcctctgtcatcttttcaacgagtctctgacttacctccgctttgcctggccacgcctctgaacctgatatttatcagtacctggagcagtatgatatcgatctcgacccgcaatacgatgatagccttggaaggtatcagcgcaagccatggtcaaagtttatcacgaccgaaaaccagcgatatatctccaacgaagccatcgactttttggataggcttttgaagtatgtctttcatttgattctccttcctcctccctttttcttccttcctttcttacaagactttggcagataaaaatatgaaaaaagctgattctgaaattgacgaattttattgaaaccagatacgatcaccaacaacgaattactgcccgagaagcccaagatcacccgtactttgagcccgtgcggacagccgctgctgctgccgctgctgcagaagctgctgccaacaccactgcttcctcatccgccgaggacgcctaagggtgttgtcgtgttgtaaaagtcgaaagcgtaaaggaggtcaagtcagggaaaagcagaaacccaaatcattgttttgtcgtttttatcatcttttacttctctcagtggc

SEQ ID NO: 1005 - DNA, 12287 bp, Xanthophyllomyces dendrorhous
gtggccggaaaactctatttttcgtccgtttctttgttcatgttcttttaatagataatgatttttttaattttgtttcaaagaaaagagccatagaacacattaaaagaaaaaaaaaatcaaaaaagactagaccactaaaacgaagatagatgacaaaaaccgaaaatgacaatataacggcatacatatgaagatcgaaggaggaaaaaaaaaccccgaaaaagaagcttgagagggaggaacttacgacgaggagctcgtcatgtatacaactgctcagaacaaaagctgaacagagtcgtcaatcaagagggtgatcgtgatcatcatcagggtcatgtcatgtcatgtcaagatctgatcttttggtggagttggtcccgaccctcagactcctgaccaacgcacgaacagcaagttttcgaacaatgatacaatcgccgttataatcgtcgatgttagctcagagatagacttacatgagtcagcgacgtgagccagctgccgagcgaactgacgtgaggaatcaatccgtcaaacatgttcgttccctcatttgtacgcccgtccgatcgactatacgaggtcaaatcaagggtctagtccctcaagcaaagatcgaggactgaagaccaacaggttgattcaagtattattgcgatcaaagccggtacatcctgttctttgctcgaggcatgcgttcaaggttcgagaaatcaaggactagagagtaaagcatgggaataagttgtataactgaaaaacaagcaaaaaggagcgttgacatgattctcactaagatagtggagaagatgttagaggaaggtagaggatagcaaggacgcatcgacactgagcaagaagaacgcgatggtagcaaattcaaaaaaggtgggtggaggaggtaatcaattgaaccagacggaaggcgaggatgaccagtgttctgataagagaaaatttggaacaaagagaaatagaagtagaaaaacagaaacgggggagcggaaggacagagggttaaccaaaggcaaaaggagaatgtacagaagggtaaaggatggaaagaagaaagaggaagggcagaacgagaaaagtcaaatcggaggaagaaaggaaaagtccaatcgaacgaggagaggaagagtccaatcgcattttttcaatgacacgagaaggtatcaagtctgcgatgtgtttccggaagaaagctccaaaagtgataaaaacggatagaagagaactggagaacgacgaaagatggcgagaggtatttgaacttatgcaagatgctggtgtttgataatgatataaacgagtagaaggaagaaagagagatgaagaagaatggacgaaagggtaacaaggaaagtctgaaacgaacaaagaacgaaacagaccgcacagatatcaagagttgattgaattaagaaaaggagggcaagccaagtcagattgaaacacaacacaaaatcacccatatcagaaagccaacatgatcacgcctaaaatcaagagcaacaaagaaacgctcgctccgacgcgtctctcagccccggaagcttgagacgacgacgatgaggatgatgatggagcagaagcactctgtgtcgttgcgctatcggtcgaagaggcgaaccaactcgacggccaagagctcgtcggaagctcagctaactccgttgtcggtggtctgcccatttgaccagtaccaagcatgacccatgtggcttctgacggaacgccgttgacaacacagaataagagagccggaccaggcgcgatgacagctggattaggcggagcctgagagacgtggaagatggccgagccgtcatcagaggcagtgaaggaggaatcaagctcgacatgtcgcattcccactatgattattccagtccacaacatcagtctacaacagtcaagaatttagataaaacggtgggaggaaaacatactattgaaggcatgtgttgagaacccggttcgctcaatgacgaacttggtggcgttgatgtccgaatggctggtaaacgcatcagatgggagggacacattgaagtaatcaccaccataagagatattcttgggcatgccgacggggacgggctttggcttgtcccaataatcagggtaaaagatctcaacctgatactcggtcacgtaagtgatcgacggatcgatactcttgtcaacatctaaaaattgattatttttttaaggtgattagatatatatatgctactgcagactgtacagtcaaaactgtgtactcacaatcagggtttgggttggatccagagaccaagatggatccgtccatcaagagggtagccgaagaatgatataatctctggacggtgctcactccggccttagaccatcgctttccagacgcagccgatggatcaaagtaccaagattgaagaagaggctgatctccataagatcgaccgatggcccctgaaaacggaccgagtagaatcacgagtttggtcaattaactgatcgagaagagagacacggacatactcacaagattcatttccataaccggctgttccaagggcaacaccatttccaaaccaaagtcgtccatcaggaaggatgatgaactgtcccatggatcgaccagtatcgagcgggtcgtcatactcccactctacggatacgtcgggcgatatcttgacacacgtcttgtcggcaggatatctgtcaaagatgagagacgtggatattagaatattgcatctccgcgcgatcttaaagagagttcatggcgacagagagacaaacccagcgatgttccagttggtagtccactgatcagctttcaggtcggtacctccacagaacatcagggtggccgtccagttgttggcaggagtgagcggaagcatcgcaacagctccggaagcagggtaagttcgaacagcagaaggaacatcatccaaaagatctataaaaccgaacagtgggagtttagatatcgaatgtaccgcgtttctagtaaagactgaacatacattcggtattctttttgtagtcaaacacctcagtgccccagttggtttgaataaacaaatttcctgatatttcacagcgccagccgacaacgaaggattaagaaaccttctcgaaagattcaaagagagcgaaatgaaagttgaaaagaaaatgatatcaacgaaccactgggcaagagccaaacgaaactgaacaggttggcaggcaaggtggtggtcaaaatgttgagcgttaccggggagccacgggaagggaaaaactcgtaggttggattgttttgcgcttcggtattgacatagcctccccatgagcatcctccgacctagaagatatacgcatgacgtctcaatgaaccgatcaaaaaaacagtattcacagatagactgaagaagagaatactgacaatgatgatccttccgtcttcaagggtttctaaggtgggataccatcttcgagtggtcatgtacaggctttggtcgtcgttccactcgcaagccgtactgttatcacatggatccaacagactaatacacagttgatcgagatatatcagcaatccaggcgaagatgaagagtataatagagaaggcagcaacaactgtaccggatagcttttcctccatcgaaatcatcgtaaggctgcccacctgtttgagatgcagcggtcaaaccaccccaggtgatagcttggttcccaccgactatggaacagaatgagaaacaacagacatgagcaaaacgtatttaacacgcttgtctgggatcggcatggagtgatatgtaccgttcaaccaagtcccgttaccgagcacgtttcctccagcactaagttgatgaacaaggtcacaagggcataaatgtcagacgtaagatatccgaagagattgctcagagaaaacattaacggaccagaaggagttcgaaacgacgtccatggccctgaattcgttggtccgaagatcatattcagacccccaggcagctatatatacgatgcgtaacatcaccagggggagatcagaagggaaaacacaacaaccgggaagcagaccgatgtcacgtaccatgctctactcctgaagaagaagtgactcttaacggattgttttccgtcttatcaacgaagtatatcttattaggggaacccaagaaaagctgacacgaagatgtagtcggttgttttagagtcagcatgcatgagaaagaggatcaacagaaaggaacggtcagccaaaagatgttttagaacgaaggtttggcgggcagggctgcataggctacacgactgggacaagggaagaagagatgatatggtgtgtgtgtccgttgtgtattcgcccaagactctgtccgactagaatccttgacttttaacattttcttcttggcgcaacccaggcagaccagatccaaggtcgagcacgcgggtgtttggagaaagacacacaaagaaagcaaaagtagaatgacaaacctgttgtgcgctcacaccggagttaccgacgatttggaaagtgttagccatacttgcggctttcgccaatgatgcaccagctaggccgagaacgaccgattgaaacaagaccttggccaaggatgtcgatgtggagtgagaacaggaacgggagtaagattgagatgacggcccgacggactgccgtgactgtgaaaggaatgaagtggacatggagacgtgtcttttgtttgttttggtgttatgatgcccaggattaggagtgatcagggatatcgagagaaaaaaggaacgcccgctcggaagagtggtgtttatattcaacccgagaggtcgaaaagagagggggacacagaggagaagggtccagagaagcacaaggaagagtgtcccgactgaaaggccaaaggagacaggagggcgaagcgaaagtggaagtgaagggagggaaagagcgaagaaagagctagggtagaaaaggtgaagagtctgtaggaattcggtcaagataaaaacgaacgaggaaggcgtaagaagttggggttccccgaacattaaaacacacgatcgagacgaaccacacctttggtacacaccaaacggatacagatgatcttctcttttccgctctgatgaacctaatcagaacagacaaggaaggaggatgagatagaagagagaaggaaatataagaccgggaagatttgatggacgtcggatgagtagagacagccgacctgacagaacacacacaagaaagccaagagagaggtcgatggatgggtacgtatacttagatagtcgtaatataatattataaatcatatattattcacttaacacaacaaaccatcctcgaatagaaagctgttcgttttagaacgatcaccggtgacagacctcggcaggtacgttccttatatggacacacgtgatcgggaagaataggccacacgctgcatcacttgtcacccactcgatgcgtttgtcatgctagagcggaccccattcagataaagacattggtataacatgtttttttttctttctatctcagtcgaaagaaaaccataaagatgagagatggaaaaaaggaaagaggaaggaaaaagaaaagaaaagaaacaggagtaattctatgcgagtcttggctccttctatatctctttttatttgtttttaaggggagggaaatgtctatggtatgtatatatgcaggtttttccttcttctttgatctccttctgattcattcacactttacctcccttcgtctcatgagattggtctactcggttttagaatcgagagatatctcgaccggtgatcaagttcattccccagctgtagcagaaaagaagtgtttgtttgagtcaatcagaccggggtcaatacgtatgttcaggagggaagaggctactcactagacactcatcaacagcctgttcctccacgaactcatgctccagtaagcagatcgccagaggaaccaagcagacaacccggtgacctctcccttcggcccagacacgttggtggccgttcgatcaatgatagctcgccacgagccaaggtaaacctaagcacgacccggagaaaaacaaaagtcaatatcgatgagaacagcagataaatccttagggaagttcatatagacccaccatgcttcctttgttcctgaggatgaactcagtatcaggtttttcggttccagcgttgttcaagttggcggccaagttgagcgccttctggttagcaactgtgagaagaaaaaagatgtttcagaagatcagacgggtgttctaatccgattgaagggcaaaactgagaggtactgaccctgagcagtggcaggcaacttgggtccatccttgatcatcgagttgtctccgatagcgtatacgttcttcatcggctcaccggtctccttgtccaaaactcggaggaagttgtcggtaaagagcctaatcacgtcacatgccaatggtcatttcacccacagtcaacaaatgcgaaaaagattcaggatcagaaagaataagttgaggtggagtcgaagaaaaggaagtgaaacaatgataagaagactcacgactgcgatcgggggtccttatcagcctggctgatggacttgatcaacgggttgggctccaaaccggtactccacaccaaaagtccgaaaggcactttgcataaggaaacaagagggtcatgcgtcagctaggaaggaacaaagtgtagggagagaagaaatattaagtctgaaaactcacctttgccttcgccctcaatctccatccatccaggaccaacctcgaggactctggagttgggtcgaacgataacgttatccctggagaatcgcctcatagcgtactctcgaagggacctggtttcaagacaaaaagggaatcgatcatatattagtttgagtatgtacattgagatggccacagacacacaaacaacaaaacttactcctcgaatgagagaagaattccaggggcgacatcgtaaagcgaaatggtagagaatccaaccaactagttttattttttgtaacagtgcgctgtcagtaaaaaaaatcaattcgaaaagatgatgaaaagaaccagatacacacatcggggtaaattcgcttcatatcactggtgatgagatcgtgcaactcggccgcgaactcgatacctgtcggtccaccaccgacaattcggaaagccaaaagagcccggatctcagcctccttgatgaatggctgagaagctcgctcgaagcagtcaagaattcgctttcgaatagctcgagcatctcgaatgtccttgaggaaatgggcgtgctcgtacacctggagaaaatgtggccaaataaaattatggttagtaaccccggagaaacgagagccatagtgaaacacgtgcaactgagataacacccgctctaatctcgagatagtaaaggaaaaagaactcactccaggggttccaaaagtggcactgaaagcgccgacagagatgaccagcttgtcgtacccaacgacaaatcgctcatcctgatgctctgtaagacaagagaatttttaaataaataaaaaacgttgtcggttagatgactacaacacaggtacgatgttcaagatgtcagactaatgtacgcactctcaggagcgatggtcatggccttgttgtgcgctcgaggagggagcgaatgagatgacgatgtagcgggcgaaggaacggcagaattcaaagttacggtctgagtcttgaagtctattatcattgttcagtgaaaaaaggccgtagaaagaccgtgagaatgacggagttcatggattggttcttccaatgcgttggggaacaattcggatgcataagaacgaatcatacacaccgatcgactcagctcgagccatgctcaagttaacgttcttcaacctccttacaggctccaaagcggttcggaactcaagggttccaactgatgtactcgccaacagaggagtgaaggtgaagtatcccgtgggcgacacaacggtcactatcagagggtttgtaatggacggttacgaaacaatcaaaagttagtatacgaagcgtcttgagagaaaaaatgatgacctcctgtgcggacgatcatggaggagctcccagcctagaactctcactctccagaagagcatccctgagggaggagctgaagtcaggatatgaaataactcaccatcgtaaagcttgggatcaaggttctttgcctgtaggcatggaagaggaaaaagaaatggaaaaagtcccggtcaaccaatcaaatgtgttccgtcagctcgtctgttttgatcccatgcatcattctctatacgagattatgatcttgactgatgggaaaagaaggaagagcatagcacatacgacagtgaatcctccccaaccacttcctagaacgacgactcgctccctcttggtcgaagtcttcgggttgcagaccttcatgccgtggtcgaccgggacagcggtagcgaccttggtgaccgagacagatcgggcaagggcgagctgggaagagttgattccgaatcgagtggatcgttgaaggaacgacatggcctatctattcgagtgagaagaacaaggatgaagtgggtaaatgtggtatgcaaaccagacggtgatcactggagaggcaaggacaaagacaaggaggaaaaaacgaaagggtagaaaaagaaaagggagtgctgttgttggtcgcttttttttccttttccccaaattcttctggggtagtaaatgaaatgatttaaaaaaatgtggtcatcagcggagttccgccttggtgactaaccggctggatgcggcaaaagatctttcaagtattgtatgctcagttgaataaggtaggacaaacttacttaaccttagtttaaacatgtaagtatcaagatataccttctccgctcatctatcagctcggtttgatgagaacgtcgatcttttgagccaagacaaaacttccttcttattgaacaaatgctcacgatgcggatatactgatgaagagattactgatcccctcatttatgtgtgaagtaaccaactatctaaccgatcagaatgatcccgctacacaaaagtatcagattattatcctggcccccacatactcacacactttatgagccaagcgaacaaattgaatgattcagccttaccgcttgtcttgtcccacttgtggattagtttctggtgtagaagcaatgtcttcctacacaacctcctcttgacgagggtgtcataagaaaccccattcgacggtcattggctgagaagtcgtatcagtcgatttgttctgcatatttctcatccatcttgattttttcaatcggattacactcaaagggctgatcttattcatagcctcaagagtcgaggctgataaaaggcggagtaggaagcaattaaaaggaagaaagatcagatcgatctagtgtattttcattctttgtcaactcacactcaagctgctctctcaatatccggcacattcgataaacatgtctttcagtgagaaagaccctcaactggccaaacctgttcagtcggcagcagagagcagccagataggaatggatgggaacaagaacatatccaataacgagcttgaccaacacatcagctttattatatctcaactctacgacgaagcacgatgtcgaacatcaaagtgaagaagaagcgagagtgtctccttacctgaagatcgcatggaggtacaaatggtatgccttatcattattttcggaaacagcgaggctttctgtcctttttcttccttcgcctctctcgaacctgatgaacttcttgactcgatcgcaaagattgccttgctttataccgcttgctttcccatgggccagaactggacagactcatccatgggtcctttaaaaagtttgtcgtttgtcttgttcagcgcggtttggttacatgttgatatatgaatcctcaaaacagaatacactctgaaatcaacttggaatcaacagtaagactcgttggttatgataaccattcagtcactgaccgagctcataatgatgtttcatacttctttgtttagatactcagtttggaggcaagtagttttttcacaagtctttattttcgttcacgatttcacaacaatctttatgtcttcttgcctctcatagtcatcggaagtgctgggtccgtggccaacagtacatggccgatcatcggtggggtcgcgctcgactggtcagttgattttttagatactgtacgactctcgatacctcgctcgatggttttcttcttatcatcattgtcaccccaggtgcggacctgacatcacgactctggtatgcacaacgggtatcctcatcggcgccgtcgtttcttctgtaggagtaacagtcgaaatctggagaatccttgttgccggtaacattatcgtatgtctcactgtcgtgcgagctatgtaagaaagtaagctaaagtccttcctcgacgcctgcccggggatagatgggacttggaacggctatcttagattctgctcaggtttgtctggttatataaggatattcaatatatgatacacatgttcttacgaccgctctttcaaccgctgtctagcacaaactcttttaccattggttcgaagcaagtgggctcgcatttgctttcgggtgggtctatacgcttgttggattgactcttttattctagatacgtctactaatctcaatcttctcatttccctctacaggcttgagtctgcagtagccaagacggtctctcttgtcgccgggatgatagcagttcccattaaaggtggaactggatggtatgggtgagtactttgattatctgtgatattctttcgacgattcaagtgtgaacatatcggcatgcccatgatctaatgcaactttctaccgatcctatagatggagtttctagattccagttggtccatccttttgatatctagagttccttgggttccatgaactacacaaactgaaacttcgaattgcacaacctgtagtatttcgcgtattctctctctcgatcaacattgcctacgtcgttttcgagcgtaaagccgtccccactgagtttcgacttacttcggtccgggttgccgctatgaacgaactcaatccgaagaagtctggagtctctctcaaggccttatgactaatgccttaggtgcgtcttgacctgccatctcatcttatgtcataaggactcaacactgtccttcagacttctttgtgccgtcaatatctcctagcgttaccagtgcttttggatgctgcctatgactcagctcattcaatccggagcagctgggggatttggtcaaggatcggctgatctaatcacaatgaaaggttatactgtgagaactttctggttccgatgcttctctcatgctccttgaacgtctgacgcctgaaagtgctgttttccttcgtctgggccatgttatacaggaagctgtggttggtttcacgtccagcgcggaggatagtccgtatctgttccttgtctatacgatattcaaagactttcttagtctgctctcgatatggtgttgaaattttcttttgtttgatgtgcatatacatgtgttgtcaaatagttctacctatcgttctcacaccctgcatcggcttcatcgtcgacaggttcggacataggtttcacctcactgctatcgctcctttttctggatcatcgcatgcttgacaattggttttagctctatccatcctctcgtgcccgtcgtgatcgtcaatctggcaggaacgatcaacgctttcccagtcagtatctatgagcttcgtctcaatcgaatatgctcaatactaagatagttctatcatcttgttcttccacccattcagtttcaagtcactattccgctgcttgttgccgatcaagacaaactgggaatcgcatttgggtgagtttgatgaatttcgtttagatgcttcttgctgatcgccacgctgagactcacattctgtctatggtactcttggtactttgaatttacagtatctggagagcattcaacaacagtggctctactattatggtaagtatatatcccatgtcgagtctagctgcgttcgtatctcaatcaagaccatctctaactcaatacttcgacatcacaatcttcctgcgtaacatacaaataggatatcgcgtttggaatactgcaagatgggacagaaaatatgggatatgac

SEQ ID NO: 1006 - DNA, 97596 bp, Xanthophyllomyces dendrorhous
ctcaagacttgggcttttgttctttgtttttgttatatatttatcgactacaagtttttgagaagaggaatgacgttttctgagaaagagagaatcagaagagaagagcttattgagtatcggaatggtaagtgtctctttgccgtgctccaatctgaatatccatgatgatgcaagcgcagaagttggatagatgttctagcgatggttttgacttgttcattctacttcaatagcggatcctttgactgctcgaccagtcaacatgtgcgtaacgaagactgctcttggtcttctgttcccgatagtagttaccgcatgggtgggtttcctttattgctgtctattcgaatccaatttgatcttcaaattgataaaggtttgacttgtcccaccttttcgatcatgaactgcaggtcattttttttaagtatcttatcgaatgaatatcggctggcacaagttcgcgaagctcctcatctatttgtagtcatccgcaacaagtatttgttcctgaaattatacgacgttcttagtatgaccatcatgtctgaatgcatgtatcactttttttgtcaaagactaggaaagaaagatgttgtgtagggaaaaatatggttagggttggtgactgtgctacgtcatgagtaacacagcaagacgttcgccaactaatgaacaaacccgatcaaatcatcagaatcaaccaaccaaacattcaaggttactcagcattcatgcctcccgatccatctgctgcaaaactagcctcattgaaccgattgaaagctaaacagtccatccgagcatcggctttggctgcacaaaaaaacaaaccaccttcaccgaagaagacatctggaggaccaactactcagccgaaggatagtagggatgcaacaaagggattgaaacctgctgaactgccgaaactgacgaaagaccctagattagtgaggatcatcttttcgaaaatgttgaacttatgacttgttaaattttggactatttgaggttcaacgttgtatcctgttcttgctttctttgttggtgtggaatggttaggggaactactttgagtatgatctttctaaagtgagtacacttgaagctttcaatgccttaggtctgaatatgaagaaagtagaactcagcgttcgccgcatgtcatagatggtcaattctaggggaggtttcctggtcgaagatgatgagggtaattctgagaaggcgattcttgagaggcgtcgccgtgaagaacgagagcaggctcaaaaggctggtgcttgggagccaggtctgttttccctcttcctgtttttttctcatatcttggttgcatgcaagactgaccagttcggtgttttgtatcaaaggtcttgatccggaggcaagtcctcgttgtatgaaatgcgggacaatagagatcgaacgtcgatttatggatgtgtttggcgtggcggtttgtaatacgtgcaagaaggccgatccggacaagttttcgttgttgacgaaaacggagtgtaaggaggattatctgctgactgatggtgcgtcttcttcttttgcgaaacgagactgtctattcattggagaaaagagcgtcgtctgaccgtctctctttgtaaatttagacgagcttaacgacggatccatcctgcagcatatgcttcgtccgaacccccacggaggcgcgttcagtaacatgatgttattccttcgaacacaggtcgaatcgtttgcttttcagaaatggggtgggcccgatgagctggatgcagaatatgaacgtagggagcgggaaaagagagaaagaagagataaaaagtttcagaaaggactacgagagtgagtgatcatttcaaaagagtcatgtatgcgctttgaatacaactgctgatcgctatcctccatcttgctctgttttgaattaggcttcgttcgagaacaaaaaacaatccgtatcaacaacgtcgggatgcagaacatgttcatgaattcaccatgcgtcctgaagccagctgcaaacggtgcgaggactgtgggtttgagattcaaatcgagttgatctaaacatcgatcaagaaaatttgtcgttagagaatatagaagcagatcctataagtcctgttgtttaaatcatattgtaaacttctttttctatcatgtatcatataatataaagaggtttctatctatatttttcctacaagacgaggaacaaagagtaaatacaactattgggtatactgatagacaattacaacaatgtgaagcgctcctttgagtagtcaaatcagattcccatctttttcgctgcgttctcccagtaggctccttcgagttcacgcatgtccagcgaactgcaattcgaaacagatcgtcgctcccgcttgagcgccttttccttgacatctgtttgagatgattcgaccgatttagaatattgagaagacgaagtcttcgttggcttagcggatgaaacatccttgaaggaggcttttgtcatcttgatacggcgaaaaaacgggacgggaaggggctcgtcccgggctggccgaactggcattggggcgaaaggcgtgaagatgatgtgtgaaggagtattgaatagtgcgttcatgttcgtgtttctttcgatagtataggcagaagaagaagaaacaattattatcagaggcttgatttgatacgagacacaagagctgaacagacaggatttacaattgacaggtatctccaatcaagagaagattatagccagaagaaatcaggcaactgtgtttatgaggggaaaggacgcataaacaatctttctgtcatcttatatagcagaaccggaagactagtctacgagatattgaaacatgtcggtcatcatgttaatcctgacagatagtagcagcaaagaacgggtcaagagtcaaaggtcgagagctcaagtcggagttgtagttgactgttgagagcaagagtgagcgtgttctggagatttatcagcgaatccgatcaaaggggtaatcagatcaaagggagatcatccatgtggctttttacaggggttatgagatttttccgaagctttcaaccctcagcatactctaaacaaggatacatactgtcgaaataatcgttcagagcgcaatcaatattgaaagaacaagtatacatgaaaagaagcaagcaaagcgagaagcagtcaccgcgagttatggcattcaacaggtgtcattcatcaatctcgtgtgtatttctagacaaccatccttctgcaacccaaacatagaatcacttgatgtcgccacaagctcagggttagaggaagacgagcgtgtagagttctttccagaatatagcatgcttagcagaagtggccaggaaggcaaacgaacaggtatcatatacatttaatcccaccgtcctatcctgctacttgatcgccttgcaccatttactggtatgtactgacaaaccccatataacaacagatcaggttggcagacaagctcagttcgaatggtttctaatacaacaccgagttgaatttcctagcggagaaatctagcaacgaccaccagccaggtcgggcgaggtgagagaatgcttacgtaaaggttgcacggaattatcatacctgttcctagtgtctgtacccacttgttcctcgaatagcgatccgaccatcatcgtcgtcaccaccactacctacaccgtcttcactcattcgaagatgtcggcgaatccaggctataatgtaccatcaattcctcaggacactgttcatctggcgatccacttgccagcaccaacagcctcctcgcttccgcttgccactgcacttgcttctcagatcgctggctttgtcaagcagcttctcccttcgagttggatttggcatcgagatgctctcgaactcaacgtagttgaagataacaaactgcagacaagaacaaaccatgacggaagaagctcagaggaccactctgaaaaaaggttcaggctaggagcgactgtcagagtcggagattcgatagaggatgaatgggttgctgtctggcttctcagagagatcacgactagatgggatgatttggtggcttcgtaagtttcgtttcacataagtttcttactggattcatcctttgatagcgcgaggattcaagacaaaatacacctcttgtcgagcgtatccatatcacttctgatcagatgaatagaggataggtaactcgtgaagtctcacctctttcgtttatacttacttcttcctcaatctagaatatatgactccgacggagattttctcttaatcgaggctgctcatgttctccccaattgggtgacaccctctaattctgaaaatagggtgcgttcttccagcaactgttacacgctgtatactgaaagccaatcgttttgctcaatttttatgacgaccacttttcctgatgttaattcgatgaatttcaggtgtggatttccaatggatcacttcacttgattcccctcagtgtgttctctccgatctcgacaagaccgccaaaacgggaccggcgtttgacaaacgctgattccgacgatgaagacgagaacgacggaggaccaacggccgatgagcgagcagtcgggtggatcgagctgaataaggcgatagaggagataagggcaggtcggtggagggaccgaaaggtcgaacgggccgtttgggagcggatttctaggtatgtgttttggtcaaaaaaaaagactggtcttgtcaaaaatccttgttctgattattcaatgcacgcgctttatggcatatcatgatgatagctatcccgatgcgctcagagatcatcaacatcgtgctacaatgtatctacctacacccatcgctcttgccctcgctcgtcagccgtcactaatccagaaggctgtcgaaacgttctacactcgagatccaacccaacttcgcaaagctgcacgaatgactcatttccctccagcggactcgacattgacccaggtaacgatgacccgcactgcatatgctcagttaaagggacaagagttctttccgagcaaagcatttggtccagagtggatggacgcactcaccggggatgtctcaactcctgatcgagctgcagagaaagaacacagagatcgaggagtcaaggtggctgttggattcgagattctatgtggggaatcgaaggcaaaaacgaagacgtacccggggttagatgtctcggaagaagcaggccaagtcagactggatgcgctcaagcgccaagaagattttaaaacgtatctccatacgcttgagaaggctggttggtttggtgatggggagatcgagggcagtgagcggtggaaatcaagagaaagagacgcagcggcgggatggcttaagctaggaaagcctgtcgaggatgagtcagtgacattcaacgactgccttcgtattttactgatcatatagagtatacttaaagtgttgctgttcggttcatgttcatgcttccagctcttcgcgaccaacttttgccactctcttctcatccgcgcttttactgcccggtccttcagatgcttccgagcttatgccctctgagccggatgactccgaaaattggctggaggtggatccagctcagcttgatacccttatgcaagaacggtcgtccggccgtgcacctggcacagaaggcgagggacatgtcagagaagaaggggatgtggatatggaatttttgggcgatggatccgaggcggaaggtgtcaaaaagttggaagagttagcgagaaaggtgggaagtttcgtggatggacaaggtcagttggaaggagcaatctttgatgagtgagtgactattcgcctttgtcccacagaacagatgacagaatgtatctgacgcattctgtccactttctcttcctttcaagtgagatgctctcagaagatgaaggcggagctgattctgatgcagacgatgcccagctcgaaagagatatggctgccgatcttgatgatctgtcttcttccgatgaagaagataagattcctactctgactccagctcaacgagtcactcgaatggcaaatctcgtaaaaccccttgatccatctgaatggggattccaaaaccaaaatcctccagctctgtcttccgagcaaccgaccgccaccatgacctcgtcttctgccgcgcctgtctccaatgctgagagctcgattcctatttcagctgagagccgtacattggaggacgtcgatcgacagcgaaaacttcgagagatccgagacgagcaagcaaggaagctgccaccggtcaagatgcgacgaccgatcttaccaaaagactcgtatgatggggtggattcggatgatgaatctgacgatcaagacgggatcaacgaaatacccggcgggaacgcagggatcagtgctggattgaaagaggctatgaagaatgatgcagctgctgatggcgtcatggatgagatagacgaggaagaagatgaggatctaccgcaagttctaggcgaaatggaagtggatatgggagaggaggaagaagactttttgaaatttgctagagatgccttggggttggatgaacgaatgtgggcgaacatcttgaaggatcgtgaacagcgaggaggtgagtgttacaatgctgcatttcaccgcttcagatatcaccctccaactgacatatgggctgttcttgactttttccgccttggaagtttttgtaccgacatccaaaccttccaaaacagaacttcccaagaaaacttctactgaactcaaatctgcttcactctcctccaaaccggcttcgttatctaaatcagcttccaaaaagacaactacacagtcatcttccaccttcacctccacctcaaaggctgtccgatttgaggacgtacttcccgatgaaccaccggcacattcgacgaaaccagcgtcgtcaaccgatatgcctcttcgcgaacgtcgggatggaccgaaaccagaggccccaccaggcgccatccctgacccttctctgaattcgttcgaggctgtgatgcaaaagatggatgaagaactcgagaggcgaaagtctggcaagggcaatccttcgtcatcggcgacggccgctaccccttcgagtaaacctaaagtggagccgaagaataaaccgaaaccaattaattcatcaacaaacaagaaacaaccgtcatctccgtccgcatcgacagcttccaccaaacctagtggaaagggagcgccctcgttcgatttcttgaccgcgtctgacaaaccaccaaagaacacacccgtgatggacagtgattctgatagagatatggatgacggcgaatctgatttcgatcctgacgatcccatgctcgctatggacgccgagcttcgggctgctttgctcgctgcaggtgacctcggatcggacgatgaagcagaaggacttgaaggggacgataagatagactacaatctcatcaaacactttttagagagttataaaagtcagggagggatggctggtccagtggggaacttgttgggcagactaaagcagtaggctccgttaatgtataacaaaacaaaaaagattagagcatgttctcttttgtagctttcatcggatttgattagatgaatcaaccgcatcatcagataaattattgcgaatgtgatgacatatgtaataagaccaagatattgagaaaaggttccaagattataattgatttttttagagtagatgccttcttgtcaatgtgatgcgaagtgataataaaatgtaaaagaaaaccgcaagcgagatttgcatttgaagccacgaaagagttatgaggtcgaagttgtttgcatttaaaatgaaccaaaaaaaaaggtgctatggggagagaaacagtgaaaagaaggtgtgattagttggtttggtctggcgcttttttttatgtttgtccagaaacaaccaaaaagggaagagagagatcgggccgacgtaccagatgaaatcgaagaagaagtaagtgctgaagaatgtcctacccagattcacccaccagatctttcagcgaataatgttttggcgaagcgctcaaacccttccctacacccatcccaaagtccgaccaagtcctctcgtgtaaacgagacacgggtcttttgttgggtgatctaccagaccaaccttgtccgaattcgcttcttgtccttgtatggttctttccaggtgacctcctctgtgttccatccatttgttctctcgaccaagcgccaatcggtgatgtcaatgatgttggtgatgaggataccgaagacttgaacagagagggagtctctttggtaggagaaggaggaacgagcgatggaattggtaaaaacgtcaaccgaccagatgtcgtgctgaatgtcgaaggtgagagcgacagggtgagtgacagcgtgttattcgtagaaggcgagattgcttcggtaggatgaagcggagaaacagaatgcaagtcattcattgttgttcgtttcgttggagtctgaccgggtgtgattattccagcgcttgagccaaaggttttggatgagttagatgccatagtggtcgaggtgacggtagtgttggtgctcgaattgaggcttgatcctaaattgttcttcctctcgtattctcgacggggtgtctgatcagcatataaattggtgttcaacggctgaatcggccgtttcttcttgataacaaccttccagatgatctcttcttcctcctcctcctcgtcatcatctactccgcttccattaggttttccagagtcttctgaggaagacacactagagtatccatgtttgacacaactcacgcagacgtagaggccaccccctagatcgttccaagctgtcgactcgtctttttgaaccgacacaggatcgtcctttgcatcagacttcaaagcttcagtgccgtctttgtctttcgctgccacatcgtccaagacgggcgatttgatctcgatctcatgtttggattctgtggattcagtttcaaactgtctggttgtcaagtccccttcgacgacgatcggcgtcgacatcggcgtcagagcctctcctttatttgatcgtgatcggatgaacgatggatggttgggcggagcagggaacaaatcgctaaatctcaagaagcgcgctgtcgaatagttagagttgggttgatggccgtttgaatccttgaccgacaacgaagtcgttgaggaattggtcgagattgaagaatatctagagcgagaagagcttcttgagctgtttcggcctaaaattggtaacttcgtagtcgagatttcttcggtgcgatcgtgaacggatgacgatttcgacatttcgaacgaactgtttgatcggatcgaaccgggtcgatgtcttgatctggctagaaccgtcggatttatcatcgaaggtagcaatgtagagtttcttctacttccgttctggctgtcgctgtggttgttggttgtaaattcgggaatggcttcagaagccgccaaagcagccgccgaagaggatgaagagacggacgaagctgttgattgataggaaagagatcgatggtgcatcggtcttgagtagttcgttctaggaatcccgttcaagaatatgggtataggcatacccgctccgttcgctcgacttccaaacgtggccgatatcctcggagcctttgatgatgatgatgattgtgatgctgataaaatagctgttgtcgctgtcgtcactggcactgtcggcgcgctcgttgccgaatcgaaatccgtcatcccaacatttgccgcgctctcatggtttccagcccacacggggaagtcttggtctggagccagaggcaagggtgagggtgaaggcgaagcaatatggatggggtgtttgaccgaaggcagaacaagtccattcgatacgatctttcgggtagctgtcgggagatctgtactccaactcctggacatcccttttgtctccccctcacattctgctccatctccatctttatgatctcttgtgaggccgccgggtttgaatcggtccacagttgatcgacttcgaaggacggaaaccgggctagaatccggctcctgacccggattgacagccggactgaccttattgggacctttcagaccggagttcaaggatgccttggccgatatccttgtcctgcttgttgaagtgatcgaccctgacggcgattttaaaacaggagtcgtcgaagttttaaattgatctcgatctcgagtcctagatgcaccatccttgacctttgaaggagatcgtaacctccagagtagattcgtcttgttcttgttcggctttgagaatgagtttgatctctgagcaacacccgaggattctgatatctgtcggtccgcaacttggggcgcgtgcttgccagagttcgactttgattcttcggacgattgaagatgagtttgggtagagggagaagaaccgatagatcgttcgatgttcttcggctttcctaccgtctgcgtcgtgttttttgtagacgatgataacggaatttctgtcaaagatcttgtctgcgttgagttggtcctgggagatcctcctcccccattaatagatttcgttcgggatgtacgtcctatcgatccgtttgtgcgtaaactatttctttctctgatggaatcaggcccgatacctgtaccggtgctggtactgttgccagtcgaaattctaaaaggacagagaccacaaactcagagcgttaatgacgcgttccttccaaccttgatctgaagacacagtccacggctatcactacagacctggacttactattgacttacctcgatttgatagttctaggcagagaagagttcgaagatatggatcgtcgaccttttgtcgcttgggcttgattgatacgaccctgagatgggactggctgagaagtcggatggagactatatgtagtagtaatggtaggagttgggatcgcattctgatcggaagggacttgtgatttctgggatgtcccggaggagttggatgaagatgcgaatccgaacggcatggttttctctctaatggctttccttccgagaaacccaactaaacaggagacagtgtgtgtgtgtgtgtatgtatgtatgtgagtatgtatatatgtgtagaaggaaagaacgaaagatgtgagtgatgaacaaaagagcttggtttgtcgacttatctttccgtctttctcatcacttcaggagctgaaacaaaacagacaaaaaaaaacaagcgcgtggttacaatacactggatcctttgcgccatcactcatgccatgctctctccgggtcttttgatttgagccccaatcagagtcactgagcggtacatgtcaagaatagtcaacgatggttgttcttctgtaattcttcctgtattgtatctggtcatccggaatgacgactgtatcgaagcaacggaatttaacaccactgtgtgccacgctcgtaaacgccgatcgactgaaggagaataaacttttctttatctacagaacatgcgtgtttgcgatctaatcagtgtacaaacggaggagactgtttgtgatgacaggcgatacagaacgccaagaatgcgacagggaattggaaaaagagtgacaagaggtgaggcgagagaaaggaaactttgagaacagattgtagaaaagagagcgaagcaagaacaaatcccagataaggaaccaaaagatgaagagagcgacaacccaaactaaagaataaaagtaagaagaacaaggaaaaacaagggaatagccatcctaacggatgtcttagttggccttggtcccgtcttcagggtcctcgagctcaatggcggaatcgctaacggatcccttttcggagtgagggaaagttttggcaagaccgtgcctgttcttgtaaaacatgtagtcggctccgtcctcgacgaattggcattcttggaaattcttccagagcgaaacaaacacgttctcggtactgtacacgtagtgctctccgaggaagaccttgagggcctccgtagcctcccaggcgttgtctgtaatagataagagatgacaaacaaatatgagttatggtatatgaagtcataaagaaaaggaacttacagtgagggatcttggaagagacatggtggcagatgtgggtctcagaaataccgtgctgcaagtaagctccaacaaagccgagaacgtttcgatcgacggtggccaaggcacctcgggagaagttccaggtctcgttactgtagtgagctgtaaaaaggaaggaaggaattgaataaaatcatcaggaaatctgtaagaggacgagagggcgttgctcacgaataaggggatcggtgtgttgcaagaaggtgatcaaaaccaaccagctgaaaggcaaaagttttgagggtgatatttagtcagtcctctcataggctgacaggacaggaacaataatgaaagatgattgtactcactggttgacccacatgtagggaacaagccagaaagtggccatctcctgccaagatcgcatcttgctccagtagaccatgataccgataacagtggcgattccgacgtcggaccagatgatgtcccagaagtctcgcgatttgaagatcttggaggagggcaaaaagtggttgacggaccagccgtagtgcttctgtccagaagcgttgatgataaggtagaggggaagtccaaagatctggtgtccgattagtcgagcgagcacaacgatgggagcatcggaaaaggcctcggtgatggcagagtgagtctcgtgctgtcgatcctcggaaacctccatgccgaagaagtcctccttgtcagggttaaaggcgggtagttttcgatcggatcgtgttcgagcggcgaaaacttcatctctggtggcagagccacaagcggcatggtgctttccgtgggagatccgccaagagtggtagggaaccatccagattgagtggaagatccaaccaacgatgtcattcaaaatcttggattccgagaaggcgccgtgaccggcctcgtgagcgaggacccagatacccattccgatgcaaccggctgcgaaccagtaaacgttgtaaagaacaaccttgagagccaagttaggccagtagggaaggtcactataaggacgaaaagatggtttcagcttcagcctgggtggtcataactagaagaaaaaacaatggacatgaagaacaaagaaaagagcatacagataggtgagaagagtgggaatatgccaggcagcgtaagagaaggatccatagatagcaaggtcctggacgacgtatcggagggacttgatagcagatcgatggaagcagtgggcactttgagacaaacatcggggtataggatatgagtaacagattgatggtaaaagaaccagagagaacaacaagaaagcggaggatagaaagagtcagaacactcacgggatggcatccaacaatctgatcgagatgaattcgccatcgagatgggaaggaaaaaaaagaaggaagaaaaaaaaaatcagccattgggcgcttagatggccaagagaaaacaggcaccgccagcgcgcaacgagcgtcgccctcataagaaccacgaaagccgaatgactgactgcttgacggtgaactcagggaccttgaaggcctgtcccttctcatgggactggatgtgagttccgttcggcccattaacgtatccggtagagggctgaactttggacgacctggtcttcacagccgaggctggtcgggtagacgctgtcgtggtggttggaccggccattataagagattgagaaaagagagatgaaggcgagcttgatcccttttcagtgaaggataggatggggtgagagagagggagtcagagtcagacaatgaacgaacaagactgaagaaggggaacaaaaagaaaagaaaaaaaaatgctaaagaggatggagcgataggattttcttccggttagtaaccgaaatggtgggaagcctgcggccaatcgacaccgcccgcttctttacggcgttcctctttggttacttccgatccggtccgatgcagcctcggaagggatcgagcacgaccgatcccggtcggaaccgtaactttgtgctgccgattgtcagggatacgggttgggtatcacgtgatctgatacgtgggttacccctacaggctattctttcccttaatcccttatgcctcttcacccattttccatcatgctctagtttgtatggttcatgcctcatcatctttagttctcatggtctcgaggctctctaggctcgtcatatgtatatctatagtggcagaccaaatgcgcgagaggtcctgatatataacgaggacactctcgcgctttcttggataagagttttcctcaagctgagattcttgtcgaaatctcttatcccaagtacattgttaatgtctggtctgtttcagtcatcctaatcgccacagagtctaagtgccatcccgtgaaccaagtgattacacttgtttaccttctcaaacaccaagccttacaccgatggtggttacagtcgttgctatcgattcgcttacggcatcatcccagtaaccatctacccaaccgttgggcgcctagatgagatgattgaagacgtctcaggctacactcactatcagataacatgaattcttatcgtccgctggccttcggccggttctgggtgttcaacatctttgggcccgtttccgtttatcaaaattatcattattttcttctgtttctcttcctcctatcttccttcttttgactcattcgtcaagggaacatctgtcttcgagtcattcgcacaacgcaagagagcttcctgactgatctttaacaggagatctagtttatacctttttgctctcgtctctctcaccttttattcatccaccttctctttcgttatgtccatcgtcggtgtcgtctttctcacccgccatggagataggcaggttcgtactctggatacttattatccagtccaactagccaatcgctaggtttccgtctcgctcactcttgttgcaatccctttttcccctttccttgtttgttttttcatcattctgttcttcttggtttcttttctttctcttacagggatactaccaagtcagtccatgccatccatgcacatgtctcatttgcttctctcgctctccttcatctccaaactgaatagatcactgctcacgcccgtctatcgctcagagcccgagttgtgagtccctccgttccgagatatttgctgcgcgtgaagaaagtttggaatgcattggcctccaaaaataaaacacttactctatcacttatctcttggcgcgccttgaccgatggtagcttatactgcctcggacactacgatcactgctctaggtaagaacgagtccagtgtttcgtccagatcttctcgttcgccttgctgaaactgctatccgaccgctgcgtgtcctcgctaggtgaacaacagcacttccaatcgggctcggctcttcgaaacagatacgcaaatagctcttcggcttatgcaatccaaggcttggattggccgttgcctaatctaaaagaaatagatgccaaggcagagtgagtaaaaagagaaagaagaattcccaagacgatgactgcatacgttggccacctcactgacgatttgtcctttctgtctcttgtccagttcttctgaaggtcaagtcatcctagactccgcgtacgcgttcttccaaggtttctacccagcctcgtcctaccaaaacacgacgctcgccaacggaacaactatcttttctccgcttggtggttatacttatatcccggtcgagtcggttgagtttgcggacgacgtctcatttgaggcttacagtgattgtccaaactttactgctaggaacaccgcgatttgtaggtagctttctctgtgtcttcctctcgccttgctcaggccttttgttaatcttcctcatccccttatcacctacactgacgatctgtgcgcaacgtctctattttcaatctcaaagacaattctaccgggttcaaagcggtggcagcaaataacagcgacttcttaaagtcccttgcgccccttgtcggagagcgaaacgttacgctgtccaacatgtggagtaagtcatcctttctgtcttcgatctctaagaagccggcgctgaactctgcctctttcgcccgttcttcagatatctttgactacatgaatgtcaattgtgcgttctgtcttcctctttctcttgactgtacgcccactcttcatctgatcgttgagagtgttcgtttattgcagatatacacaatgcgacattctataacttgatcagtctcgagactatggtttgttttcctttctttcgagtccaagcgcgttctcctttcatagactcacaacgagtttccgtaatcttgactcgggcgagtagaagcaagctcgggctttggccaactaccacgaatggtctgtcttcaccgatccctccccatctggaatcggtgagtcctacctatccgcttctcattaattatcccggagcatagagagactcaaggatagcattcgttatgtgttcatagggaacgtcgctggaagggcgctcttgccgaacattctgaacggagtacaagatgtggcggacgctacgaacactctcaaaatggtctaccttggtccgtcttgtttctttttctatgtctttgtgcttatctgtgttcctcttgcctttcctttctttctttgaacaaagctgattttctcgttgttattccaacggttgaatctgtacaacaggggcttcgtacaaaccagtccgtctgcctttctcttgacttgttccctcagtcgttcgcgtaagaaattaatccgctgacatccctttgaaacatggaatacgcacaatcaagttcctgtctttcttcaatatgacagaggtcgataaccacaacattgtcgattacgcatcggtcatgactcttgaagtctggaactctactacaggcgctcaaaccgtgcggatgaatttgtcggtccacctttcttttccctcccgcaaactctgattctctttctatcccgagtagatcagttgacattttccttgtgaagataatgatcagccggaacggatcctcgaccagagacgacggttcggatctggtccaaatgtcgatgttcaaccaatcagagatcccactggatacattcttggatactcttactccttatgctttgactgaggtcgtacgtcctctcttccgtgcttgcttcctgctttgcaaagacgatgatgtggttctactgatcttcgggtctcaaattcgatcgatcgttaggcatggtgcaatgcttgcgggaataacagcactcactcctgtgacatctacgctgagatcagcaaactcaattccactctatcctctttggcaaactctacgtcttacgcatccatcacctcgaccgacggaaaacaacacgtcagccctgtagtcgctggtgtcataggagcaatgctcgcctgggtcgtcgctgctttggctttcgtcctttgggaagcttataagaggaaaactgtgccaagaggttggagtaggaacggaagggccacggacagtgtaagattttgatcctttctttctttctttctttctttctttctttctctctttctttatccatttttcattctggtttctcaagagaacagaaccagcgtctgaataccttgctccttttcttttttccaacgtctgacctcgacaggcgtatcagctccacacgacatccagggctggctccttcacctctgccaagtaaaaccctcctttaggactcttctgctcttatcatgaaccgttccgccgtccgcgcggcccccttgcttccggctgtttccacttttatttcctaattctgagggattttggcgtctattttttgttgttcgtatgcaaccctggtttttctggtctgtgtgtatacaatgatccattccaaaagtctgttctctgagttgcgggtctaagttaggtcagattggatcgaattcgtcgatggggaagtgcgcggagaggcctactatctgttcatcgtcttcttatccacaagagaaacgaagggcggatggaacacgatgtctatcgaaacgttatctacattgtcgaaagaaacacacaagagaaggctcgaatcacagcgcaagactaaatcgttctgtcaccgtgtaacttctctatgtacagacatcctccttcctctcactgctaaacaaaggaagggaatgcttcaggataaactatccgaggttcctgatatcaggttgtaagtcttttcacttcttgtttgatccttctcgttgactcttccggtgtctttcttctaaatctgctgccagttaaactctggtcaggcgaaggatgcgggaaagaaacaaggaaacgtctataaaggtatcatccctcaaaaaggaaaaaagatcgaatcggaagagttatatagagaatagtaaagctcgagaagcgagaagcaatatggagaagatcaagaggagaaaacgtgatgcttaaaagacatgagaaacacgaaggttgggtaggaggttctgatggagaaggagagagaagcaggtatgtagactatcagatttcttttttcttttcttttccactcgacttaagcagaagcggcgagctcgacggccttgttggcggcctcgtccaagttgtctgtttcgatatcaaaacaccaggttagataagattagacaccgaaagcaaaacaaagcaggtcagcgggaaaaagaaacgtaccgaaggggtagatcttcatgccagacgctcggatcatctccttggcctcagcgtcagcggttccctgcaatcggacgatcaaagggacggtcatgtcgagctccttggtggccttgatgataccctcggcgatgacatcacatcgcatgataccaccgaaaatgttgacgaagatggccttgaccttcttttcgctcagaacaatctcgaaagccttcttgacggcagaagcggtagctcctcctccaacgtccaagaagttagcgggatcaccaccgttgagcttcaagacatccatcgtggccatggcaagaccggctccgttgacgaggcaaccgatgtttccatcaagcttgatgtagttcaatccgtacttggcagcgtcaacctctccgggatcctcctgagacttgtctcggagagcaaagacatcagcctgtcggaactcggcgttatcgtcgaaaccgaacttggcgtccatgcaaaggatggtaccgtcctcgagctctcccatagggttgatctcgatctgggtggcgtccttctccttgaagatcttgtaaaggttctggaacaccttggcggcctgcttcctgtaaacgtgaaagaggtgcgggaagtgtcagctctccatagttgcgtgatttgggtcagagagaaactgtgtcaagacgaacctggagctctcgctctcaactccgatcttgacggcaacctcataggcctcagcgtcggtcaaaccatgctcataagagataggagtggtgatgatggcctcaggggagtcgtgggcaacctcctcaatgttcatacctccctgggcggatgcgacaagaacaggggtctgggtagttcgatcagcgaggacagcaacgtagtactccttcttgggaggggttcgctcagcgagcataacctgtgaggcagagaaatagagatatgtataagcttgaagaaagagaggcatgccagaagtattgataatacgaacggcgttgcaggctcggccctcggcaccagtctgcttggtgatgaggaactctccgagcatcttggaagcgtactccttggcctgagcaggactatttgagaggaaaaaagagacaggtgttttgttatgagtcggatcgtgatgatggtagacgacaatcaaataggggagatgggacgaacgagtcggtcatgtgaacacctccctggaaaccgctggagaagtgaccctttcctcgacctccagcgaggacctgggccttgatcacgagctcattctgcttgtcgcctagagagtgaaagttagaggtgacaaagtggtgccggggaggtgtagacgatgattaaggtagacgagatgaggaagaaatcaatatcgtatgaatgggacgtgaggacgacacaatgtcgaacgtgggcgtgaaccagcaattcaaagagacgtgtatcagttggcttaatcggcagtgaatacaaaccaggcaggatgatgaggaggcagtgaaaggaagcaggaggagaatggaaagggagccagggaaaggcgaggaagaggagaaagggagaagaaaaaaggagaggcggcagatgaaataaaatgatgggtagatacaagcttccaatcagaacggaggggctccaacgctgttggtccattgccgcacgcatcctccgtttcctcccactgattttcactatggtgaaagcagcgtgaaggtttctctgtcgacgtctcctccactgttaacattgttgcctcttcgttctctaatgggcatccaaaagccgaaacaacaggactgtaaagagtgattgagtagatgaacttgaacgtaccgaaagacttggcaacctgctcggcctcctcagcggtgaaagcgggcttggaaaccggggtagcgattccgaactggcgagaggaagagatttcagaacaggacgatcgggtagcataaggaaaagaaagataccagcacgaaaagtagatagagatgtcaacacgcttgcacagtacctgaaaaaaagaaagagaaaacgaaaggtctttgtttgcgtacgtcgttgaggagcttgacggactggtactcgtggatcgagagctgcctggctccggctcgcttggcctgaacggaggccctgttgaggagggatcgggagaacataatgctagagatgaggaggcagaaaagaaagagagatgagggatggagagaagaggaagagaggaggacagctgcaaaccaagggcgttaagggaaaaaaagaaaaaaggaggtcaaagcggctcaccgcgtaatcgatcgtaaccattaaatggtatggttactaccaacttttaaggtccgtgcccgaataaagccgaggcaatcaggcgatgtatcgagggataccgagggctggagcatattcgatcagatctcattaatgaacgtcctcttgtatacttctctcatttgctctagcgaaaggtaacgcgatggaagaactaggaaaggcagaaaacttgtctctcagaccgtctcttgtagggagattctcaaccacaaacgtggaacaaagtctcggaaacccaggaactcagaaacgaacgttgacagaatcgacagaaaggaacgggagcgagagtctgacagctactcaaccatcgaaaggagttctcagtgttagcatcgtcagtagccaaatcgacaaaccatttttttatgtctaactaggttggccaagagccctccttattccagccaatatctgtcaaagacagtttgtttgggttgatctcaatctccaagcgcttcgacaagggatctccaggcagagtgttgacaaagctcaatctttttcacattgatcgtgcccacatccttgttttcttatctctgacctgagcttcctgcctgacgaatatcgcggttcctagttccgttgtttctttgtcacatcgtaattgagctcgtatttgatgttgtggcttcatctgataatcttctggctgttagccaactaggaacagaaatccgttcatgaggacatatgagcagacagtttagcatattcgcactcatctttactgatggaaaaatcgccatgaatatgaacgtgatgagagcgactgataacaggcagcttgttaagagccaacagatgtgagatcgaatgtgccagatatggggttgatgacaagccgggactttaagattcttctaatgattgagacaccaaagacggtcatgttagggttatcgttggccctaggaacgaaatttgtgcaaaaccggccctgagctgtttgatatcattcacttaaatgttttgagcaaattcctcttctaccctttcctttttttctcttcattgcgatccgacgatgacgaccgtccaatctctgattaatcaaaggacaaacttgtctctcacagatgtctctctcttttcaagagcagaacgtctgggcaacgttcgctagaattgtggtcgccttgagtccaaatcggttcaatcttacttttacgggatggaattaggtagacctacattctgttcgtcttgctcccgggtttcggttccgttgacgttctcttgacgtttcgaccgaaccagcccggtgagggttcattctatttctactttatctttctcattcttttcctctttcttctcttcctttgaaggcttatcgagaaagagattcaaaacgtgagtttgtcttcttcgtcagcacaaagaaacgggtcttgaatgatgatactttattgcaaagtgggaatctctcctaaatcaattgaggacaaccttttttacttttgctctctgacctcgacccgtcttcgctcatttctttctccaatttctttctgtgcttgggctgactgttattgctttatcgctttcttgctctgaaaaagtattcttcctgttcctaaaggtggaattaaccacgaagatatgaaaactataggtcagcatttctgtttatgaaaagttcaattcccttctcaacttccctacatcaatctcgtcacccacacacccttctatcttaaatgattacaactttttcatgcaccacgcttactttcctttcgaggagatggtgaaaacgactacaccaaaacttttagtcacccctatgattctctccttcctatatcctcgtcttatctgctctctgtctgttaagaacccggaaattgactaagtttcctcttggttattgattaacgacagatagtgagttttgggttgtataatatgatgtattttcgatatttagaaagccaaacttagaaacacacgaatagatagaacaacatggtgtacaacacatgttcgcaacatcataaacatatttgcacaacctatcgacagattacaagagtgatctctcgaacgcttgacaatcaccgagtagattagatctcgttttggttaggctttgctgctcaatcctttcacaacaacatactctgtccctcgactacctaaccaactctcaggtcctgttctgttgatcgcccggaccccgaaaagccttctatggaaccaggctttcgtgctgttcattccagaaagagtttccaaaataatcatcagtattctattcctagaaaccggaagaccgacaggaaagatatgaccagatggaaggtcagaaaaggaggaacgacgaacgttgtaccaggctcaggtttcgtccccattgttttttcagcctctttaattaattcgctcagctctgagagaggtttcagaattgtcgtatactcaggtacacttctcataatcaagccatacatacgtcagctcatacgcaaacagataggtgggtgaagcacgaaaagggaagacctacaggaaaaagatccccgaccatcgggtacataccctctgcgcaccaggtggcggtaggaccctatgtaagtttgaccgactatcgttttgtttccattccaagatggataaataaaaacaaaaacattcctgtcaggacgggatttctgaatcaatggcaaacaaccataacaaagaaggtaggaagctcacagaattccaccgctgagaacaaccaaggcatccgcaatattacaaacgatatgtccctccaatggctagagcatctcgatttcagcttactcctgtctttgttcttatctgatcaaatggagaacgatgacggctagaagaacatacctgaacaaattgccactcgtccgttcccggaggaaggacttgtaggccacctgtcatattgttatttaaaagtgtctacaacgtgtggacgtgttgaggaagtagacaagaatcagatctagatgagtcagatgaaagcaaaactggatgcatacaatggttccaaagtcggtgtgactctgttgttcaagacacaaaccataaaggagagttagaagcacaaaactcgattagtcgaggcgcgcatgtgaggctgaggcaacaggactgagacccactcccaaagcgagccggtcaacctcctggggagggtttctgataactctagccttggttggcgagctgtacccttccccttccttatgaaacgcctcaagcgtgcctggagggagttgtagatggatctcaagttttgaaagaatcgatctgcgtatacaattatgtgagcaaacggatttggtttgttgcaagagcgacagaacactaaggagaggacaaacaaggccacattccgagcagaggtggtgaactcgcgacagacatcgatattgtcggtcaccggctggaggcatcaatggaaaacacgtggagttgagcaacgtgatatggaaacaaggcgcaatgagttgcacacacgcactttgggataacatatggacggatggtcaggaaacgatagcatatcatctcgtgaaatgtctgtgtatgaatcaggcgcaattatcaacgaaaagcgtcgtacaaatgactgatggaagaatcaactgactgaactgctcgttggtactgtggcgccgaacgatatgtttgagaaatagttaagatggttgatacaatatagatcgatccccacaaggctaaatcactcactccaccgaaccgttctcatccacgttgtcatatccaattgctttgtagctgtagagaaggcgagcgaagaggaagatgcgatgagtcggccggatcgtcgtcctatactgaacataatcagagtaagacttgcccgaaactgctgtcagtcagaccaacgtcagacttggccttctcttcaccatccaacgcaaatatttgttcacatatatccatcagaggctcatagttgatcccatggttgccgagatagaaaaatccaagggatgtgcaagcgcggaacagtttatcagattcgacagatgcaaccttggaatcggaggaagtaagtcgagcgtgatcgatgatagggagatcatgcgtgttcgttgagctcgctgggaagggaacctcaggcaatcggtttgctgtaggcataaaagtaatgtgaaaactaggatagaacagtacagaataggatgtgatttagaagatgagggtggaggaaaagactgtttcggatgaaatctgggaagaatctgatatctggcagcgtggaacaaatcactgcacagacagatcgcgatcaacgacgccattcagatcgagcgctcgggttctgtatcgtatactgtgggttgtagatgagtaatcaagtctgtgaacaaacatgatagttctgatatgatatcctgtttctaaacaccatcaatggtccttcatctctatagtgatccaaaccaaacgatctgatcgagtaggcagcgcagacgtagatggacacagattgatgagaaaagatggtggaaaagtctccccatgtagcaaatagaaggagacagtgtatatatccaaaagttgttgtcgatatgatccatgtgcacacacactgcctctccatctctatcctagccaccttcaggctagacatcttggctcgatcgatggtagcatgatgagagaaaccgtaacaggaatctgttgtgagatcgattgaattcggctgagacggtcgattacttaatcgattccaactaccacccatcttgaattcctcatcatctcatcagatacccgcaacatattcagacgaccatcgcacattcggacacacatcgggcattcacacgggtacacatcatgtccaacccatcaggaacctcctcatccatacctaccagcttttccaatacaaccacgaataattgttctccagcaataatcgctgcagcctcgacttcaacaaccaagaaacccatggcccctgccgaatggtctcgccggttggcagaggtcgagtttgacagaacagacttgaatagactagtgatggattatctgattgtcgagggttatagagatgctgccgaggaatttgcgaaagaacttcggtcgaactctgatcggtctcaaacgaggcctaggtccttgtctggacagcagtcaggggcagaggatccggatgggatgcagttggatccaactgatgacggtcaagacgccttcaacctggagggtattgaagtacgtttcgccttgtgttgtttccctttctctctcttctcagctcaaaccgttccttctgatttcttcctctgtcaggaacgtatgttgattagggaagcagtcgaggcaggccgaattgacgaagcgatatgtagagtgaacgaactcgatcctgaggtggggttcttgtatctatcgtacatctcttgcttcactggacttgcatgtttattgtcatctctttccctggtcagattctcgacactcactcaacactctacttccatcttcaacttcaacggctcatcgagttgttgcggactagcacaaactccaattcatcatcctcgccaactcaagcactcctgtttgcctctcaaacgctcgctccactcgccgcttcccatccgtctcatctggtagaattagaactggtgcttactctgctagccttccctcctccaggtccgtatccatcgacagacatcgcccaactggtctcccaagatcaaaggcggaaagtttcaaaagagttaaatgcggcgattttggagagcgcaggcagaggggtggagagtaggttgatgggagctctccgactgctcgcctggggagagggagtcttaaaatcaaaggaacggccaattcctgaggttgaggggatctggaagacagaacacggagtatccgtgtaggctgctcctgatcatctgttatcactcgttcatcagtgtcgatcccttttccacagttcaaggaaatatctataagtttttactttctttcttgtctctcgtcttgggttgttgtatccatccgcattctctgtacttctgctcctacatgcctctcgcgatcttgatgatatctccataggcaaagccttttcatatcaaaacctgacatctcttggttggactatgaacttccgaccattctccctcaccgaagctttattgacatctttcgccagcgccttcctcatgtctgtttaaattcatacacatattcaaacaatttggttagttctcaagacgcaatttcaagcaccagggtaagaaagagcgacaaaccaaatgcatcttccccatccttgcctccgcccattcccgagtaataaccctgcacccttctatatacactataacccagcttttcgtacattcctatcgctattacgttgttacaacggacaaaaagatcgacgaagtatccatcatgtgtaggtgaagacgaggctcgctcaaggagagtcataaaagatgatgctaaggatagtcgacggaattcgggcgcgacctggtacggaaagagaaaggaaggatcagcaagaaccgcagaaagaaatatgtagaattgagacacgtacggtaacagctgagagatgtccatgatggtcggtgccccttccttcagacttcccaatcactatttgtagtgcaaccggatcacacaagcatatctaaatgagtaactagtcggttgggttgaaagacagccagggagatcaacgaactgtaacccatgatactaccagaaggcgtcgtttgaatcgcgcataggtctggccatttcgctaggtacgataagtagaactgattcgaatactagatccgatatttttgatcatttcaatcgacaccattttgatagaacagaacggcaagagacaacgatgggaagattatttctgtcagcctcgtcgttcgggatggacagataaatgattaaggacagacggtttcggtgaacagatcaacgttcctatttcctcccaatagcacatatagaatgactgttcattgattagtagaccattatctgcagaatcgttaaagagagaatctagacagacacgttgttgaatttaaagagatccatagctcgaagtggtctaagaatgctcattttgagagattgatttgatgttagagaaggtttattgcccaaagttgatgatggcttgaatgaagattccgttcgtcgtttttgtcaactcaaccaccaccaaccaccttcccaacgaggataattcttgtggttcattcaagtcaaacactcaattctccctctctgctatctgcttgtacaaccgttgatcgactcgtctcaaaatgggtgtcttggaaaaggtctgtctcatgtctccttatcgattcagatttagccatggctgatactcacactcatcaatatgaactttgaatcattctctttatctagatggaggccgtgaagtgtgcgtaaacgatcttctcagctcagagaactaacggaagacttaccgcgtacaattctgtcgtcaatactgtatcgaccggtaacagtggagatgtcgaggacgcagaagaacaaggcgaccgagtatcatgtaagctacaaatcgaccaccttcgactgtgctatttataatcttaagatcctctgcgtattgggataggcttcggaattctaactctcttgtttgtgtgtttttatttggggggaaatgtagttgggaacgttgaaagccaaattggcaaaataccgagcgatgctcctcgagccagacaagaagtctggaaagagtggagaaggtcagccttcgctcatttgcctggagttcagactaagacctacatagctgggcttcaccagaaggtctaggagctcactggattatctcttgaattatggttcataggattcgatgtgatgaagtctggtgatgctcgggttgctttgattgtacgtaggcttctccagaatgtgtactcaatcgccccgtagtcccaacggctgatatctctcttttgggtctataataggggtttccttcgtatgtagcgcttcaacacatacctatcaactgtttgtttcctaagactaatgatctgcggacttttttctgtgctaccccacgtagcgtcggaaagtctactcttctatccaagacgacgaagacggcatctgaggttgcttcttatgagttcaccacgttgactgtacgttcgacttccttgctctctcatctctcttgaactttctagatgatcgcgcgcttattgaacttcctcacgtttgtaggctatccctggagtcatcgagtatgagggtgcgaatatccaattgttggatctaccaggtatcgttgagggagccgcctccggtcgaggtcgaggtagacaagtcgtagctggtaaggtcttgtttcaatgagcggacgcctgctctgtcatgttaattctgaatttgacttgtcttttatgcgatggcctacaaagtcgccaaaacggccgatctagtaagtcctcaatcttcccaaaaattgtattctacgttgtctcctcacaatcaacatttcgctgaaatcttcctataaacagattatcatgcttttggatgctacaaagatcatcgagcagcgtgcactccttgagctggagctcgaggcagttggaatcaggctcaataagaagaaaccggatatcgtgttcaagaacaagacggctggtggaatcacagtacgtgtcttggctgtataaatgtttcggctgttatctgcctcttaaataaacaataaagactacactaaactctgaactctttctccacactagatcaacgcgacttgcaagatgacaaaaatcgacgacaagatgattcgaacgattttgcagtcctacaagagttagtggcttttcttccttccaacaacgactgtattgttctgaactattgttactttttgtttcaaagttcataactgcgacgtgatgatccgagacgatgtcgatacggatgaggtcagtatatccattctgtgtcatgacattcaacacgagtcgttacttactcttctattctataatcaccaatttctctctccttatagttcatcgatgtcctccttggcaatcggaaatatgtacaatgcctctacgtgtgtatcattttctcacaacctctctgttagcagaatgttgtcaatccacgtaaagttgctaaacaagtccatcggtcttacgatcctcgctaaattaggtctacaacaagattgattctatccctttggaagaggtagatcggttgtcgagacaggctatgtcgttggctatctcttgcgagatgtcactcaagttagtttttcctccttcctgatatatactgatgcccataggtcaaacattgatctattgctcatattcccttgcgtcggcttgaagcttggactaccttcttgaaagaatttgggacgagcttgcactcgtcaaggtatatacgaagaagcgaggagatcatcctgatctgtcagatccagtttgtcttagacgaggagcgaccatcgaggtacgtcaccaagagatagcttctggtttcaatttctgaccgctgaaggctaaaacgttctcgttccgtattgtccatctcctcagcatgtttgtcatcatattcacagatccattgccagccatttcaggtatgccctcgtctggggaaagagttccaagttcaacccacaaccgcaaaaggttggtttaacacatcagctgatggatgaggatgtgtgagttcttcatctttatcttctgaattaaatttatcaattctagtgaattagcctatttgtaatcttctttctcatgcttatcgctgatctttggagcacttttggtcgttgttttgatgtacctcaataacagtgtgagcatctttacgaaataaatattttacgcgaaattataatgcatatccccaaattaaactcttgccgagccggctctccgactattcgagttagattgctcgtccctttcatcacgtttgacactgatccttctgatgtcaggcactgaccactgatttccaggcactggtttactaacaaaagccgatcgactggaaccgaggttgatccttgatttcacaaaccattcattttgaaaggcactcaccgatatcctttctgtacacgaaaagtggcctaggacagcaatgcttgtggtcgttttctgacggttgtatgccgaacgctctcaccagtcatgtttcttgatctcttgatggaacaaaccatcacagttctcgagcagaaagtggttcgtttacagaaaggtactatttctctgtcagtcctgtggttgcagtcgagaacgtgtatcaggaggttcgacggatattctaggatgttccttgttgaccttcaagcgaatacaagggcttcaggttccttggcgtcgttgtcaatctatcacagtgcgtgcttagggccacttacctatttgctgtagatctatacctgttacaggaacgcgactcctcgtccacgcacacgttgatctcagggtctcccaaggggttgatcaaagaaattctgaatgagaatgacggaggccattgaaggaacaccggatgtggctctccggatcgtcataggtcttgattgctcaacacatgttgtgataaagaacactggaatcagaggtttataatttaaagatggaattcattcatcgattcttttcctcttttgtcttttctctctatccatcctcgttttcttttccctctcttcttgtttgcgttggtctgtttggaacctggtctactctggctatcttgaccgtcatttgccatctagttctcccattcatcaaccacaaaccttcacctcacctcgcctcgccattctccagtttaccctaggtcgatctttcgccacaatcgtctccttttcttcgcgaccctttgcctttctccattacctttcttcgtccgatgctttctctctcgattctctcagggcagatccctaatatcactcctctcacccctgtcagtatttgcacttcttccgaatatggaacgccctcgttttctccgttgttgccctgcaagtctcttcctatcgctatttcgcccgatccgcaatctcttctatggactccgccggtttctccggttgcctcgccagacgtaatttatagtttggcgaatggagaacaagagagacctttggatgtgaacgacaggacaaaaatggcttggctgatggatttgcggacctcagagtcggacacaagttagtcttccgcctctgccttcttttagagaattatcccaagggcagctttcttattcaatctcttatttaatcgatcgtgtgcggatagtaaaagtagctgagatcgttctcgagttgttccctccggccgatatgcactcatctgaggtgtcggctggagcgtacacaactgaccttgctgaggctctcagatactggacgtcgttgacaccgcatcctgtacgtctcgttcagttctcgtcatggcgatgtctcaggtcaagagcctacctgtccttacttaatgatctcgatttgtgctcctcggatttccttgatagtactgcattctaatcttgaccgtctgcttactcgagcgttttaaagctgcccacccctctctgattgcttctggacgtgagtttgatcattttaatttccttacgtgcgtcaggcgcatactctgttcatcggctcatcttccttcgatacgatcctcataggaatctcggatacaacacttcgagttgtgtttgctgctttcttgttgacgaccaaacatgtgtcggaagactcgttccacaataccgcgtttgtcagccgaactccatggacatgtggagaaatcaactcaatcgaaaaggagttgtttgctcggctggactacaacctctatttctcggctgatgagtacgttggaaattccttgactggattctacattctgttcgtaaagcaagaattgctcataacgccttgaacgtgttcacttcatttcaaacaggttcctgaaccgtgtggtatccttcgactctcagccctgaaatccctgaaatgattgataagacccgatacatgtctgcaacaccgttatttattgtacgtttgcgctgatcttcctcacatagcatccccatcctgatccatcttgtaccttgtacaaacaggagttatatgtatttttagtccaatttcgtgaatcgacctgcgtcctctatccaggtgtcccattcttgttttataacgctctattcacctgcgtatcgtcttgtatgctgtttcctagtccatgtgtttctatcttgtacgagttgtatctcctcttcctccctctctctcttttttccttttcaatggtcaaccttgacggattggctaatctgtgctgtatccttgtgagcgctatctgtgtttctcttttgctgtatccgatttatcatctctttcattcgcattctattttcattctcggccgtgcctgccctcctctccattcgcttttgatcatctttcatatctttgataaattcccctctgtctgcacctctccgtatcttattgttccctctctcgattagtttgtgtatgtgtgtgtgcgtgtgttttttttcttctttttttttttctcttctccttaagagcgcaatatattgtactgtatcatatatgaaactctttctgatcgatgcagtagatggttgagggagatgcctgaaataaactttgcgcagccacaatctctgacgcaagtagaaatgtattgttatttatccaccgacaccgtcgtatcatagtatcttcttctctgtcactcctccttcaattctcttgcttctcttagttccaacagtggcttcgatggacacccctactttagaggtcagtctgttcatcaaacctaatgcttggctccttttcgttttctcacaacttggttatgtttcctaacgggaaattcacaccataaggagctccaaagaactcggacagaactcgattcaagagtcaattctttgcaactcgcaatggataatttaaggaacgaaatgaacttgttggaccaagatgatggtgacgagggagtagatgatattcaacaacaagttgggagtcaaaactatcagcaatcggcagatacacgagtgactgatgagggtcgacagagtgtggatacggtgttgccaagcgtatgtcttcttattttgcatgtctcctttgcttgcaaactccaccctgtgctggtgttttgtggaaatacatgagtggtcagaagttgacattgtccaacggctatttataacgccaatatgtctcacaggtggttgaatctgatacatcagcggaactacctgtcttgagttcggccctgcttagggatccacggcctttcgacccagttcgccttcgtcgtggacaagtctctcttttggatttacctcctacttcatcagctgttgagctacttcctacaaccgagcttcgaccacctccctcggctgatgaacttgatcgatcatatagaaacttcgttcaagacagattgactctatcctcactgtctggactaaacggcgcaaccgatgaaggaactcttctctcttcttctccctcatcgcctgttaccccatttccattgaacggatcaaatattactagaagccaaccccatccttcacatcttcaacctcgtagagtccttcgatcctattctgtgactgggtttgactcgaattcggagtatattcggccaaatccgagtttgcgactctcatcatcaacatcagctccaacatcagcatctacgacccgaaggatcttggccgaccggcgttcaaccagggatcctcatctggcaacacaatctgccgaggagatgttagaaagggtggacgaaacagcaatggatctgatggacgttcgaacttcacttcaagaacggtctcaatcaatacgggatctggacggcgctcctcgagtgggcatcttgaatgaaaccttacgaaacggcgtagatctgatcgatcagcttgagggaagacttggcgtggtgcggaaccgtctggtaagattaaattcgagcaggaacagagaatcaacgtcgtctgtacatgtggacgtgttgccgaatccacctcgatcgttttcgatcaggccgccacagttgagaaggggagagtttccaagattggaactttctcctccttctttcgtgaacaatgcatccaaccggacgaatgcaaggcaaaacgaagacgaggtccttttgtctgcctcacctgatcctattcatcctgttcctccgatactcacgtctcgatccgacacattctccgactgggtaacttcgagaggcatgcctgcttcagcttcaacggccatctatgcctattctcccttcacttccaccgatctcatcaacacctccgctactccttctggcgttgctaccactgagatttctaccagtagccctctgtctagtcccgcatctctctcaggcgacttgtcaagcttacctagccgccacaggctcttatttgactccaatatggcatatgcttctccctcttcaactgccgcagcttcagatagattgaggacaatggacccggtcgcccagctgcaagaggtaagagataggaacaactatatgtggcgaggaggagatgacgggatgagttttggagaagagattggaggtttaagaagatctggttgggcggagcgggtcatcggaggactgggcaggcgagcgaggcaagacagaggcggaaggaggaacagaccatgggatttagaaggacacgatgtaaacgagagaggggaagaggactggccagatatgactgaagccgacaaccaagttgggactgatgaatttgtccgtgacttcctattgttcttgttttttccttgaaaatgatagctaattatctaggccttactgcattgcgcatgtcgttctcatttgacggttgttcagagcctacaaagtttctatgatttcgtaagcagatcttcttctcttcctctctgctcgttttcgaagcatcctgttgaatttcgacttgttgatctcatttttcaaggatacaccccaagatctatctcgagcgaacttgtttgctcggtctgccagcgacgatcctgcggtcacggtctctctaccaaaccaaactctccgtcgcgaacttcttctctccggacaggctactctcctttcttcctcacgccaaggagatcaaggatcttctctacagcaccaggcattaccacccctcactctctcctcaacacgagcatcgtataatgcagcctccacctttgatctctcggccatgccctcgactaatcatcctgtccgactgcccacccgtcgatttgaggttcattccttccctgatcgttcctcaatagacccatccaacccactgatagtagcggatcgaatccacgaagacatactcctttgcgaacatcgaagaattgctgcagcggccgaggctcaacgaaagaaggaagaagatgaaaagaaagcaggcgcagatgtcaccgattggatgcggcccgagggagaatatggagaggaattagaagaagagtgggtggtaagacccggtccggttgacttgccggatctatgggcagaatctccatctgctgtgaagcttggacagcagaaactgacgttagtggaaaggggagttaaaaggccaggcgaagagatgagaaaagggggcacgaaagtcatcttgatcgaggcagggatgtttgtcggccgttaatatctacaccacacacataccttctctctctctctctttctactccctgacatttcccgcatttccactcgttgtcctcctcttccaatccaagtgttcaatcaaccgcccgtaggagagagtcatcgttctcgaacgcggaaggcctttcttttttattgccattcttggttattccttgtcttttactttcccctcagccatgctttcatcaagtccttttctttctcaaacccattgttttcatccgatatatcaagcaggcactcttgtcagttacatcatcctgtctaattatgttcttccattgctagcaccttccttcatctttgcctcttctctttctttatctaaatgtatctcgatcatcaagagcaacataatcttcatatgtaacatatcattttatatttgtgtaggtatttgtctatgcttcctttccttacgcgcatctctttccattgagagaacccatttgtatctctggatcgctacgttttaatctatcccatttgtatcggctctatttgacattcttatttcttttcatcattatcatagtaacctatttgttactcataacgaccacaccaaccatgcttatcgtctccagaattgtcagctttctcatgactagttgatcgtatagggcatcatctaacgagacttgttgttgaaacaagaggaacatcttatgaggtggtatgagtagaagatagatgaacaatatagatacagaattctatcaagcgatcaacgctaccgaccgcttcacaaagtctaccctgtccccttctatcggaagaacgcaagagaatagaagatcgctcctatctgaattcaagtagaccggaagtcggatagaggctgtagatccagtgtcggtatcagactcagaaagatttacttccggtttagcttgccatctaaggtaaacgtcggatagtttcgtcgtgccgtcgatcagacgaagagcagagtcatgatatgttgcgccttgaagaacagcatctggtgaattcaacaaacaagatcgattctctcagcttatacgttctgagccatcagaacgtatgagtgaaagaggcttaccagacaattggaatgaaagaccttcttgctttccgatgtcaaggaccaactcaaatctctctaaactctggtttccacttcgagcagcgtattgttgagtagccgacaagtaagctgtaggcgcaaacagaagggagagcgtgatggggtagttgagtccctcccgtgagactttttccagttggttcaacctcatggagaaggacgctataaattgggatgccgaagagcctcggagcatcttgaattttgaccaagatggtggaacagtttctgcagtagatttgggttttcttagtcagatagaggaaatatctagataacgaacttgtgtaatttgtgcaactaacccttggtcagatatgtaatcaaagccctgatgtcattggtttgcttttgggttccctcaataactccgacaagtgtttcaacatctctcacgaccgtggatagaagtctatttgcattccatgaaactgactgactcagtattgtgtttcaactataattataaggaccgacgtacccctttgcgacagcatactcgcggatgaagtatcggaaaattgtatcattcgaatcacctaaaggcttcgaaacagactatgaaatagatctaccatcagaatgacatttcgtgtaagttgcacaaatcaccacgttagactaaccttaggcagagtagacagcgatttcttgcagaacttaagaagattttgcatccaaacgggtcggtctacaatcaccttcgtggaatccggagatgcaacatcgccttcgtctacagagaccatctttcggagattctgaagcaagttgcgacctgaatcgaataagcaataatggcaaccacgtttcacagactagtcagcactatcattttagggactgtagcctatataagacaaaccttgagccgtggctactgtacttgccgctgaacttgtcagtccaagccaagatgtggggttacgatcaggtaagtcattggcccattcaaggtaatttgcaacgttcgttccttcaggcgtagaaagcgctggccccaacgctgattcggcaacgagaggagctccatcgaaggcttctgcggtgaatacagaattgacgtagttctgtaaaatacggaagtcatactacatagattggtttgatacatgcattagatcataacacatgagtatgaacaaaattatatgaaacagatacatacatcgctttccccaatctttccaccatagatggatgtggtcaacaacacccttagcgatgtccacggtagagttgtaggatctacgtttgttcgagtgatgaaagcctcgagcgaagaatcgatagctcggaacgaagctaaaagctcggaatcattgatttcatatgcctacgggagaaagcacatggtcagtcaagaggcagatgaagtgatagtgcgaggagagactatttctactttagtccaccccaaaggctcgtatgtcgaacgctcttgtataacagcatgtaggaagcaagctagcaaatacactgaagaagagatcatgcgtatgagcttgaccgtctgcgcaaaacatcattcaaaaagtatgtacatacgtctatgcttctctgagggcccttgagacaattgtttgcgagataagctgcgaagtcccatgaggagggtagctttcaatcccctcgaaggctcattcatgactacgcgcgagcttctcaaaatagatgtgggaatctatcgatgcgacgcaaaatgtgttgcggcatgcttagttcagtagctttcaagcagcaaactctctcatatagatcacttacctttgggctcgtctccattgtcaaaaacagacggaagttgggatgcgcgcgaagagtttgaagtctcttttcaagtgttgatgacaaccatccacacaccaggtgagtgtttttgagcaagacaattttcccagtacgagaggcttcggagattgcctgttcagccagacgtagtccttcagaactccccatcgcaactgagaaatgaagcaaaagcatatgtgcacaacaccatgagatattagcatttcagttgatcaatttacactatctcttgataatacttaccagaaatgagccttccagtctcagcgaagagattctcgactcggtaggctgcgtcatgaccaggaatgcttgccaagacgataggtgtcaaggcggtggactggtcagagaacatttgaagatcatcttccgtctctaatgaatgaccaaagacacatttcacaaagatgccagcagccgcctgaatacggtcaagtcgaatggctctcatcaaaagcgtaatgtgacaagcacgtgcaatagctggtttgataaagcttgtcagtagtgtgtttcgaagtcacagagattgagttgagcacataccgctttcctcagaccataaatcagccgggatacgggtttcgggatcactggacgcaaggattgtggtccaaatctcaggattctgctccatgtgggaagaagcctcttggagcgccggtgcccgagtgaataagcgtaactgttctgaactctcgatatccaaaagtggatgctttgtctcgacaatgtggttgagaacaattgcggtctccaagagaagatccaattcgttggccaagacctcctgtgaatcgcgcaagaacagttgcgatagcagcatagcaagaacaagacgatcggtatgaagaagagccgaagacgttcggcgatatacaaccacaaacagatcttgtagaatgatagcaagacgtttagacggatcggagatattttgaaggttcgggttggcttccaaaacatagtcaaagacgtcaaggaatcgagcaagagagaaagaataaaactggttgatatgactcaaattttcaaggacaaagtagattgaactacatgaccttgcgagaggaagatactctgatgtgacctcctcaacggctttcatgacgacatctgtctcctctacctttgtagtcacctcagccgcctcattcttgagtgtctctaaggtatcgatcaccttgtcgtcatcgagaatgttaccagaggattcgttcaaggcagttaagagcgacttctcaagatgtcgaagtcgaagcctaaattcaccttggagtttgatgaggtcagatcgttttcggtcggtatcaggtcgttccaccttgagaaccttgtcaagagattgactttgaagactagctcgggtcatagtgaaattgacgaaagtgactcgactacagatatctggagaaaactcgacagaaggatctcgagtggaaaggaacattgtgaaagccggtgagaagtcgatatcttggttgccaagacgaatgagtactcgacctcctgtccttttgatttccttgttaaggattgcattcaagatcggatctagatgttcgacatcttgaatcaagatagggttaccgaaccggagggcactctcaagattcttcaagaacgcttcgtccaagaaactggtcacagtgatttttcgatccttgtactcgttgaccagataggtggttgcttggccagtggggtcaattatcaatggatatcgattgaatctcttcaacatgatagcgttttcaacagagagggtatctgagggtagagacttcgcctgccagcttatgcggtcatcggctgtcgagagatactctggaagagacagctctggtttaaagtgaatgccggctccggatagatgatcgcaccactccatccacatgagttctcggtactgctgatcgaagaatcctccataagcaaggaaggcagcggagagaagtacatccccaacgatggtgctcatttctgattcgaaggttttgcttccaagctcccacctttccttttctgaggaaagactatctagcaaagtcacactccgatcaactttggtacgaacacgatccatttcgcttcgaattgcctgggtttcgctgatcaagagtgcgtactcgtctttatactgtgcgatactagactctaagccatcgatgagctcaatgattgtcgaggcttggtgtttcgtctgttcagcctgatcttctaaatattgaacttcgtttcggagaggctcgactttatccaagatgtcggaaaagcgaacttgagcgatgacccatttgacgaggggtccacaagccttagaggctcggtctactacttcgaaggtatatccaggacggctaagatactcccgcgccattttgtcccgaagttgtctcgtcatcttagatgtgtcgaaagatgtgatgctgggaatgaaatcctcgcgtcggatgagaccttgcactgttttccagctgtcaaacttgtgaccaagaacagtgcacacagactccatggcaaccttgacggcttcaggtgggttggccatagaacggacttcagtaaggtgttgtttccgtatgttagaaacggcagcctgggcttcaagtacagcaggctctgcctcggcaaggtcagacatgactatggcgcttcgctccttgatttgggcatcttgctttgccagagccgcctggatttcaatagaagctgctttcttttgctctgcctcctgttggtcagtgaccatgcgtttgagcttatcattggcttcagcgtccttcgcctcaagctgagtcttcttgattgcaagacttctacgcagatcctccacctgagtgacagtatctcggagtttgtccaacccgatattgaggtggcgttgttgttcttcaagctcatcacgcttttcgttaaagagtcggacatagtgatcgatgctagagattgtatgaagcaagcggttaaaatgaaattccaatcatccacgtgaaccccgttgaacttacaaatcgaggtagtgtcgaggtgtgacatggttgtagcgcccctgttgccggatgagtcgagcgttgatcgagtatagagattgatggacataaactaatgcgttgacgacagcaagacgatgagtcggaggtaagagaagatctcgataagcgacagggaaatcagaaggagcctcatatgtagctatatctagatcgagagtctgagtgaactcgtatcccacttgatagaatgcttgatctgaccaatctccaaaccagtccagtacacaacgattgaacaaggccggggaggtagcagctcgagaggcgagaccgttctctggaggattcatggtgaaaacgacatgaagattcttggcgacttggtccgtgaaccatcggtagagctcttcgtgagaatcaagcatcagaccgtcacgctgagatccctctttacaggccgtcataagagcagagtaatcatcaccctcaaacaaaccagggacctcggcatttgccaataatgtgttcattctttcaaggaatccagaatctaggacgttcgattcgtccattatgaaacaaatcttctctcccttacagcctgatcgtcgaagcacagttcgaagatcctcgtcaaagtcgtcaccattataatgattggaaactttgatctggaaaatactgagaccgttcatccaggcaacaaatcgagagagtgtcgtctgattgataaaaaatcagaggcaagcaattacccacagagggcgtcgagatgaagagcgacatcagaacaactatcaggctttgagctacacagaatgtaaagagcttacctttccactaccactgactccaattaaaagcatgtgcccttgaacttgacggaacgcacgatcgatacgaagaacgtgatccagtacatcgttgaaaagaaccagttgaacatcaagctcttcctcgtggaaaactcgaagacgagccttggtgtactctcggagttcttcccggtcgaccgccaggtaatttctggaagtccagtttgaaaacaagatagggcgaaccaaagcctcggcgtggttgatagatggaaaatagttctcagcagtggtgtccaatatgtcatccgtccatttcttttcagcctcagtgacaagacgatcctggaatagtcgaagagcttcatgagcccaaatcctcacaagaccttctacggaaagcgactccaagggtcgaatagcctcgtatataccgcgcatccatcttgtcagctctcgaggactgtagatgtagtgcgcttggatatcggctgtgaaccgggcttgagaggcgatgtagaaagagaccatggcttccgtcagaggttcggcataagctcgtaagttgggaataactttgagaagagctcgattgaatgttccgtaaatctggttgagagaaatttctccagggtaatcaaccataatcagaggagcatgccgaaggaatcggtgactgaggggaactcgaccagggtcggtaggagggttgcaagcccctacaaattgaatacgttcaagtttaacccaggccatatcgctcgttctccagaaaccaccactctcgaccaactgacgtatgaaagagatgactctttgagttccgtacttatctatagcaggaaggttgatctcgtcgcaaaagacaactagccatcgaccgatctgagtgggtgccaacaatataccattgggtgtctttcggtactcgcagtattgctcgaaggtcttgagtataagttctggagtggtggcactggagaaattgagaccgacaacttcgagctgaggaagcttccgaagagcactgaaaagagtcatagtctttccagatccaggagggccgcaaagcatgaggggtttatgttcagacaaccaggagtaaatgacttgttcgtgtcggactgtatcaatcgtagggacgacgacgtcggcagaagttaccatatgagtgtcgatgtcgatcacgggaacctttgcctgccaagaagaccactctccagtggaaacagcaacgtcatagtcgataatcgaggtgccagaagaggcaggcggaaggtcaaacccagttttgccgcggaggaactctcccatctcaattcgacgttctagtttcgcgtcgccagagaaagcccagatgatgtcgacgagcattcttttagcgatgtaggattcaattctctcagcagacagaggaaagtcagggtgttggttgttgtactcgaggatgttccatacagacttgttgatgagtgagaacaaggtgtttaacgcccgaatttgggtaaattccatgatgtggtcaatagtttctgcgaattgcagtccggcgttgacgagaccatcgtcagcaaagaaaggatgcagtaaggacaccacagatcgctgggtggagaggttaagagatgagttccttcccataatcgctacttgtcctagttcttcctcatcttcggcgtcaagaggaacagaaccaagcgtgtccaaataattttggtaaaacatgctgggcttgatgatatcttcgctgaaccaaaccattccacatcgactgacagtggcaagagtggcatacttgagatgttcgacttcgaacataattcgtacgtttgaagtaagattcaatcgctctccgttaggaagagtcaaaagtttgttgtcgtcaagaacactatataaagaagaaaagaattaggcaacgatgtctcgagttgatataggtgaacgctcacctattcaagttttcgacccattctggatcgacatctccatcaaagatgatccagtgcctcttagtactctcccctcggacgttgtccacaattttacgtaagatatgagtaaaaagaccatcattccactctcgcgtggtaggatcgagagttccatagagggcgtctttggggatggctttcggatcaataacatgagccacaccttctataccgtctaagcgctctaaggccttgagtaataccttccaagcctcggttttcccacttcctgaaggaccaaccatcataagaccatgttggatcatatgaatctgatatagttgaacaactttctgaacccaaagctctcccataacgaggtgtctttcagcgcaaaccttggagatctcagctttaagggcatcaaggttgatcggaacataattgataccgggaaatacatcggaaagaaggctaaatcaagcgagacagtcagtacagggcaaatgatgaaatcccattatacgcaggagacaaacctcatcagtaaagatacatcatctgcgactagcttggggacgatggtctcgataacactctgtatcaaaatctcctgttcggagattaagtcagacgccttggggtcgatgacctcactatcagtcttgtgagtggagatcaaacgctctctcttgaggagaccggcgctgatgagaactgccttgagagctcttagaccaaagtcgtaatgaggttgaggagaaagctgctcggcacataagttaaagaacggaacgatcttcgatgccagcgtttcagctgtgcggaaaccttgggaaaagagcatgacctgagcgataagctctagatctggttttgtcatggccatactctgttcgattgcaacgtccgcgagagataagaaaggatcagctgcattgacaggcagttgtttgcttcgatgcacgtaccctgaaaagctctggtaccaggtataaaatcaacagtacatatatcaataaagaaaagtcaataatgtgtgagagtaattttacatactcttcaagttatcaggcagattggatcgaccggcgtaaccaggattcattgtgataaagatacctgaacatatacagagagtcaactgagacacgttctaatcaacccatatgtagaaaagtttacgtaccagtgtcggtgttgaccttgagctgttttcccaccaactcgatctccgtgttaggatcatgcacagccaaagcgagaccttgttgaatactttgcacctgttgtgaaactgcactgagaattctttcctcaagtcgattgaactcgtcaaagcatccccatgctcctacttggcaaagaccaacaaagatccggcccatggcttggaaatcaaagttttcatcacagcagaatacaagaacgaatcgaccaagttgaactccgagtgctttgactgattcggttttgcctgtaaataaccataaattagcaatgagatattgttcaggacaccgtcatgagtactcttaccagttcctgcaggtccaaagggtgatcctcctaattgactgtcgagcgcttgagtaagtgtgaggtaacatcgatccgtgagcggagtttggacaagacgatccggaatcccgaggtattcatagccataggcaaacgaagcgttcgccatgtgaattttcagacgctcgagaggattctcatctgaggtgtcgaagtagaatcgcatgtgataaagccattcaaagctcttgttggagacgatcttggcctgtttaagggatcgggtcacatctcgctggtgaacaagctcggtaatcagatgctcgcacttccttctctggattggaggtagttcggtgaggacagtgtcggcaagaagatctagaccctggctgacgactgagagggcattgtccaacggcttcgtctctgatagagcgttttcaacgagacgcgtccaaacgcattggattgccagaacgacgagttgagctggaaactttgcggtccatgccaggaagctatcggaagggaacccatcgggaagtgaataaaatgactcaagctcgcccaccgccttcagtaggagtgtagctaacgagagcttcatttcagactcgattttgagtagccaatcgttgattctagggaagttcttcagttcgattgtgttcacgaatatgatttcctcgccttcacgagaagccatccctaggatagtggtgtgttcttcatcaagaatcaatgctgagagaccagcaaacatctttttcagatgcttcatgattcgaacgatatccttgctgtttccgatgatctcgagcaaatcttcgtctcctacgaagtagaaccgggggaaagttgctcgttctctctctagatactcaccgagagccttctgaatcttggataacagatcggctagtcgttcaagactcttttgtacaccctggatattcaacacgtctagcacgtatggagacttgtacacctttttcatgacggtgaggaactcggtgttaatattggcaaatcgagcactttccactggaagaagatgcttgatatccgcgctgcccgagaagattccctcaaggtatacccattgtcgttggacatcaatccagacatctgattaaggtaccatagcgatgaaacggtcagcaaaaagatgagaaatgattaggaacatctcgtgtcttaccaaacaacacatgaactcggtttaacttttcctcccaagaagaggcctatttatgaatggaaaaaaatgtgattgtcaaaagggcttaacacttcgacgataagctgtactgaaatatacaaacctcatcttcgaaaaccttatagtaaggtgacatcttcatggcctgaagtgagttcagattctctccacattttgtgaatagatcgtcccaacctctgataaacgatcgtgttctatcagtcgctgcttcaaaaaacctcagtgaaaatcgaacaaacctaataagccggcatttgttctgatactgaatcaaatctaatgtatagcttgtccaagtttctcgaacctgaacatgatacgaaaaaccaggtgaggtttcagaactgatataatttagcgttgaaagaaatagattaggtcaactaacctgcttcaagtactcttcaagtgccatctattggatcataggaaaatcacaagacgggcataaaactcagccagtccagtctgcaagcatggaaagtcaagaaacgatgttagacgaacctctccggcggcttgagtaataacttccttgatcaacatctcatttttcttcagattcaaatcgtagacctggcccagggtaagactcgccattccctgagaactcttgagaattttgaagagctgcctccaatgtctttcgcgtaatgcttcagatttgagttcggagatgatagtgttggttttcagatgagtccgaatggtgttctgaacgaattcgaaagcgctgtactggcgcatccgactgggcatctccttggtgaaggtaagaagcccatcgagttgatgccggagtttacgaggctacatagacagaactcagcgaccggtaagtttacgaaggtcatgtccactcgaacgttgtggagagactttacctggatagttgtccagttcatctctcgaatgtcagcaatctgtgcccatacaccagacaacgctgtccagacagccttcaagtctctgagttcctccaggacgactgaaaggcggtcttctcgagtagcatcaagatctagagcctgaatgagtttatcgaaggcaagatgttcagcttgatgttgaagttagaaacaaaacatagacgacttacacccttggctcgatgaacgagatcaaactcttcttccaagcgactaaggcgtccctcaaagacatttacggtattcatagctgtatcagctttgatgtccccttggattggcctatttggacaaaagaggaacaaagttgaatgagtgaatgccaaggcctaggttgattgtgataatccgatgggtggtacgtacttgttcgactcccaatccgagactagctccgtgatcttgttactgataattttgtcctcggcaatgatcttcatttgcaacccagctgcaagcacaaacaatttcatcatgaggaccagattcattcttctgacagaaacaacaaaaatacgaaccaagttgcttctggatagagtcatccttcctcttgagaatctcgttgaacgcactccactctccctggacttgatcgacatagagccactcattagggaattgatacctctgcctctcgagcgtttgctggcctgttacgaagatcgcgatctccggactccatttgacaactttctttttgaggtcttgaacaaacgtgatgaaggtgacagcttgagcggtggagctgccttcgatcgagagatgttcaagatcatgtcgagccttgagaatggcgatgtggacatctcgcatagtggttcctaacatggaaccgtatctactgaggatatctcgttgccaagtatcgtatttggaattgactttgctttggaccatcgcataatcgatcacgcagatcccaaacgatcgttgagtatcggagttgtcaaaagtcgatcgggtctttttgatctcggagagaagctgagcccaattcgagagagagtttccgagacgctataggacaaatgtgacatgtttagccataggcaaaattgggagaggatgaatggaaaactcacgttgtagacctgatcaggaactagatcccaaagagactgaaattgcaaccacttggctacgtaggctcctacttcctggactttcatctctatgagcttgaatggctcctcgagtgtggagtcgttgaattgagtgagctataaaagtcgccgatagatataacaactttcgattagtctagtttctttaagactgagttagaacatatacacaatagctatactaactagcgagatgtaggtcaactcctcctctgtggctttcttcatctgaagcccaatctcatatcgggaactctggattcttttgagtccacaaacgacggctggcagggtgaagatttgatctcagtggttagttatcaaacaaaaaatctagtgagaaacgaaactcaccgagccagccttggagttgctttatccaactagctctagcatgctcaatcgggggatctagatagatgacttgattttggattcgaacttcatgaaccaatgcgacgatttccaccttcttttcggaatcctaagaagatcgtattgtcaagccgcgctcagttcagttccacacgttgaaaaggtcgaacgaatgtaaatgagatatgaaatgattgcacataccttcggcgcgtcccccagaaatccaactctccgcttcgtgtttatctcggcggttccatttcttctgagatcagcatcgtcggtcttagagaactcggtgcaccacactcggatgataagtcggagcctgtttagaaggatctgttcgatctgttgatcgaggtcggaaacccatcgatccagattagcgtagccttctaggttcattcggtcgatctatataattttagccggcgcatatttcaagatcagttctgattcagtatatatgacacgataggcctgaatacgggagtttaaagactgacgatcttttggatattatcaagaacatcagacaacgcttctgagtcataaggtcttgttgaaagttcatcaacaagacgagtgatctcttgatgagtttctatcaaagaatttgttttgtcctgtcagatggtcaagccccgtcaaagaggaaaatatcagaaaaaagatccatccgatctgaaagctgagagcatgcatgagcaagaagcagttgtaaattggaatcatcacctgcaagactgagataacactagcaaactctctgacgaacccaagatgcttgctatcccgatcgtaaatgttgatgaacatttcccagcggagaggcatacctagttgttcgacgaaacaccaaagcatcgtgttaaatttcagatccgaatgaacgatataaagccttcagattcggaacttacctcgcgcaatcatctgctgaacgtcgttacggtaatccgccaaaaggatgacaatcttcggattcacattaatcaaatcggttgtctgtgtgtacgtccggacggtttccatcaagctgaccgcataaggataaaccttctttgcatccttggcaatgacagtgatctgatggggaactgcaaagttcaaccagatcaaattcctgacctctttaaagagggtgatgatctgcggatcaaaattgacggccagtcggaattgattcccgttggacctagaccgagtgacgtcaaacaacctgccgttgatcttgagttcccgggcgatgatgtccatcttccaagcttcgtacagcgggttcgtgtcgagtttcttgcggaacgaagcggattcagattgcagtctttgaccttcagcgtagagttcccatccttttcccagcacatcttccacccgttgcatatacgcggcgagctgacgctcgatttgacgagcccaaatgatggctcctgctacaggagggagatctcgcatctgtgacatatagaacgcctcagaatgccggtagtttgtcgtaaacttctgatgtagccgtttaatatcatctttaacagattcgatcagttgggtctggtactcttggatagcgcctcgaatctgtatgtacgaaagttcgtctcgttagtacagatgcccttgattgatagaacattgataccgtcttgcagagaacagctgatcataccttttgccggacgagaagagaattgaatttggagaagactctgaacatctcattagcattacgagctgttccaagtctatcccgaagtcgagcgatgatctggttctcgactcgagcaactcggtcgttataagctccctctgcgacgagccagatttctgctccggcttttgttttcccgcacggatttcaagacggaatagtagaaggaaatgtgcgaaccattaacaaagctgaagaaattcaacaaaatgtggtagagacttaccagggctgacatcgagaacgtcaagatgcttgactaattcatactaaatcacacgaaaccaagaatatgatcagcaagaatagaaggatatagagatgtctgtgtgttgacatagtggaaacatgatagtcgcactcacagcagctttgacctcttcttccatatcgatatccgtcaacgcatcccccccggtcctcttcaggcccttggtcggaccggtcataacgctcaactgctcatgctgctttctgaacacccggaggtatgaaagcttctcctgaagttttgcatgggcagctaagactctgatctgcatgaatctctctgatcgttttctcgtgactgtctcaagaacccatgagtttacatcaaccaaaatgaaggaaggacgggtcaaacaaacggactatcagaaaactaggagaacctaagagttcagtctgtagaatgagctggggtagaacaaactcacgctctcgagcaataccaatgaattctttcatcatatcgtcccaagtattgaatacggactgacaaacgaccatcaacttctcgaatgtgttgtactccatgtacataagcttctgactggtcagcactttggtcagttgagcatttagatctctagagatggcttccgccagctggagagctctctcgatagggtacggactgcgttcgatagaggcgagagaagtgtggcacgttagaaaatataaacaccactagttttgaggatcatacacgtacgagagtttgagcttgttggagagatgcttgaagatggacaagatactgtcctgcattctctcaagatcggtagcggcgagaaggtcgttcagagggaaatccttcatgagttgattatagctgtggactatcagatcaacgggcaaaagactatcagtgaaatctgtcgttcaaacgtatttatgataaagatgtcatcaaagaaaagccgaatgagaaaacaaatgcgtaccgttcttggttgcctctttgagcccggtatcagcaatgaaggaaacagtggcgtggaacctctttgcatgcttcagaatatccaaagccagtaccactggctcagagcttaattgagcttcgattccttccaacgctcgttccatactcagccaaaagttgatctcttgagaggctgttccggacgctacatccctgttaagctttgtgacggactgaatttccttgatccatttgttgacatccgtctgaagtttgttcagaaaagaagcatctgtcaggagagaggcaggctcgatcgaatccactctgactcgagtcccctcggaatgacaacgttcgacagctcggacgacaacggggtggattgcgagcgtcgtttccgggatctcgacgttctgttgtagatggagtaacgagagctcgagttctgcaaactttttctttgtcatcggaatgcctaacgtcgagcagagagacagagacccatcaacgtgtgagcgcaagagcaaggagcaattgatagaggaagaaggaaagaacgaacccatctttccatcctcggcctttccgttcttgcccagagagtttccgtcttgaccgccatttctgctattgacaaatgcttcgaaccaaggcccgactccccaatgaacgagctgatgcaaactctcataaggcgttcccaccgaatcgttcgctcctcctccgcctggtccggaaccatcgagcccattcccaccgacggtactaccagcggtaccggtcccggaggcgcttccgggcccaaagaggttgaggagactgagctgactggagagagggatcgtttggtctagaagaggagtccgcttgatgagtgccaaagaggctacatgctgaggggcgtaggataaagtcgatgtgagttggtacgagaacgtcggtgtcgaattcgtaggatctgagccaaagccaaagccacacccgcacaaacacaaacgagagcgacgaccacaaggatcagttgatcaatctatgatcgaacgagccgaagaaagatatgactatatgcatctttctgaagaacctgttcaactcaccttcgccctccacgtccgagacgtctctgacttgattgacgtaaacgacaccgacattggctcctccacagaacctctcgaccttctcgaccaattcgtgcttgctgttttcggcgaacaacgatctctcgagatcgtcctccgtcgctcctaaaacgaccggcagaagggtccggaggtatgtctcgaatatcgatggctcgaacgaaggagtgatacgtgcgatggtatcttgatttggaccagacgagaggtctgtgcgtccttcagctggatgaaacccatcttgatcggccatctctcaggaagactctaagggtttcctttggtaaacttcgaaggagcctggaaggagagggtgtatacgtgttcttcttcgtttctcaggggttaatacaaagagagatgccagagaaaagaagagaggccgaaaggaaagaaagagatgagaacggaatgagagttgatggtgtcaaaagtcaaaggggcgatttccgtaatttacaaggcaaaggaaaaagaagccgcgtctgtcttacacgcgtcttgctgatggatggatgattgatcgatcttctcattgatcaagatgtttcacaaacaaatccagagcagaaaatagagtggtataccaggaagagatagaagaaagaactggattgtccatgagcactttactagttagccgagaaagaaaaaaagtatgtctggcagaaaggtaggttgaacaatgggaagggccccaaggaaaaggtctgagacggacgatgattagaagagccagcaaagagagggacgatgaaagagagtacaagcgaaacactcgaattgccgccgatggccaagataaggcaaggagaagagaagaaacaagaaacaggtaggggtatgctaaagatggagaagaaaaattggaacttgccgagacaaaaaatgaaaaagataggcacaggacaagacttgtattgaacgtatgcagaagagagagcaacgaagagaaaagacagagagcaggcaggaaggactactcatcactagggttggtcactttcagaccagtgctctgacctccagccccggcatgtcttccataggtatccaactcgtgcaagctcccatcgctatcgttccccccgtggtcagccgccgcgcccaaggcaggaccgataccagctccggctgctgctccaaggtaaccgtcgttctgtccggatgggaggtatccatggccatacgtagggtcgtacccaccggaaggatcatatccagaaggatcgtacccaccggactggtcatagccggcctggtcgtgggtcggttgaccgtatccgtgatcgggatggtatcccccgttgtcatatcctccgtcgtgttcgcctcctactggaccctggccggaatagtaaccttcggcagctgcagccccatccgtatatccaccctgatggttgctataaacattagggtcgttgtaggcgttggggtcattgtaagcgttcggatcgttgtaagcatcgtacggctgatcggagtagggttcatctccgtaggcaccgtaagattgaccttgaccagctccggcgccgtagtatgcaccggcaccggcggcagcagcaccagcagcaccggccgctccataagcggcaaaattgttgggatggctgtactgagacatggcgggtgcgtcgtgagcagagttgtaggacgttccaccgccgaggtcaatatcgtcgtcctcgaacggttggcgcgaggcggcagcggcagcggcagcagcaaccgaagcatctcgatctggtagaagagagagagaacaagagttcaattgagttagaaggggttcgaaagataagacacagattgagagacataccaagtcgagcggctcgacgtctcctaagaataaagaatccagcggcgaggatcatagccgctcccgctagagtagcagaggacaacgacgacgaaaaggaagagacaggtattcattgagcaaaggacgtagaagaacaagattcggagaaagaagaagaagaaaagaaaggtgtgttcacgcaagacttaccaataccgacgacaacaaagacaccgacgacggctccggtgttgttgaagaacgagctaccagacgaactggatccagggtcgctcagacttcctgggttcttgacgacctgggtgatggtggtcaccaaaccgtccgcctgggtgcttgtggcgaccgaagtgaaagaagcaggcgcagaggtgacggtagatccatgagaatctgtggtggtgatgaagacggtagaagaagcctgaacgttcgaggtcgaactggatgactgtgaaactgtgacggttgaagttggggtgactacgacagtgccactggttgacggggtgagggaggcagtggattgagtagtagtagccgattgagacacgatggcggtcgaggttgacgacgtggctgattgagtagtgattaaagaagaagtcgagctagattcagtcacgacgactgtagtagtttgttgagactgtgatgtcgattgggaggttacggatgtcgatgatggctgtgcagccgaggtcgaggccgaggtctgagaagtagtcgatggtgtggcgatagtagtagacgtggtgacggtggtagaaggctgttgagcggtcgttgacgaggtggtgggtggttgggaggaggtcgtgggcgtggtcggcgtcgccgacgtcgtcgtcgaagggacagtcgtgctctcggcggtagaaataggaaccgaggaggaagcaacgggtgtggtctgggctgccgaggtggatgcggctgtatcagaaacggaagctgatcggattgagtatgaaaggtggatcggtaagagaagtaaacgatatttgtcagtttgttcatctctaaaatttttttcctggtgataaagatgagtataggataatggccccatcgttttcccggatgaacacacacgagagacaccggagctagatctctctttgcggagcgtccaggttcctccgcaccttctctctcacagccatccgcctacgcccattcatctgatcgtgttacaaaaagagaaagaaaaaaaggacaaatctcccgacgacctcgacctcgacctcgacctcgagagaagagaaaagaaaaacaaatgaaaatccgttactcacccatgatgattaagattaagtaacacgagacacggggtgttgtttgttttgtttaattatatagttgattcgttgtcgttttacccgagattatttttgattgagaagaaagacgttgttgagaaagagagcaaaagaaagaggaaggattgaaggccgaggtggatcgataggcagaggaggagagggaagttttagaggatttatccgaccgaacgcgatgaagaatccggagaatgaacgggcaggattacaatgaatgcaaacgcgacggaaggaaaccagacagagacggtagaggcagtgagagggaagagaaaagagagagagagagaaggacagtggttgcgttgttgtttgccgtttaagggatgattggaagaacgaagagagagcgttggtgagaaagagcaaacgaacggacggggaggaggaaggcggggatatgttgaataagggtgggggtaattcaaaaattaattcaaaaacatagtcttggccttcacttagacaacctagagaagctgtcaccgatcggcgccatctttcgagatctgctactatagttaccgccagtggcgccagctgttcagattagatggccttctttatcactttgtggattgcacgtgacgatggagagaatgtcgagacgaaggacaagtagtggtggaggagtagaggagagatggaagaggagaaagaagaaagaaagaaagaaagaaagaaagagaagaaaagcgcacctgaggtaggagtaacagccggggtagactgagccgccgacgttgtctgcgtgttctgagccgaagtggaaactgccgctgtagaagtcgccggcgtcgaagcagcggacgtcgtttcttggttcgcactgacagaagacatttctttctttctttcgtctatgtccttagatctttgctacgttaggcctgacgagaaaagtgcttctttcttcctgtggttcttgggtctgggatgaagactagtgttgaaatgtggacaggaacaggaacagggtcggtttttagcaggtaatcccgacaaacgttttttttaatgttccggtcggcctgataagaatggatcgttccttcttgtttcgaactccaatctattaggtctacggaaagctagtcgaggagagtgcgatgggcagaggtcgctctgtttgataactgactgtcgaaaagaagcggttggaaggatgactggacgaacaaccgaaggaaaagaaagggttgaaagaaaaaaaaggaggctgcgtaaaagtttggggtttttccgattagaaatgtttgaacatttttcaatcgtattatcaacacgtcattgtaagaagatccataacagtaacaattctctattctatagtatagtatagtatagtgtagtatactgcaagtgaaagtctttcttgtacggcacacgtcgttcttgatactctcatcgcataacgaaaagacaagaagagtaaaatgatctccctctgcagacacatcaacgttgagaaatgagataaggagtgagatgaaaggaaaagaaaagagaagagaagaatgcacgaagaaaagaaaaagctcatcccgatctcagcttcacactcagtcgtctctaacctcggccgacccagtcgtggtctcaagaatacccatccgcctggcaacataatcctggccgacgatctcaaccgcctttcccaacacaccgaccagatgctcctcaacccactctccttcgtcatacccgacgttcaaccaaccacccggaacggcctgtgaaacggtggacgaccggagaccgtgtgcctgatcggagagcaggacgatgaacgacagatgatccggattcggcgtcgagataggggtcaccgctggtgggacctcgccctcggccgaaggcccggaaggcgaaggtgagagggagatgatcgaaggttccgcgtagggcagaggagccagcacaggttgaattcgaagaaacactggcgacaccgtcacgggtaaaccgactatgttttattatgttttccagatactcggtcagagaaaactctacaatggataccgggattgagaagacctttgatcagacaaaattggagacttacttgcagttggctggttaggcttgctcacatggccgtcaatcagttctttcaacccggcctaaaagttcccatcaattgaagaacgaacatgtattcagtcctttccttctctttcctatttgaaaagaagaacgtacctcagccactttcgacgcaacggccatgccttggatcgcgttcaaatcgcgctccttgccagagttcgaccgaggcacaggatcagtcttgcccctgttcacgataagctcaccaccctcaacttgctcgagaatctttgattgaattggaatagaacccacgaagattggtcagttaggcaggaaggtttaatcatcaattgtgactctgatattcaccttggataaacttcggtacacaaccccctcaactctgaaacacctcggttaacaaaaagaaaaatcagacacgcttcgttctagtccagacagaagagagaaacgagagcaaagggaagaaactcttcatcagactcacccgtcgtatccaaacatttcgtgggagagccagatctcaatgacctcatgttctgagatgggcggcgcgatcgtcgccaacagagtggagaacccagactgggaggcaaccacaaggtcatgtcctgtgagatagggcatcggaaaaaatcagcaggaggtcagggcaagagcaaagaagagagacacagcacttacgtagtttctctagatcgacctgaccgacacccttgacaagaccactcagcaggctacccccccacttccgaccttcctcgaccgcctgtcctgcccgggctttggcatcacccactccgacttcttgaacgacatcacccatcgcgctttgaacggccttggttccctctctctggagagactctgctgtagttcgagcctgttgaatggcagctgaggctgagccccaaagggaaggtgcagaccagccccagctagaggaagaggtcgaagcttgggttgaggtcgatgttggcacattgggttgtccggaggaactgtcgacgttggttgattgaataggaacaggggcggatgctggtgaaggtgatgatactgaggtagtaactggaatggctgacggcacggctacaggtgaaccaacagctggtggaaccgaagaagacctaggaatggtcgatgatgatcgcttgagagtaagacctggaaaccaaacgcacacagaaggtagtgtaaggcttttttccgagattggacatgaatcagagatgaacatctttacggtggaactcaccattcaaaaagtttaaagcctcatctgcctccttgtcaccaatggtctgttcaccttgaattgattggtcgtcctggtggtgttgatcgagcgaactgacggtgcccgatgtctcggtcgcaggtcttggagactggtctccctctgttgggagatccgagcttgaaggaacatcatcaacattaaagtcgagatcgtccaagaactggagggcttcttcctttttagactttgccttggacattagaggagagtgtgacagcgatgaagcaataccaatagggcttgtgatggtttgtgatggcttgcgatgatgatgtcgagtgatgggagagaactatgaacagatggatcacctttgaaaccttcagagtttacggtgtatttatgctccgctctccttgtgtcagaccagcacagatggcgacgagattgatgatgaccgtccagatactgaacacagaccgacagacaacgggtctgcagagcgtatggttctcgatgtgattcatctttctctatctcaagtttcaacctggatgccatcatgtcgggaacgttgagtgtcacactctgtggtcgactcgagagcgccgtctggcttatatatgtatgatcttctggatcttgctgagaaaacaacattctacatgctctcctcttctctccagtatacaagacagcaacatggtgttctccaagcaaccaaggtagcaaaaattacatacccgggatgtatagagacatgtgttctgttgttgcacttccaaggtgaccgaccgggcggtcacgtccatcttgctcacttgttttcttttcttttccttggtctcttctactctttctttcctctcttccatctcatttcctctttctttttctctcctctttgcatacccaaccttcacctctacattctttcaaaaatgatcgctacctctgtcgtcttctccttgctctccgccgcagcttacgctcagtcgaccgtctctgccgttgatattgccgccgaacaggtccgttgctttctccgttctctccaccttcgtcacgtcctttgttgtttttcttcttcttcttcttcttctttctttccttcgttggctcctcaattgccaagctcgtttgctcacttggttcataccttctcttcgccactcgacaggccaactttgagcgtgagtctcttgtttgttggctatgtttcttcttcttttactttctttgcgcaaatgttcaaaacaaacccaaatctttttttttcattttcttttccatattccacagaatccctcatcgtgcccgaccttcttgccgaattcaaccctaccgccgttctcgctgtcacttacgatggcagccaggccacttacggtcagaacttgaccatctcccaggtcgcctcccagcctgttcgtccctgcttttcgtttatatctctttcctgtgccacctttcgctcacactttgaacatcccacatttagaacatcactgttacccctgagagcggagcatctggattcgattctgatgccaccttcaccgtcgctatggtcgacccttcttacgccggagccgatcagtctgctggacaggttcgttcaaatgatatctcccttgcgcaataatatgttccttgactgatcgcctgaactttccttggcacgcatgctgttgggataataaaaaataaaaaagactcgacactggctcaccaacaacgtcaagctcatcggatctgccgctccttacagcttgaactacaccactgaggccatcaccgcctacggaggaccctaccctgcgtatgtcattgatagcttgtgatcgcaagttctcatcgagtcactaacctgttggattgttatgatcgaaacacagttctggagatggtccccaccggttagtgacgcagcacgtttatagaagacactcttgactccgtgtacaatttgaatgtgactgaccttgggcttggcctttcttcccttaaactattacagatacaccatcctcctccttccccagcctgaaaacttcactgcccctgccggcttggatactcccggagtgagtagcttctctgccggctagaattgccttttctctctgagctttagtgatctgatcgctcatcttttttcctcttccttttctgtttcaaacaaatctaggtccagatctcgacctttgactttgccgagtacgtcagctcgtccggtcttgagcagcccgtcgccggattctactaccaggtcgagcagggtgttgccactgtcaccccctctgccacttcggctgttgtgacctcgaccttggctgccgctgtcggagctacttcttcctccgctgccgcttcctctgctgctgcttcaagcgcagccgtttccgggtacgtttcctcactcttacttttcgaagctttaggccttcgatgttaccatcgttgttgttgtcttttcttctctttctcctcctgtccttgcgttctttcttactcatgtttcctggcttgctgaaaacctgtcacagttccagtgcctcccacgccgcctcatccaaggcagcctcctcttcgtcccacgccgcttctgcctctgccgccgctacttcggcggtcaacggtgcatcttcctctttcggtgcttccctccctggtgcgctcgtggcgctcgtcggggctggtgtcggaatcgctttcgctctctaaaagaaacaagaacgggaggggcatgcttcttgatgctaggttctttttgatgatgatgacgacgacgatgacgatgatgatagggaggagaaggatgtttggattgttgcgataacgtatttcattcgttctcttctgctcgttcttgccagtttgtcagtatatactcttctcgtgccagcttgaagagacatgcaatacagacacgtgatggaataacgtgagaacgtttgaaaggaaaaaagaagaacaacattgaaagaaaaagagaaaaacaaaggttcaaaacaatcatgagacgaagaaaggaacgaaacggcaaatgcaaaaagaaatatgagcgaaggaaaaggccaaaccaaggatagatgaatgtatgaacatatgaacaggtggacgacgaagttgaccctcttcgcttccacgtttctttaaaacagttagatagacgaacgaaggaattgtggatgaagaggcaaagaagggaagggaagaaagacaggagtacccaaaaactagagaaagaggaggaaaggacgtcctccgtcttctcgtcaacgctagcctcttccgtcaacgactctcagaatagcctccagctcttctcttccttcatctcctagcgcatcaaacattccatcgaacgaatcaaagctggtttctccgtcgtcttcgtcttcctcctttgcctgtaccgtcggcttggatccctctttgtttccttcggggtgatgatgcggctggttatgagactgacgggtagtcctccgagaacctattggtactttcggaggcgggtacagataggcttttgagttcgcttcgttcggtctcgccatcatcgttgcgcccggtgtggccaccgtcgtcggcgttgtggtcgtgatcatcggtgttagtggggaggcatacgataggggtttggaagattcgttcgtcgttgctgtcggtattggtaaaaggttttgtgtggcttgacgagtcattcttctcgtcgtcgtcgtcgtcgtcgtggcatgagtttgcgcaggaagaggttgaggggaaggtggggatgacggtaagaagagtggttgcttttcttgttgtcgattttgattccgaggctgaggttgaggcaagcacacgggcgctggcgcagaaggaggtctagaaggaccggcgaccagctctgtcgtcagagcgaacgaaggcctctttgaaggactcgtcagctctgatgattttcgcttttggccttgtctatttggcgatagacaggacctcaacggtgagcccccttcagtcgtccccgagtctgtccccaaggtggctaccggtttaggagagaccgttatctgcgaaagcggtcggagaggagagatcgcacgggtgttcctttgatggaactcacgcgagtccgccggcgccggttggagttgggcagaaggctgagggtaaggatgagggtaagggaatgacggcgctgatttcgatttggaagataacgtgtccaatctgggactcatcgacggaacagaattcgtttgcttggctccgttctgtcgattatgcaaactcaacggaagcttgttgccttcacctcgatctcgctcgaacctgtttgatccggctctgttggtttccggacccaatgtcctggctctttcaaccgaccgagtcatccctgcagacaaagaggacgaccgatcgacacttctcactctgttgaacgtcctattcgcgttctctctcgcactctgttcccgctgttttgtccgacgggaatcgacttctgaaagcagtttctggagactccatggttcagactgctgctgctgctgctgctgctgatgatgatgatgttggtcgatcgtgagtgatggagtcgtcgggtccggctgagtatcacttgccgagtttgatcgggagaggactctttcgggaaacaggagcggtgatggtgatcgagtggcctgccgaccgggcgctagcgacgaagcggatgtcggcggcccggcagcggaagccaaagttgtggatgaggaaactgaagagcctgagtcggtcaagattgaggacaacgaatcgttatgtctaggtcgcttggacgaattcgagccaatcggccttagaggtctcctggtgtgtggcccggagggaactgagggaggagatgttggtgcaggctcttgagacggtgtaaagaatgtttttggttctgtagggaaggaggacgtttagaaaaatgacaaagataaaactgttgagcatcctataggtttagggtatgataggcatcggaaaggtaagggaaggagcggagtgtgtgtgtgtgtgtatgtgccgcacatacctcgtctagcggccgccagtatcttttcctttagttcataatttggacttcccacccacgccaggacggaaggcagaggcgtcgacggcggaataggtagggctgaatcctgttgatccatccgtccgagcctttgtgggttgtgcgttcaagcaggtttccaagtgtatgtagggttgaatgatctgtttgatgaacctccaaacttctcccaggcgttctgtgagtctacctgtgtggaaccacttcaaccctgtacggtctggcgtgaaagcagagccaggagaatacgaacgggccgagatgaacggaaacaacacaagagaaagattcgggatagatggttgttccaaatgaatcaagaagtcaagtagaacgaacgcgtccgggtggttgtgtgtctgttagggttaaccattaaaagttggtcttggctctcgctatcaacgttcattcatcattcgttggatctttgtatcattgtgtttactctattgcgctcgaaacggatggacctcaagactcaagccctcctctcccagacgcgcaagcaatcagcccacacacccatagcggtgacgtctccaccggctccgcttccctggacgaggagcggtcgaggcgcagggtaccgggcggtggtgaatgagatgatgttgtcggatccagagagcgaggtggcaaacggatgggtggcggggtacctttaggaggaggcgaagggagaaattggcgtcaggaaaagaaggagaagaaaaaagggagaaaagaaagggaaaggagacaaacttttccaagctgcacttgatctctccagtctgtccatcgataacaccgacgtaacgcagcactttgccctccttctcggcctcctccctaagggaatcgaagaagtcgtcgccctctgccaatcgatcgagatactcagccgcggtgttggcgttctccaaaacggggggaacgagcgactttgtagggaccgaagcatacctggaaaccattgagaaagatgtgagttatacaaagactgacgatataaggacgggagaaggcgacagaaaaagagagagggagagagaatagaggaccatacccgttctccaactttttggccaagctggggatctgcctcgaaaggatggtgactggggaggggattttgaatcagatttcataaagctcatgagatttcgagtcgtcctatctgaaggtatacttggaagaaagaaacatacgctttcgggcgacgtcgacgccggaaagatcatctcttgggtcaggctcggtataaccgagagacttggcggtgtgaatgatggaagagaacgtcggcttgtcctcctggggcttagcgggcgagtagttgttgaagatgtatgacactagataagtgaacaaagagggattcaggtgaggacaatcgaaagagaaggagaccggtaaaacatagagaggagaagataaagagttattctgactcacaagttccggagaggacaccctcgatcttgacgatctcatctccagtctcgacgagatccttaagggtggtcaggatgggaagaccggcaccgacggtgctctcaccgtagctaagagtgtttgcttcgctggctgcgctcaaaacattggtccagagcttgagctctccactccatcccttcttgttgggagtgcagagatggagtccgagcttgagaatggtagggtacagttcggccaagtcggccgaggaagagttatcgaccacgatggtctggcctttgacggcggtgagagactggaaaagagactcaagctccaacggcttggcctccgggtgggcatcgacccatttggagggtgagctggtgatcggctcggacgaggggattccagcagggatgtacacggccgaccgggagtttgcgagcgcaaggagggtgaacttttggttgagcgccggtgatttggcgaggatctgaaggaaggatgttcctactccgccgagtccaagcacacagaggttgatcttgttgatggccatggtgtgagtgagtgagtgagtgagtgagtgagtatgcaagagtgtgagtgttgaggtgttgatcgggtagaggctgaagatggaggaaggaaggaaagaaggaaaagttgggttcgtgagagtgattatgtaagcagatgggttgtaaccaatgtgatcctcacagcgcacgcacagattgatcgggtacaaggcatggaaggaggtatagaagaagaagaagaaggaagaggagagagagggagagaaggataggcgagggaactcgatgggttgaagagacttctgtacgagatgggctcattagtgaagatgaaggaagactgcagcagcagcagcgactagcaaagaacagattctccgagaacttgcgctgaggtaagatgcgttgtgatagtagaaagagcagctacttggggaacacccacggggatctcagccggatagacgataagaagagcaccaaggcaatatcaggacatgaccaaaggggagtactaaaatgttgatggaacagttgctgtgacagatgctatgaccgatgctatgacctatacggcgacatatacaatgatctacactatagcagacgatacaaaaacatgagtggagagacgttgctaggatgttgcaaagatagagagtgactaggaacaactcaggcacgatcgaggcacgatcgaggcacgatcaggaaacgcctagagagacactggaagcgaaggcaccaagagcagaggccctgggagagagagagagagagcactacggagggaatagacgatccaggaacaaggcacgcccttcaggacacacaggcaccaggaacggcggcggcggcagcagcggcggcggaagtagcaacaacagcaacagcagcaacatcagaccagaatatgacgtatcacacacactcacaccagcacccatacttgcacacactctcacaccggactatccacaagagtgccaacatcaccatactcactaccgccagaatcacagctagcgtgcaaccagcgcaaacgagtatcttgtcaatctcttggtggctgattctcgcccaaggacacacacacacacacatatcctcactctgtccattgccgcacgtcccccgacgaaagccgaggaaacccgatgggcgcgaacaaatttcgtcttcttttccttctcccttttcttttttttcctctgctcctttcctctggacagtcatctttgatcaggttgtatatctccgttgtatccccttctccgtctcgctcgctccgtctctctccttccgctcccctgtcccgttcgctctctccaaacgcctaccgatggctgatttaaagaaacccgtgctgacgtatcccttctggtatgtgtatacttacacgcgcgtcaaagagagaaactctcattggacagaccgcccatcgaactcgtgttgacctatatgtattccgttttcttttcttctcctactcactctctgcatgcatgccctttggctatcgttatgctctcggtcggctggctttgatcgcgtcggtcgttctgcgcttcaaatgatctaggtgtggaggttcgtccaacacaagtttctcctattcttgcttctactcgagcatgtaatccgctcacacgaccgcttctctctcttcttttcttctttcttccttgctttctctcgcctcgctctctatcttctctcttctcgaatgcttcgtatcgattctcaggtgccgccgcttccagtcagtgcttcttttctcttcttactttctccagatctccttctccctctgttcgctgtctgcgacgatcggcccgatcatccgaaagagcctcgctcaagaaccaactgtctctgctgtttcaatcaaaccgtacaatgacttaacgatctcatcctcttatccttccaacgcaatcctcagtggccgcatgtgtcactcatccgttagatcttctccgagtgtatgttcctttccatcctatctgtcccttcagacacgagcaaacactaagcgacctctgattcgcccacccttcagtcggatgcagacctctcaaatcaagactggtttcggttcgaccgctgtatccgtcttcaaggccaatggtaggtgacttccgcttattatcatcgcaactactcttggcctgttctcatgctgatttcctatcccacttcctctctcctcctcaggtgtccctgggttctactcgggtctctcggcctctatcatgagacagatgacgtattcggtcactcgattcggagcttacgaacactttaaggatgtctttcgacaaaggaatcgttcgtcttacacctttttgtgatgcctatcttctttctttctttctttcttgaaactgatgtctgccttcttcgtcattcgtttgtaccttttcctctccagctggctcgaaacttacgcctatgcagatgatcttggctgcttcgctggccggagtagcaggtggaattgccggaaaccctgccggtccgttctccatcgctcaacaaatcgaccctacctttgttctctgacgaccgctatcttacttcccttctcaatatccaaataatcaatcacagacatcatcctggtgaggatgacggcagatgcctcgaagcctccggccgagagactgaactacaagcactgcttcgacggtgtcttcagagtcatcaaggaggaaggtgtccaacaactcttcagaggtcttggaccgaacttggtgaggactcgtcctgtctttatctctttgaacatagtgcgcgcgcaacgtcaagttcttactctgttttattccctcttatcttgtcgataaccgctcctcttcttccaggttcgagctgtgttgatgaatgtatgctcctgtccatctttccgttaactcaaccgcatatccaacacgactgacgagaaacccttttgaaatctcgcacttaggcctcccaacttgcatcgtatgattggttcaaagagcaacttatcgctcgcctcgacttcaaggacggattgttcttgcattccatggccagtctaggtgctggaacggttgccaccagtacgcttctcctgaccaatcttcctttcgtttttcgtttttcttttcccttccagactaaccctattcatttacatcctgtctttacaaatcggaacggatagcaatctgcgcaccggccgatgttgttcgtagcagagtcatgaactcaaaatctactgaaggaccggtctctgtcctactgaaatcgttaaaatctgagggtcctcaattcttgttcaaaggatggacacccgcttggatcaggctggcccccaacacggtcttgatctttatcttcctcgagcagatcagaaaggtagtggactctactcgaactctcgccagcgcatgatctcctctaggtctctctttatctgttgtctttatcgttcaccatctcgccatcctgccattccattatgcccccttgcttggtatctcttggttgtttctttcctcgtatccacctagatttccatctctttctcagctcacgattagccgaaaaccaatagatttcctcttttcttcctattctttgcgttcatctccaatcgatcttgcaactaccatcccattcttctctaaccccattcaacttagttctcctcgtactcgaggggttttcggatcatgcaccagaagttaggaacatcccaccgtcctgcttctttccatctatttcttttactggctttctggttttccttttcttttcctcccttgatttcctttcccttcgcctcgagttaacttcgattatcctttgctcttttctttttgaatttgcatccctctccccatccgtccatctatcgcctatggtttataactaccgtctactgcttcctttcccaactttccctttcttttctgtcctctttcttcttcttttcgcttctcataaacattcatcatggtaaatggaattcctctttttcttttctctttctcgccttgggcacatagccacgaaacaagaaggatgccgagaaagatatgcatcctgaccatatatcagaccatcgtcattcagatcatcaagtgaaatagagtagagtaagataaagtatagtcacagaacgaaaagatagaagagggtaggggaagtggggtgataaatgacgagtgcttgagaaaccttttgccaccaagaaaagaagaggaagaagaaagaaagaaaaccggaaaagaacacggaagcaggatggaaaggaaggtgaagagagagagagagcaaaaaaagaaacatccagagattatgattttactccatgtattcgcgctcttctcccctccccctccctctatacagccctaaccctaccaaggccctctccttccattctgttgtccgaactgagtcctcactgtgaccggaacggcgttcaacttgctcggactagccaacgaagcgaactgaggttgttgttgttgttgctgctgttgttgttgcgattgttgatgatggtttcgattagttgaatgtcgggattgattcgaattttgggattgagaagaagtattgtccccccctcctgttgatcccgctgagctctgtcgcttggacgccacgtcgaaagacggtcggctgggatcgagccctcctctataggaagatccttgattacccgagaaagtgttgcctgccgattggaacaatttctgagacgatccttgtccttgtccttgctgctgctgctgctgctgctgctgctgctgctgttgggacgtcttctggtgaggtggtggttgtcgaccttggaatccttgactggtcgtgccagttgagaattcggatagattccggaacgaagcctggatgggtacgccctggatcgggtacgtctgagaaggcaccggctggggaagtggactgtacatcccatgtggggagtaatgaatagacggctgaggtgaagtcgatgggaagccaacggcaggatggtagtttgtcccggaccgggtagcaggcattgccacaggtagccacacaccaccttgatgaggaacatgaacgggagggagaaatcccatggatgaattgctaccggtcagcagacctggctgctgctgctgctgctgttgttgttgttgttgttgttgttgttgttgttgttgctgctgatacggttgagcggatggttgttgatgaagggagtggagtgattgttgagagccactccgagtcataaatcggtcggttgagttcgatgaagaatgttggaattgaggtgatgatgagccgtatactccaccaggactactgctctgtaccgagctattctccgggaaagaccgcccagacaaatcattctccgttatcgagccttgtctcaactgagggtggataaagcttgggacggtatgcatgtggcctggagaagggaacgattgatacggattaccgtaccctctgtgtgaacccgagagtgagccagaagaatatcctgagcctgtcgattgaagagaagaccggttttggccgaactgagcggagggtgtaaacgacttgttatttgtaaatccagtactgttcacatcagaccgattcgatcccggtaaggttgtctttggagtgaactgcaagccggacgagaacggagactcggcgattttatctttgccagagggttgagcccaaagatccttgacgtggttttctgaaggtttggtagatgcagccggagacttgctccaagcagagcttgtctcagcgctcggaggcgagagtgtcgaactcaaaacagtaccgagcagccgagaacttgggcttgccttctggttgtttcaccaatacacgtgaaggtatcggaaacagggaatgcatggttagtctacaatctcagaactaaagaaagaagatgaactgtacacacctcctcttgtgataatttcggttcggaactgctcggacgcatgatagagggaaattcgggaagatcctctcccccaggatctgtactatttaagccaagttcgtccgctcggaagtcatcgatttcacttgtgaccatgaacctgaccagcggggcaagctgttcctccgaagccgggttaaccgagttctttcggggttggtagaacccgacgtctgtaccttcaggcattttggctgccgacttactcttggacagtcctgaaggagaagtcgttcgtccgttggcggcagatacctatagtaagttcaggtatgcgacaaggaaccccacatgagattaagagatatgaaccaaatcattaatcacccgtctgagtatgaatgaggagcaaggagaaaacgaaacccacctgaacatcgtttgtcgtccctgtctccgctgctactgattgctcggattcctttgccttcgaactaacctccttcttgacctctgccttctccttctcttcgtcttcgtcttcgtctttctccttgtcattctctttctcttccgactttggagtctgtacggtcttagtagcaccggctgattccggtttgaccttttcgcttacagtcgacggtccagagtcttttctgcgccaagatgtttcttccatcactcgagatcctgccgaggtccatgctggtcgagcaggtgttggtgggatgactgcgagaacaggaggtgtcggggtcgctgcagaaggtttctctgtcgtctgggaaggtgcttgcttcatgtcaacggaagaagaatcggccttgttcgactgtcttgtggagacgtcaggactggcttgttcactcgagacctctttctttctggacagagagactttgaaagatcgcgcaacaaatttcctcggaccggtaggagacgggtttaggagcatctcatctctagaaagcgtcttgggattcagcatgatgtaaagtggaggctcccaagataacgtgttgactgcgcgaagtaagtctggcttgtcgatgaactttgtctgtgaagggttcataggaggtcgtttgatagtcgagctagacggaagcttgacagtgatctcggacggcggaggagaaggtgcacggggatgacgtgtgaaaggagcctcctcgaccaacttgaacatactcgagatcgatggttttctcggtggagcagacgaggccattgacgaagaagcggatggccttcggggaacctcttctgttggtgaaaagccagattttggatcggctcgaacagtcgaagtaggtgatgtgagctcctgagacttgctcatcgctcctttgagtcgaagcatagcgtggtcaattgacgagacgtcaagttctcggtggaatgattttggatggctcgaaagagtaggggaggaagacgcgttctttgacgagtgaccgacaggaggatgagcatgagggtgtggaggaagcgagtctgggtttttaacggccaaagatggagaagattcgactaaagggggagttgaagatacagtaggttgaggagaaacgttagacggttgagtattggcggctgaaaacgaagctttgagagatgctgaagatcttctccaaacattctctactggtggcgcagacgaagctgcagaaggtagttgatgtgtcgttgatcggatggctggtatgcttttgggggcagaatcaaagaaatcagatgcagatggccttttgagtttgttgttagcagtggaagtgctggcgctattagtactgtcgacaagatcagttggagagataggcaaatccttggccgccatgtttgccaagtccgagaaatcgatcacctccacatcaggatccgatgacgagaatgatggttggttatccaaaggagtactcaacgccatcggtcctggtgttatcgtgggttgcgtcgtagaatctggtggcggcggcgacgacgatgatttcttcacttcctgcttggatgccgactcttccgccgctttcagctttagctttttctctagttctttcgcctttgcttttgctcgttccgccgctgctttcctctcttcctcttctgcttcgcgtctcagcctcgccctctcggccgccgaatgcatctcgcctttttgaatcacggtgatattttccggtcgatcaggcttggaagagagcacataagcgttcggagcatggtctagagggttcggatgagtcttcggtggagggacatttcgattgactcctaacgggccccgttcgtccggcgctctggatactggcaaggaagttcttggatcagctgatgcctctgttacaataggcaggccagcaagaggtggaacaccgtgagagtacgaagaagacgcaggaggggagatgatagagcgaggctgagctagatgaggaggaggctgtctaccgacaggatctcttgtagaagtcgtgggagcgctctcccaagcagagcgagaggaatcggtcgaggatccccttggaccgttgaaatgaggtgggccagcttttggaatctcttcctgatgcggcggaggacctcgatccatccagccacccgttgagttgaatgcactaccatgttgttggggaggtagtctgtcactggacagcctccttttctgggacgattggattgaggtgttcgacgggctggttgataaatttggaacgggaggaatagggtgtcgttccggacgattgccgtttcctattgatgaggaggcttccagacggttagaccgctcattgaagagcatccttcctgaagagaacgacgacatgtgatcctctgactttttccaagaggttgaggacgaagatgtttgcggcggaatttgacgaggaggatatgaactctggaaggaggagggtcgtccgcccgaggtagaaagataggacgcactgtccatcgacgatcgagactgtcgagagatcggaataggcgcggatggatgggttgcatgcgtacttgagcccgttcctatgctcatgcctgcacctctgcttccgctgatagaagaccgcttctgaggccagcttcgatcaaactcattcgagcttgggcgttggggtttgttaacggatgagccggttgaagtagtagatgttgtcgggggtaacggagcagagggcaggggtagaggtgtagtcttgaaatcgaacccgtcttcgaattgaacgacttcgtctaaaaaatcatcgttctcatcctcaagctatttatcgcacccagatgaccgccagagtgggataagacataagaacggttggaccatgaatttctctcgaaatgaacgaaacgagaggaaagtatctactgacctcgtcccaatgttgcgcctttggattcagatgcccaccacggaaggaatctaattcttgaaggattgcctgttgatgagccgcctctttctgctttgccaacaatgcgtccgtttgttttttctgtccgtcttctaaactctcggccgtcgttggaaaatcttgtactctccagcttggtccgtttggtcctctagagctttctcctacaggagctcttcccccactcgtaggttgccctccgctctgtccaccatcagccgtcgtcgcaccacttgttctccaaacaggcgatgcttcaccttgtgccccacccaatgccgatgggcgagacgaggatggtaccggagaaggagtagctttgagcccccatgaagacggcggagggccaggaggtggggcagtggggattgggtgaactaactttgtcgtcaacaatcgaggaaccggattcaagatcgcggttggtttcgtcactttaatcgatgatggtcgaccgaaacgatcattcaagagaggcataaaaattagtttttcacataaactagaacggttagatcatatagaccggatatggcacgcgaaaaaaaaacgacttacctgacacagaaccagtagtcgaggcgttcaaggaagccttcggatctttccctacgacgtcccttgaagatcctgcgaatccgacagatggaacgacgaccttctccaagaatctcttgttgacattgatcgagctaaactttttagttgtggccgttgccggagtagattgttgggcggatgccgagctgtggttggagagtgccggagatggattacgggttgatggtccggttggaggttgaggtgatggagccaatctagaagggacagaagcaggagcaggaacagtggtaggagcggaagaatcggcggaaggcgtaaggacatcagatgacggactctccagactgggagtcggtggtgattcagatggtattgcagtccgttgttttctctcgttctctaactcatcttgcttcttcacgatgtcgcccgggacgtcggatggcgagaccgagtctgagttgtcatcagccgaggcaagatcagacgatgtcttgacggcaggtctatcagatgtctctggctcggctgtcactgtctcgggcgattgcgatcgcaatcgcaacggtggtgatgatgttgatttggttgccgtatctgttggaggagaggtcgaactcattccgaccaggtgcctgcccctccgaatgtagatgagatcaagacgaagccgatggaaagcgatagatttcagacagcgaccaaagcagattcacaaggcgtcagcaagtctggacgatgtctgaaacgaaggttttctccaatgtactagaagaagtgattccaatcttgtagatgggaagaaagactactgacatgaaatgtattgataggcgacaagattccttttttctccttggtccttcgggctttcgtcttgtcgttcttctcttgttcttcgtacggccaagacggatgggcaaacgagtgagccaggatgtattgatcgacaggcgagtacgagaacactgcttcaacctaagacgcctacctggggaggaagaacaatcaacagatggtgatgtctcttgtgtcgatggtcacgaaacccgacgagatcataatgagttacaaggctttggctgcgctaggacaaccctaaccgatagtgatcgatacacggctcccttgaactatcgacattcgacatgcaatccacaacaaagcaagggtacaactagaggtttcaacagacaacaaagaaagacgaacaaggtggatagtagaacaagataagaaagtggaagagcaagatgaaatgggaggaagatgaggaggaccgtatagaaggagtaaacgcggaaagatttgttcagagttcttcttcagtactccggttgcctctgtctgtctctgtcagaaagcaagaagattagggagactacttcttggcgggctcttcaggcttaggagcctgaattttgaatgactgtatgaataagaaggaaaaaagaaagtcagcgaccacaaacgagatgagatgcatacaagatggtacacatcgagacatacctcaggcgtagactccacaccgggtccgttctgttcccaaggactggcagactcaaagtttctgaatgcctgagttaactgtagcggttcgtagacgactcgtttcttctcctcgtcgtatcggacctcggtgtacccctgagatcgatcaggggatgactcgtcagctagtgtattaataccgagtaggagatgaagaagaagaaggaatgaatcagaccacatacagtgagggggaaatcctttcgaagagggtgtccctcaaaacctaaaaggcacccaacggtcgagatgatcgggttagcatcggtgaatgacacatggcaggaatgatctctcggctcattctacagctcatctttggagctggcatctaaggacaaccgtaagacgtaccataatccgtcaaaactcttctgagatcgggatgtccgacgaagaagactccaaacatgtcccatacctcccgctcataccaatcggctcctctgaagagagatgtgatcgaaggcactggtgacacttcatccgcccacgtcttgactctgattcgagcttggtgttggatggaaagaaggttgtataccacctgtggatgcaaacaagaaaaaaaaagaggaaggggaaaagaaaagtcaaattaacttctccttgccagactcaggacatagagatgaagggaaaacagccaggaagagaagaaaacaaacctcaaaccggtttgtcctagaaggataatcgacagcagtgatgtccatcacactcttaaagtatgtttgagagtgatctctcaggaagtgtatgacgggcacgatcccgtcaggagcagtgtacaagacgagctcgtccttgtatactgagaactgtgagatgtactttggcatgcacgacaaaaggtactgaaagaatactagcgatcagtcgaagcagcagagaaaaagcggcaaactcaaacacagaagagtacagaagaacaagacatggtgaacggatcaatcaaacacatacttgaccatatacgtgaagcccatcggcggtcgtcttggacttgagagcaggattgactccagccggctcttgaaacggagcaaccgatggctcggctgacaatccagaaacagaagcagagacgaaacaaagacatatgaggatcagtctgcaaggagtggatgaacgattggaatgaatccatcaagaaaagctgatctccttctcatgaatcaagttcttaattctaagaggaaacgcgaagaaactcacccatccgtttgatggcagacacgctcagagccttcctacctacgatcgaagacgacagaggagcagcagaacgaagcgtcctagccagtttcaaggatgcttggagggtagatctggacatttctggactagtggaagaagaaaagagatatggaaggagctcaagaattggctgatgtggagtttaggccaaagatgggcgacaactcaaacggggctcaccccgttggacaaggcgagcgtgttttaaccctagctcgatcaggattaggtaatgatcaatcctccaccttccgatgagatcagacagatcgagagaacatatgccttacgttctactggatctcgaacacttgttatcacacccatctccaccatgtctatgatttacccaacgtccgtcagcctctcaatgatcggaggactcttcaatggtcgatcggcccatttgctcgcgttcgcatactcttttgggctgaatacctggcaaacgtttgccggtggaatcctggcctacaaggcattgcgtgagtataatatatgcttttacacttgagttcgacatattgtttggaactctggagcttacgggggagacgatcggatcgaagctcgaatcaactttagaaacctccagaacaagatcttcccgatctactttttgacaaagtaagttggtgtatcacattcagaagaagcagatgaatgagaagagaagcctgatgggtggtcgacaatgttcaacagctcgatcgcagcggccgtcatgctgggatctcaggtgtaccgacaccctttgaagcagtcaattttcactctctcctctcctgagtctttccaggcggtgtcgcttggactgaatctggcattctacgtcctgaacgcgctctggatcggaccattgaccacaaaggttatgttccagcgggcgaaactcgagaaggaggagggcaagtcgtacagtgatgacggggtcagttgtcgttccgatctcttccttttagtttgtctactgtgagaggaagctgattggagatggtgccgctacaatgttcttccttgtttgatgctatagatatctgaggaaatgaaggtcctgaacagcagtttttccaaacttcatggaggtatgttccagaaatcatgtcagacttgattgtctcgagctgcgtttgttgacagtgtcaacttcttcttttctctctgggtatcggattggtagtatcctctttgctcaatctgggtgcattgatcgtgacgacggtgcatggactatggattgcaaactacggtctttgaagagctattctgtatatcagttttcttgttctatttccttttccttaattggaaaggtcgcatccttggcttttcacacggaacgtgtttgtagcatgaacagaatggataaatgtgcttccttatctgatgtgttggagtgtctgataatctcaaaataagataatcgcgttgcaatgaccgcaatctctactgagttcacacacgtatgcagtattggtaaccataggggtgcaatgttggtcagttgcctcatttatctacagaaacttatttgatctcgcttttgtgttatttcagctcttgccgacagtccggagagaaagagagagtttgagtgcggatgaatgatcgtcaacagcaataggtctccacttgtatgagagcattggaaacaacgatatatgcacgcaaacgcacatgcacatgtacacacacacacacacacacacacgcacgtacacagaccgtacatacaaacatacaaacacggagcatatatacaaatccacaaagcaaaccgagactcgaatgacaaagaaggaaaagcagtgatcaaaacagacggccgaagaaagaacggactgtcaccggatacagagaggacgccgatcgattttccccaagggggaccggcgccgtcaagccttacatatgccaaataactcggatgcggcccgcttggcaaaatgattgtctccttttcgccactcttctgttccttctacatttcgtccgtccgttcgttcgcactggtcgtttaggtttctaccttattctctctaccttccatctctgtagatcagaaaaaaaaaagatcctgtttgttgggacttttgataccttgttcttctgaaacccttcctctctttcaaccatcgaccgaaatctacaaataattaaatgaaaccctactcgacaataacgttgggatcgatcgtggcctcatctctgttgagcgccctgttaggcacgcgtccggtcaacgctcttcctgcgatctctcgggttggaaggtgagtagtcctgttgacctctctccatctttcttttctctcataggcgttgttcgttgctcgtccgaattcagacaaaatcgagtaaccgagttacaacagatgaaacgggcgtaagaccgaaagatcgcttactcgatacttttttccttttcttctcgaatcggtccaaacgcgatccgggtagatatctatatgatgagtctggtacacggttcttcatcaaggttggtctccatccgttctgccacctcttttgtctataagtttcgcgcgttcaacagagacgaaacatctgaccctgtttacgtgtgtatgtgggtgtgtgcgtgtgggtgtgtgtttgcttggacctgacagggagtcgcttaccaagaacaaggcacaatatcggaccaaagcgaagaaggccaagcaaagttagtctcactcgcctcttcaacatcctttctctttctttcttctctcgttttctattcgaagtagagcgcgctcatgctgatcggtggtttccttcgctaaaacgaaagtggcgggtttcctgaaccgtcgtcgtatgtagatccgcttgcagatgcgtcagcctgtcggcgtgacttgccttacctccaacaactaggtgtcaacgcggtcagaatctactctgttaatgccagtctggatcattcagagtgcatgtcgctctttgagggtgagttttgcctcacttgttaacacgacaaacacaaccacagccaagctgacaggctcggatactatgtttgttttgggcgatgatgcaggcgcggggatatatacaatcatcgatctatcgcttcctcagaacgggtctatcaaccgagcgtcccctgcttggacaacaaacctgttggacctctacacgacaacaattgaggttttcaatcaatatgacaacgtcctcgcctacaacatcgggtatgttcctctccccgcgccaactcttgtctctatggcttcgccgggtcggtctgctaactctcagattcgttggatgtatgctgtgtctcggatcgtacagaaacgaagttgtcacactatcaagtaacactgacgtttgttacccttcatactccatttctgcctttcttcttaccataggacgcaatactgatctcatcttttactcaacgcctttcttctcttctaaagacggcgccgttcatcaaagctgctgccagagatacaaaggcattcatcaagtcgatcaactcgactgctcttgtcggctattcatctaccgacggcgacaacgaatggcgaagtaagccgtttctcctctttccccttgtccgacatggttgcatcgtctgacacggcacttttacgatcagatccattggctacctacctctcttgcgcgagtgacgaaacctcgatcgacctgtatggactgaacaactacagatggtgtggaggccagacttacaacagttccggctggtcaacaacaacccagctctaccaaaatttgacgatacctgcttatttctcagaatacgggtaagatcttgctttgtcatctttcttcttcgtggccttttagaactcattgaatgggtgctcttctctgcccataccgggcttttctaggtgcaattctgtaagaccaaggatttgggatgagacgccggcattgtatcaggccccagctaccgatgtatggtcgggaggagtcgcattctcttacttccctgattctcgtaagtcatgtttcttttgtcacctgtgatttcctttccttcaacttctgacagaaggttgatcatcttgatacctccgtccacgtgtagaaaactatgggttgatcacattgtcgaatgataacacttcagttgttgtttctaccgaggtaagctttgactcctacactagtctttcaccgcctcgcattaaatttgattttcttttgggtgttcataacgtagttcaccaacttggccgcccgactcagtaacattaccacttccagtacgcccacccgagcttctgtctccaacgctcaggctcctgcctgcccaactggaatcagcggtttcgacgccagtataaacctgcctaatactccggacgaaagcgtttgcaattgtctcgagcagtcggccttcccttgtgtaagaacggatacggctgctaggttaccaacagtcgtcggcgccttattggactatggatgttcccttcttggatcgacagacccgggtggagcttcttgtgataacattggggctaacggtacctccggatcgtacggggagatttccttctgtagtcctggtgagcgcttcttttgtctattctttttcaagacttctgcttcctggagctgatctatctggatccgtctcttttgtcatgttttcctatagacatcaagttgagttatgtgttcagcgcgtactacgttgcccaaggtttcgatgcccaggcttgttcgtttgctggaaatgcgactcggaacgcaaagtatgtcgactttctattcatctacctctcgttggttgttagcttctttatcaatcgtcctgactcgtcgccgcaaacttgttcgaatacttgacgtacgtagcgcaccgacatctgccaacgccgcctccaacgccgctcagagctgtcttgcccgccgacaatctgacggggttttcacccccaccgttgcctccaccacaactatctcggccactagaagctcgacatcggccgctagcgcaactgcctcgagcagtgggggcggtaggctgaacgaggcaagtcgatttggcatcgtcggttggttgagcgtcggtttgctttcagttcttgcaggtggaacttttgttatttagttgatgttggacaaaaaacgcaaaaggacgcttttgtactttatttccttacggattcgcttaccttcttgagatttagttgactatgcactcttcccccctctcgtcgttccttccttacttctctccccttcctttgtgacatccacccatcctgcttcgtataaatctgtgtagttttatgagcaacaaacaccttaatcgtgcaacctttcctgcttcctatctggactttcttgatcatctttatatttcttgctatttgcatatcagtttctcccattatatatattaaggacttttcaacttgtccacgctatgctctcatcgactgtcttgattacttcgcatcgcacccgctcaggcggatacaactgcaaagaggagcaatacctgtcctcaatctacttgtgctttatctgttgttacaaaaaaggaaaaaaaagagaacccgtgagaaacaaaaaaagttggcaaaaatagcgatggttctcggctttataataactgtgattggcggtgatgtcagcgtgttgaatagttgtccggacttatcgctgaacacttgaaaccatagctcggacttacgcgaccccgacaaacgggaacacaaagatcccacttacatccagaccagtttgaatctagcaaaatcaagggaaaatgggatccattattcaactggctgtatcgctcgtgggtgtgttcgtcttggcgaggttcggttatcagtttaggaggatttatctgcgctcccaggtatgttctcaatcgaccagatcgaacggtggagggtcggaacaatgaatggatgtgggatagttggttcagcgtggtcctcgatccgtccgttcgttcgactgacttctgcttcttggctttaccacacttgtgtcgatgcggaccaacctgctcaattggcgaacgaacgaccggatgactgacatcgcaaccgatcaaacccacctacgattcggtttctcgatcgaacgcggtgactaggttaccacaattccttcgatctttttcctgttcggtacaccattgagatttttcgttccgaacatacccttgatcaatccgatcaaccgaacgcactgggccgtccggttcgaaagtttgtctttgctcttctgcggactgactgtgtcgattgagtgagagcggccgaggttcttaccactcgattctcccattcattggatataggatacagacaaattcagtcatccgtcttcaagacagaaactccttcgaaagaacattcctcgatctggttggctgataagatggcgatcaagacagtcagcaccaacaggaagtcctgggcaaagccgatacagctttatagggttcgtctcatgtttatcgttcttttgtatcattgtggggttttcacgtctcaataccaactccaccaatctgtctgttgattatatttaaatacgtttactggcaaataggtgctagatctctttggaaagaacttggtcacgacagaaggtccagaatggaaagctcatcgacgaatcgttgggccttcattttctgaggcaagtccttcttcttttcgaacccgagtgatatcaccgttagcatacgagcttaccttcaacgcgcttacatgtgtgttgctacatagggtgtttacaagagagtatggaacacgagcctggttgcgttggagcaaatgtttcagacggaagggttggcggatctgaaacctggagaagaaatacaaatagaggatgtgacgcatgttacgatgcgtctggctttggttgttatcggtacgtcttcctccttccctcgacctgaacctaacagtgcgatgagtgatgtaacctcatgatggtatctgatgctactttgaccatccagctcgcgaggcatttagctttgatatggagtatgactcaaagcgggacaccaacgctaaaagtttagccggagatcacacgatgagcgcggccgatgcactcgcggtcgtttctcaaagtacacttgtcaaggtgttgtgtcctaacgtaagcccattttcttttcttctccccgcttgagcttcgatcctcacagttctcacggctgatgtactgtgcgcacatcatcagtggatgtacaagattccgaacattccttacgtctccgaaagactggccaaaataaaagatgcgttcaccaacctagataactacatgttggagatgatggccgaccggcgggcgagcagtcttgcaggggaagaggtccggtcggatttgtttgatagtctgtggagagctgccgatgataatctagataagcaggttgacggagagacgaaatggagtttctcggatcgagaagttgtgggaaatacatgtacgtcactcttctcttcgttgtactttattatgaagtaaggatgaatcctaatttccaacttttgacacctctaacaccgtgatccattcaatatagtcatctttttattgtagatccctttcgcacaaagctttttggtcaccaagatatctactgatcgttattttcttaacatttgatccacagagctgggcatgagacgaacggtcacagtaggtttagcttcttgcctcctaccgtcaaataccccctggttgtttttactgatggtcgtttgtttttccagcaatgtaagcctaagaatgaattgatatttatctagacaatctttaacaggcgccgttctacaggtcatttgtctttgtaatgctagcgctgcatcctgagaaacaagtcgaactcttggagcacatcctcacagttcttcctcgaggtcgacaacctgtgcgtcgtctctttctttatcatttgctgttatgttcgatgttcattgtcagattgtcgattttgttcgttgtttttggatcgtagatatatgaagacttccagaagttaacacataccatggctgtactctacgaaacgttgagacttttcccggccgtcgccgtcattcccaaggtctctagtcagtcttgtcttgtcttattttacctctctatccacttatcatttatacagattcaattcattcatccttcgttttataaaacaactaatctgaccgtcacatatttgtgacattaccattgaatagctgaagacacaacactcaaataccaggacatagggggcgacaacggaatcaagacgatattcgtgcccaaaggaacagatgtcaccattgacacacctgctttgcacactaatcgtacgttctttatcgctttcatacaagtagcgccactaactcttagcacaagataatcatagagactgacttcaacttctgtcgagtgacatagcgctctactggaaggacccgttgagttttaagccagaaaggttcttggaggattatgagaaggatgcgttcattccgtaagtctcgagagaaaggcatctcgtcctcttatataagtctacacaaaaaacttgatcttggaacacggcggctgtattgctaacaagttgcttgcctggtcatcaaaaaaaggttttctgctggtcctcgagcatgtgtcggacgtcggttcgcagaaggttcgttctcgcaattcatgttgtcaacccgacctttcactcatgcctgtcagctttgttcgacatccaacagtgtccaacatggtcttcctctcacttgtcgttcgagactatgaggtcgttgctataccccggccgggtgaaactgaggaagcgatgcgtgataggttggtgagagcgaagccggtgctgacgctgactccttgtggtgccgtcgatctgatgttcaagcgacgagcatgatgttctctaagtatgttgaaatctggactttgcataacaccagatggaaattggctggatgttgtttgagcctccctctctcgcgcgcttcccttcgcgtattttctccttctgtaccctacttggattgtacactcgtcactttagtgtttcctcacctcattaatctactcatctgtttatcatatgtatttctcctctacgggtgtaatcgtctgtatcgaatatgtatcgtctcaacttctaatcttgttcctttatttactatgatgatctttcctttgagaccctcaactctcgagaacagaactaacatagaagcatcagacgaaccacattttgtatttttatagaacgagaaagatacagaagacaatatccagttctgtgaactttttttccccatttcgtgcgatacgacgtaaaaaatagacaaactcaggagaggtagacgaagagagagggagagaaagagagagagaaaggtaacagatatagcaggacagattcagacaaagggtctcctcattagtatacctgagaatctgattcttctctggctgaagggcgcgtttaaagatcctttccctcagggacgtgaccctcagccaacatcctctcaaggctcctgacctcctcggtactctccgccttcaagatcgcctgcttgaccttttctctatcctcctcactcatcaaccttcctttttgaccattctgcacacctgccggtccagatttcgttaccggtgctgatgccgacgaggaggcagccttggaagaagtgaggagggaagtggcaagcgagttaggttgagaatgaggaggaggggtgaggaagagctctttggcagtcgttcgttcttgatctttgattcgggtgtaatcaaggacatgaagctgaccggcagccacctgaacgagaaaaaggaaaatacacagagccatgcgtcaatgattgtcatcgaagatatcagaagcgcgtaggataagaagacaacacgcgtcaaatggaggacgaagggagacatgacggccgtctgtctgcttctttgagagaaagacacaactgtaaggaaggagaaagggtagaaggaccgaccttccagatgcaaaactctctgtagtactgctcattcttgacggggtttcctcccaaatggagatatctaaggcttttgcagttctctagaggaaccaaagcggataagcttgttatcgagtttcctgtcaagtctgtccaattgcgagtcggaggattgaaagaaagagaccaaaacgaaatgaatgatgatgattagcggagaaatggataggtgatcggaggggcagaggaggatagatacgtactgagggttgtcaaattaggaacctatagaccgggaaaagacacgaaccataacaggatgtttaatacccaggacagcacagatacgtaagacgatgggaatatataggtttgcttacagaaacaggtaaagagagtgagatggaggtgattgagttgttggccaggatgatagattgaagacgtgttgcttttctcatcaaacgcgaacgaacaaaatcaagccgtcacaacatatgttcagtctttctggaagagaaaaaaacgcgtccgaaacacaacagactgtcatggagcaaagagcgagagaacatacacagagggatgttggcaactgtggtgagggcgttgtcgctcatgttgagacagtcgtatccaccttggaacgctcctaggttttcgatcgtttggatcgccatacctggatttttgtcgtttttgttggttcggacacgaaacgccaaccgagttgtgtcgaaaatgatacaaagcttcaggttagctacaatgtttaaaggtaatagcctgatgtttggaagacaaagaccacccgagaaagaagaacagagcgagagaaaaaacgagagaagcaaattgaggaaatgaaacgtacctctgaactcaagctctcgctccttcaaaggattgatatgagagggagatcttgatacgagctattttcacagatcagtacccaaggaagatcgtttgaaaagatgaaggcgtgaagaacaaggaaaagagagtcataggaaatcagtttcgacgcaagatctctgagaatggattgatgattgtatgatcccggagtgctcatcccatcctctcctgataacttctatcttcaggggattgatagacaagtagcagagcaacaagcagaagaaccctatgacatacttcaggagtgagtttaaccatggcgaccaagaagagaaagtacagttgatgcggtcgatgcagctgatgcagttgatgggatgaaggcaaaaagaaagtaggaggccgggaataggaaatgacaaatctttttctaatacacagactacaaaagttttgtattgaattccttacaaagtttccctaaagataattttgattcacaagctctccttcacctccaccctcgctcgacctcttccgcccactctcctctttttggaacattctctagggattgtatctctcatcacagacagaaagatggcacgtactcctacagcacccgctaagcccgcaggcaaaaaaattacgtttgataatgacagtagcggagacgagtccgcatcacccaacccaatggacttgaccgaaggagctctagaggtttccgacgacgacgacgagagtcaagatagtagcgaaaacgaggatgatgatgacgacgaggatgatgatgatgctcctgaggaggaaactatggcaagtggaaagaagacagctgaagaacagactcgaatcgaagaagaaatcaaagaacagtacgtgtttcagtcctctctttgtgtggtcgctctataactctccggtcgagtgcttattccggttcttcttcatccgtggcagagctaagcagaaccgccgtctggctgcgtccaagcgacagaaggcatctgtaccgaaagcatcgtcgaaaacggtgacacttccggaagaaccggtagctggtccttcttacctccccgaatcgatttttgccgatgctgccaaggagaaggcggaaagagagcagaaggaggctgaagagttagcacagcaggagaaagagaaagagagagccgatggaagaaagaggagaagaaaggatgacggggagcccaaagccaggaagcgggtcgggttcgttccttctttcgctcactggattgttctaaacgtccttcatcgagcgcctcagcgactccctttcgtatgaactgaccgtacggcttctctctctcttgtctgtagtgacacgtcggttcgattgctgaatgaagccggctcgaacaagacgttgtctcttactcctgcacctgcgccccgtcggataaaggctttcaagaagcaagcttaccagttgggcgaggtggtgtccgatccgctgaggagtaagatggccgtcggtcgatccaacgttggcgaggccagtgggagcaagcagcgaggtggaagggaacagcttgggaggaattgggtgcggaaggaaggtacgttttcgaattgaaagagaaacaattcctttctcagctttgtcctggctattgaaacaagctgttggccagaacgttgacgatttcgctttgaacacgacctatgatcagctcatcttactcaaaaacgatctagcgcaggacctgcagttggtttcttcacaggaagattggcaaaataagagtccagttgtggataattcatatagaaaaaacgcttgctcctgttatgcccatcagaccatgaatagcatgaccattttggtatctcttgtcccttctcctctctctctctctctcgcgattgaactccttgatacgtcgttgatagaacatgatgaaagaaagcgccatgtatcaagtcggcgaacacagactgagaagaaaggatgcgtcccggtaattcccggcccgagcaaccttctcatcctcatcccatctgtttctggagttgctcatctctcctcatccactcatcaaagaacatggatccatcctctgctgcagacagcatccggccaggaggtggctcgttatccctacaggatttctcgacatgcgagatctcggacgcattactcagtttgggtgttgcctctggagggttcttacctggttcgtggctaccagtacagtgtctcgcacagtatctttgagaagtgtcgttcatgtcagagggaaccacactgagacaagagcaaggtcggaaggaagagacactcatcgagttgtctctacgcgatggtgacgagtaaacaggccagtctgctcatctgccatctcatcactcatcattcggtattggatttgttctctccagatctcaaagcttactcgccagcgtcatcggacgtctcttctcatacacgactgtttggaccggcctatactgttcggaccgttccatttgactctgataccaagccctccttcgccggtcactttgttgatttagccccaagtggcagcgttctcgttctgaagtcgccaaaggactctgtcaacgcttcatggggtgggctgatgaccgtgggagctaaagcaaaaggcgtcgagggagtcatcatcttgggcagagtaagagatctagaggaacacaagagggaatctttcccggtttgtctacatctttactcctggtccatgctgaagtgttcccgccacgactcatcttgattgctctcatactatcaacaaaggtctacgcctactcggcctcgaccttacctcagaaaccgttcacccggccttgtgcgattcaagaaccgctcgttctatctgcgcctcatctgcctgagccatcgacgataaccatcaaccctggtgactggatcatagcggatgaaaacggagtagtagtagtcccaaagtcaatggaccgggatgtatcattagaagcagagaagagaaggctgatagatgatgcctgcgagcgggacataagggctgggaaaggtgtagaggctactttcaagagatggaggggatagctgtatgcgacgatatcactctcctacatgctacccagcgcatacattgactggctatgctacatgcttctcacatacacacatacatacatacatacatacatacatacgtacgttccctacgatgaacgacgatcaagatgaacgacgaaagcaacacgttcacacaaacagcagagaatcccgacgataccaagtccgatgagctgaccctagagaagtcgcttgaagtgtgttggtgagagcgacgctcgattttttggcttttttctttcccttacgttcacaattctctacgtctagtaagtgtctggcatgtgttgcgttctgcttggctatctggaagagagagaaccatcagggtcacatcaggcagtagagcagaccgtatagatcagaacatggaggtcggacgagagtggcaaacaagagaccgctcaatctttccatctttcttgttgacttgcctgacatttggtttttctgccttctccttctagttctcgttctcaaccgttcaagcgtttgacaagctcacaaccactcgcatactatcgcatctctctctcataagccatcttgaaaagaaagaagaaaatgtccacgacaccttcaactgaaatccattttggaccctcctggatgctcaattccaaccgaaagtcgactctcaagtcccagcctccaacccctgcaatggatgatcatcctcagctcccttcggtcccgtcctactcgtccatcatccgagagcctgtgtctacttccgcctcacacacctcccagtctcagcaacagcagcaacaacaggctgcgtccgcttccgaggtctctctccatcacgtcgaggatcctgctcgacccttccgatacaccagagatttcattcttggtctttgggatggacccaaagtccaggaagccaacctaccaattgaattcgaacggtacgacgtcgtcttccaggaggaagctgtccgtccgatcgctttcgccgaaacgaccgacaaggagcgaaagctattttcccttcccttcaacccggacaggcgaccccaggcaactccccaaagttcgtcgaacgacatccaaaaatctgaactctccaacaggcgaagccggcctggagagtccaggctgacgtctaatgcagcatcggcttttgcgcccggctcaggttcactaaactcacctggacgagaaagattcagcgggattcagggaggtgttcttggagggctcggcgcatctggtgccattggaggagtcggcctcggcgcgactgatggtcgtctcggtgccatcggaagaggagagcgagtccgaaggaacgtctcgggaggatctaccgagcctggttcgtgaaaaaaaaaatcccctctgtgtatcggttcatccgcaagaatgaagaagagagtgcatgtagttgacctttgtttaatcttcttgtctcgcaaagccgtccttcctccctcttctcagaactcctggcggcctactcgacagatgtcgtccaacctacttcctcaggccgatgagcttcctactgactctaccgcgggccagtcgaccccgggcagaaagtggcgaacgacaactgctccatccggaacgcccaccgtgtctggagctgctgaagacgaggatgctaacttagctcctggttcaggcgaacgaggtggtgggtttggagcagctgccaggcctggaggttggagggagagagaaagaatcaagaaagccgagggtgagctttctagcggggccggatggaacactgttggaaaggagggtgattccaaggtaatttcgtcgttccggtgtatcctccttaggttgtttagacagcatcttatatgttctcgatctactgtcttttcgtgtaattcagagagatcctaattctacccctctcgaaggatcccctaccgcaaccaactttgaatcaaacaccaccaacaacagcaacgcctacgctgcccttcaacaagatggcgatgccagtttcattgatcctgaacaggtcgccgacgctcaagagtcacagccttccattgctgacctggagaaagaggccatggccaaggtcatgtggacatacaaagatcctaccggagctgtccaaggtgagtttgcgtttaattgtatctaattcttttgcaagccaacagttgttcatctctacgacctgcatatccccataggacctttctctgctcaacatatgcaagaatggcacgctcaaggatacttcccgccttctcttctcgtcaaaagggagacggacaatgtctacgagactgtcgccaccttgactcttctcgcccccgacgaggcatctatcttcttccagagagctccagtccccccgct

SEQ ID NO: 1007 - DNA, 13768 bp, Xanthophyllomyces dendrorhous
gcttactccccacccccgggtttagtcctactcctctcgtttccccgatccatcaccacgcatacaacgttcaggatcccattgctgccgccaacttgtctgccggcgttcagcctgctcatcttgagatgaggtcaatcgactcggatccgttggagcagttccttgctcagcgttccgctatgagcggcaacgttgatcaggaaggccgatggggtgctaaggatgttccttcccgacaccagttggcccctcatcttgctcaacagttcgctcctggccccggaggatctggcttccagcaggttctctcccctggaggagggttcgaacaaggaggaccccttggatacggtcaccgatcgaccgctcctcgacacctcgctttcaacgatctcggggttttccaacaatccccttacgcttctccaatcgctcaacacgctcaaccttccccctggaaccagcatgctcaacccagatactttggacctggagaccagggaccggccggcggcgtaggcgcaggtgctggtttcggttaccagccgatcaaccagttggctcctggagccggatggggaagtccgaatgagtggcgaggatccccaattcagtcccccgcgttgcccatggctcacctacaagctcaacagcagcagcagcagcagcagattcatcagcaacaccaacaggcttacgctcaagatcagttgaacgctgctcttcaggctcaagctcaggctcaggcccatgcccaagctcagcagcagcaggctcctcgagcttggggttcacccgctccccaggctgctcaacctgttgcgctacaacagcaggtctcaaaccaggcctctgcccaggcttctcctgtctctcaatgggctaaacctctttcccaattatctatttcgtcccccgcgcctgctgcatctgaggtcgagcctacccctatagaggcagtcgagtctgtgaatactcctactcccgctgtcgctgccgtcgagaacgaggccgaggttgtctcaaagactcctgtacctgctaagaagacagtgcctactccggctgaacagacggagaccaaagaagaagctactcctgtcgctccctctacgcctgccaacaaaaaggcttccaaagctgctgccaaagctgaaaaggccgctgccgctgccgccgctgctgctgctgctgcttcggagaacactcctgctcctgttgagaaggtaacacctactccctcggcgcctgctactcctgcatctgttaccgctgcttctgtcactgctgaacggtcttctggtacggcttcgcccgttcccaaggttgctccctgggctcgaatcgatgatgactctgcctcggccctcaagcctgcttcccccggtccatctcttcgagagattcaagaatccgaggctcgacgagcggctgctgccaaggccgctcgaccggcttcgactgttgccacaactctgtccgccccttcctcgaccgctacctctgtaggtattccctcgtccggaacgcctcctcctgtcgcaagtggtgggccggtttggcagacggctggtgcacagacgggcgcgacacccgcaccggctagaactttgaagcagattcaagaagaggagcagaagcaaaagcagaaggctgctgctgctaggcaggccatggctatggctatgggaggtagtgctgctgccaaggccgcttacgcaggggctctcgcccatgccggatcggctgccaactcggtttgtccttttctgttccttccaaaaggatttttttttgttatgtagaatactgaatgtccgatgtgtttcattcctcaacagaacgctagtggagcctggtcgaccgtcggtaccaacggaaaagctgtgcccggagcgtccaagcctgtatctctcccttcttccgttccccctcgacctcctacccagtctaccaccaagtctgtcatccaatcaagttctggtcccatctcgggtgtttcctccgcttccgctggtggctctgctgcttcggttgctgccaaagccggtcgatccacccccgcctcgttggaggacatcgctccttctaccgagttcttgacttgggccaagaccgctttgaagagcgtgaccggtgtaaacattgacgagttcctccagatgttgctcgctttcccccttaaccccgattcagccgttctcgagatcatctctgactctgtatacgcccattcatccaccttggacggacgacggttcgccaccgagttcgtcaacaagcgaaaagctgatgcaaaggctcagaaggccggcacaatccctcccgctgggcgaggaagctctttggctgatagtcagttattcttttcttgtcttctgtttttttttctcttttctctctcggtacgtcaatacgaaactgatgatatgtttgacgtctcctcttgaataaaacagttgtgaaagctcagcccaagtctgttgataccggattcggagctttcaaggttgtcaagaagaagggaaagaagaactaagttctcttccctttcattcgacattgtgggataggaaaagagaaaagaatcgactgaggacaaacagaaaagaaagtggatggtacagaagattgaatgaactgttggtctcgatctttcatcagtacataagagctattctggcagacaggttcatacaaacaagtagagataaagcaagtaggttgacgtcaaagatacacatgtagatatatactgtcccaagtaagtgttcaaaaaaacacaaaaaaagcagagcacatggcggaatgaagagataataatgaacatctctcaacctgagcggaatccttttatcaaaccgactgcgccaaggatcaagcaagctgcaaacaaaccaaatacgttccccgttccttctggaagatcgctttgggggttagtttttgaaagcgctttctggattggtaagaatagaacgccaacaagaaggttagagagtgtgttgagaagaagagccgttgaagagagggcggctcttgccttaattcagaagaacagtttttttaacgtaagttagtggtttctcgactgaagcatggggtctgaagagcattgtcgaggactcactcgaacaggaacgagctctccgactaggacgtatgggactggcccaagtcccaacgactgacaacccacaaatccaaagacacctatggctgcgatgtcacctctttgctcattcagaccccatccgagtagactggctgagagtgccatgcctaaagcagatccgactagaagtgtctttcggccaagcgagtcaatgagaataatggatgggaatgtgagcaagacgttgaaggcggtgatatatacagccagcaggttggctgacgagggaaagagtggggctagaattgaggttgagtagaacatcactatacaaatatgtaaatcagtcaatctgcaaagctctgtgtcttctcaactccgtcgagagagtaaaagcaaaacaaagacacaccggcattgattccactcaattgctgaagtgacattgcacttatcacgaccaccacacctcttcgaatctctttctcttttaacatttcccatacctccattctatcctcttccacttccacctgttcgacttcgtcctctgttccgtgttcgactcgttccgaagcagacaacaatccttcttcctcttcagacaaagaagcatctgccgaaggggttgtgttcttctctccaagctgcaacgaggtgggatcaggaaggaatactgaactaaagatctgaaagactgaaacaataatggagacataaaggattgctttccgagaaccgtgatagtaaaggcctaggctttgcgcaaatagcttttccccatacgagtatagtatagaaaccccaagaatgaaaacgaacaaataaaatgtgatcaacatcctgagatgcgtcatgaacgatttatcaagaaagaacacgtacgatccctagaacgatacccaactggtgcaatactccgactttgcctcctgcgccctgtacggacaacgaagccaacgctggcgggacacacgcgattccacccatcgcccctattcctatgacagcccggccgacagccatgactttccactgggtcgtgtatatttgtatcagttctcccgatagagtgacaagcgaccagccgaggagaggccgaatgattagtttggagttagtctttgggagaaaaggcacgagaatcagcccgaagagaccgcctagggtgtatgctgaggtcaggtacccaaactgtatggtactgatacaagcagacgatggacgtggagaatcttgagagctttcagggccatcacatatcatggtagattgggaggcattcagagcctgtcgatgacaacaggaaagagccagtgtcagcaagacatatgagatgagatagcatcttcacaaactcatcagcctacagagatgtgaaaactgtgtgttcaccatccgaaagatgaatcagactgaatgagtgctcttggtctttctcaggcaccaaacatgatgctgataacatgaactgacccaaatatgagactggtgatgcacacccaggcaatcaaactcttcactctaagtttagacgatgaagctgacatgaagagctggatgggatgggatgggatgatgggtattggagttagatgatcaagtgtaccgtgaataagaagggcaacggggagattgcaagggaagcagagctcttcggttcggacttggccggtccggatctttttcgctctcatttctactgtattcagtattatcgtccatggagtttcagcaccaaagaaagatcacataggcaatatgtgcaaatcagaatagatatagaaaacaacagatcacacagacagatatgtctgcctacagccacatgaagaagggaggaagtgaagcaacgaagaagaagagaggaaaatacacatcaaaggcaactactgcctagcatcatgcttctgagtagcagctgacagcaactcatcaaacttgccactcttctcgcacatcatccggaagatcgcatcctcaccttgaggctttgtcagcagttcataaggtgatgcgctttttagcgaggaggaaacaatattgaacgcgatgtcagtacagcacagagacgcttgagatagcggacatggatacacacaactctttcagtcgaccatgatcaagcaccagcctaccataataagttcaacatgatatattaccgatcagtaaaaccttgtcgtagtttcttgaaagaaatacagatgcaaaacagcgtggtatacgtacaatcggtcatagtcgattatcgaggttagtcggtgcgcaatctgatcacagcaatggtacgtgtggcagtgaacaggcatcaagttgaccagaacgatgaagccgtaagcatcaatgtgatagcgtccgaggtcaaaagctattcactaacagtgataaggcatgaatccttgaactcttcccggatcgtcttctgaagaatgttatctgtctcaaagtcgacgctgatttggaagaaatgagaagtatcagtgaggagtcacgacaattgtttagacaaatcggaagtggcttcacctagcagtagcttcatccatgatgataattgatgagttgcgtaaaagagcctgaagggaagacgaatatatgagcagggtgcaaaacaacatcggacccgactagatttcgatatagcaaagatatatacacacccgacacattgctaagagctgcctctggccttgagaaaagtttgcgccacccgtgctagatcgtgatagaaaagattgaatagtcagtgcaaagtctcattaaacagtttgacacagatatcaggtctaagcgcgaacctgacttcagtatcaagcgtgatatttgctcggatggcattcgactcttcactgtttgccttcaacgcgccatccttcatgctctgttcgatacccaccaaatttgagttggatgacacctgactagatgcaaaggatctagtctttccgagctgtactcgctcgagtgcttctagcagagtggcgtcgtcgtgctccttgaacggatccaagttgtcccggatagtacctgtatacggccatgataccagtcgagtaccataagcaagtggaagttagccgcctttttttttcgtgtcgctcctttgatgtgatggttcgtagaagaacgatcagcattcgaagccataacgaaagatatcacctacctgaaaacaacacggcgtcttgtggaatgattgtgatttttgaccgaagatcctccaggccaattgaggtaatatcgataccatcaatcaactttacaggagcacgagacagcacagcttagtataaatcggtaatctgaccatgacgtacgagatatactcagtccaacttacgattttcccactgattacccccaataagttcgagatttatgtgataacatgagaaagtcaagattagtactgacatattcggtcaggtgtctatccagagaaacacatgccatgataaacgcgcaccttataggatctgagaatcgcaacagtgacatccctagcgtcgatttgccagaccctgtccttccgataagcccgattttttcacgcggtcgaatgtcgaacgagatgccatgaacgacgggaggcagctctggagagtctatttagtaaaatatcaaaaaccaaagattgttataattcgatttgatagagggaacgatatgagatgaagatgagatatgccatgcttacaagaaactaccaggtcctctacatggatcagtgtctcagatgagtggcttggccagtacgcaggaggtcggtgtccttcgataatattgggaggttcttgagggatgttcagataatcgttcactcgctcgacggaattcatttgcatttccagctcactataaattccagtcagttttactggcgcagctaactatttagagagtcaaataaagaatttttggacaaacctccagtaacgacataaccagtatacagccatgacaaatccttgggaactcaagatggccatctgaatcgcatgagcagcgcaatgagtatgtgagttcagctgaaccagagcatgattgacaggcaggattgtagactcactccaccccatccgcccgagacaccactctgcaaagtaagtatagatgtagcgaagatggctatcccaccaagacaatcaaatctgaggaaaagccatcggtttaacatccaaatgcttatatatataaagtcgatgataacgtcaaagttagttcatgatcattcacttcatacacagtgcggcacgtattatgcgctcgatcaaacaggagaagaaaaagggtacaaacaagtagaagcatgctgaagccttgtcaatttgagtctgaagattttccatgaacctcttctcgctcgagaatgctcgaatcgtcactacaccctcgagtgtctctgaaaagccgctaaaaatgggagattgggcggtggcctccattctcttcaggtctcgaccacatcggatgtaatcaacactaaatcgccagtagcagtatccaaggactgaacaaaggagaggagaggggacaagagggagaccaaggatatgctattaagaattgatgcgcgttcatttgagggaaaaaaatgacctccgaactcacccgttgctggtacaaggaaccagggtacaatgcttccaatcaacgcgactgctccgagaagtgcgaaggcaaaatctacgacgacttccaaagaatctgagacctctctgtcgattgtgccttgatctcgagaaaatcgattcacgattcctagaagagaaaaggagagaagtctgtgagcaaatatccgggagactgttcgttagatattgatggaatgatacacgtacttccagaaggggtaacatcaaaccctgatcgaaagccaaaagacgaattatgtacaggttggcattagatcctaagttttgagagctgggactttaacaaagaacatttacgcacatcgagtagtggcccggatgacactggatagcatttgcgcgtgaagagtcttcgacgccctgtatgagccccaaaacccaataacccctctaacgacgaccagtacggcaaagcccaggctgattgccgcatagattccaaggtaatacagcgggtgctcattagccgatggccgcgacatctttgtgagtgtaccatactcgaccggctgtgatacagttgtgttcatcccagctggtagatagaacgacgactgagatgattgatcggggatagataggtagtcggtaggaatgtaggcacgaggctgttgaacggactcagagtatgcgttggtccctgttgatacataaagaaggcgtttagtaacagcattgtatctcacaaacaaaggtggtgagatgactggctttacattctttgatccaccatcgttcgacgagatccgtgttggcagagagaaacaagagtacaacgttgattgcccagagccaccaagacctagctctaaaatacgtgctatatgttgaccacttttttttcccgttcagagatcgaaagaaaccctggttagttactctgtgctcaaaactcgatagtgaagcagaagaggctaaccccgatgtttccaacctctcgttcttcatcctccaccatctttcgagctttgttcttcggctcggctagctcgtcagctgtgtcctcgccttcaacggcagctatctcctcagcagtgcttccatccttgggcatgacagaagactcatccggcacttccttctgctcggtagccacaatctctgctaggtgacccgctgcccgaagttctgcgatcgtaccttgggcctcgactctaccctctacaagacggataagacatgttgcagtcggaagaagcaactaattgtgatagatgaatagacaaagcttggtcagatgaacagagcaaactcaaacaggcatcagagaccaaattactcgatgaacaaacctcaacatgatgagaaacaatgatgaccgttctgttcgcacagaacggtcctgcaagacagtctgcaactagcgcagcagccgtatgggaatccacagcagcaaacggatcatcaagcaggatatgctttgccctagagtatatcgcacgcgcaagcgcaactcgagctttctgtccacccgaaaggcttacacctttcgctccgatctcagtatcatcaccatcctcgagcatctttagatcaggtcctagacaacatgccttgagaacatcggtgtagcgcttcttatctagcggcgaactaaagagaatattttccttgatggacatattctgtagccacgctttctggccggcatagctgatcgaatttgtgaggccgtgtttgtcaacgaccgtggtgttctttggcagaagaatgtttcctttgatcgtctccatttcgcctagaagcgcatacagcagcgcgctttttcctgcgccggtatgtccggtgacgatggtcagttttccagtcgggaacacgaatgacaggtctgtcaattcgaatcgaacagtcggagtagtggagctctcggtaacatctgaggtaggcgaggagatagtagctggggcggaagggctatcacgcttatcggtagaggagacaccggtagtccatctgaaagtacctccaacaaaaccgatcgtatcgtccgtaggatctcgtaacgcggggtttacaacctccttgagtgacgacacaaagtcggggacttcatcttcgttgaggaaatcatcgacacctggtgagtcaggaagaatatagatacgactgtacgaatgtcagctgcaagaatcttatacatggcaatatcaagagtacgtacgtttgacagcgacatgactgatcaaataagggacaacatgtgcgatgtaaatattcaaaagagaatttctttatgcaaaaaactacagagctcactcacgctttgaacaacgacacgatagtcatgggaactctaatttcaagagaataatgagacgattagattccgatgctgtgatttagacttcccaaatagctgtatatcttgaaaggacccacatattcaatggtagacctgtatgtcattcatgatcagaatatcatggagaagttggtcaataaacattcagagcgctcttgaacggatgagaggatacttaagaagcatcgagaacaaggaaatagcggtgaaagcgactccgacggtcaattctccgtgttcaagtatgatgaaagacactataagccataatcacgccagcatgattagcgcttagctatttctcctgtaagggtgaacgaaaaggacatacggaatgacacaattgtaactctacaggtcggaattcatatgtaaagagtcaattttgaacaacttgttcaagacagtatcgtgcgtgaagtactcacagcataggtgtcaggctccacaatatctggaacaaagtcgcgttgatgcgcgcacgaatcatgacattcagttctacctgcctagcgtcggtaactcgtttgttccattgccgttcccaggcaaagaatttgataaacttgatcgcgtcgaccagttcgctaaaatcaccatttccagaatccagagtataaggatctctgatcaactttttacgtcatggggaagagaacatgaagtggtcgttcgtgacaaactttgtgatatttattcgcttgtctttcgcatcgagcatttccttttcgatctatgaaagggtaaatcatcatcgtaagccttgttaaacagaaaatgtcaggccgaaagtagtagggaaagcaaactgactttgacttctgatcgagacacaacagtgtttagcggcatcaccgctatcaagatcaacagtccggcgaacgcagaccaagaaagaatgctaagcgattagagcgatgatctcggatagttaggcccaaaactctttttttatactttttaaggagaagaactccaagcagaggagtaactcacgtgtataggaaggtgcagcaaacaatgatctcgaacggagcttcatgaaaagagagaaaaaaggaagagacggagaaagccagtcgaaatgttgaacttctgaaattccctgataacagaaccagaggaagactcgatgaacctacctccgtacaacctgttgatgatggtgaccatataggcgacctcagtggcgtccccagacattaagttgacgattttgcctgttccagcagatccatcactctcgaacactccagatttgtcctttcgctttagcgcctgtgtgtgttcattttcgatcaaatacgttaacaaattcacgagcaaaccctcagaaacacgtcaactcacatgagaaagaaaacaaaatcacatactttttcataaattgcactacccaattgacttttgattcgcacgcaagctcttcttgatagccaaagatgattgagatcggcctgtgccttgaggaagctgacgaggagcgctaaacctgcgtagaggtatgccgatgagattttttctggggttgaatccgcaagggcctcgatgatttgtttgatgagataaggagcagtactaagcgcagaagtcaggacgaaactgatcaatgagcaagaatcgtttgtcttacagagagcaaaggggcaagctagaggtgacgacgaaactcactactgaagcataacagcaacaaatgtcaacacgcaagtcatcgaaagatcaaacccatgcgccatacacagacgacgaagaagccccaatctagccgtttctttgaacttttgatagagaggtttcgagcgttgagtaggggaaagagtgtagacgtctgaatctttcatgtatccagaggatcctacgtatcgtacacagtaattgagacgtcagatgtatgaaacacgagtcgagaatgtatcgagattgagaaaaggaacgcgagcacgcaaacaaacaaagagaacaaacaaacctttcgaaatcaaaggtttcacccagttgaatgatatccaaccccacaagctgcatccatcctctggacttggtcccatgtgattttttccctctatctcaacctgtttctctcgttcgtatgatgccggaagagtttctacaggtgatgagagcgagacaatgatgagcgcggccgaaaccaccgctgatagtatggacagcacgatttcggattgtctgagggtcgggtcgtgaggtatgaaaacggggagagagagtgaaggcttaagaaataaggctatcagagtaaggcatctgttggtccaatacagaagggagaaacatagcgagcactatacgttagcttccatctacatggtccagcagtctttcacacaaggatacgtacgataagacgaattgaaggatatgaaacacgaatacaatcagataaagcgtttgcttcggataaagagtcggatagatggccgtgtatagctagatgaatatggggaagaccagcgaaggcgccgcaccaagatgaatttctaatttgaagggaccacgcgctcaactctggcacttacccagcaaattcctaatgcagcatcggctccggcgatctgtctatgtgcagatatgttactccagaaagcccaacaggctctcgctccataacataatgtcagccctaaacctcctaaggtcagaacggtcactttccaaacgggcagaccccgggcagaggtattcctatcagggtaaagatctttgagagttaaatctcgaccgaggtacttcaggggtatatcgaagagataataagatagtttgcttgggactacccgaggaatcgtcagcaaagacggtatgacatataggacaatgaacgagacgccgggattgatgtagctcaatttagagtcatgaccatagccatggctggacaacatggctgatagatatacggtggaagaaatgccagccttgagcaatgagagagttgtgacggataagttaggaaggatggatggaaggcaaacgcaagatatctatcaaaacagaggtattgatctttatatatttctgttattctcggtcagatacgaaggacacaagaacagaagagccgaaaagataatcaatggacgagagaacaatcccgcatgggaatcttattgacgccggacggtctattggcggcttggacgacccggaagaaggttactaagcgtgaaatgagcaaaacaaaggagacaaacagcaagcgacaacccatatgggtctcatcccttgctcatactcctcatcgtattactagtttcctttatggagttactcgggctctatccgcctagtctcctcggggtattttttgctctgtgtttcggctccggaactgttgtctctttggttgtaacaaattcgttcagagtcatagttgatctctgcagaaaggtaacctcgttcaatgaaaccaacttcggtcaagagatagagcgatcaaggctccgctctatcgaaatgtgctgacgcgtatgaggaaattagatgacaggcctagagatttgaatctggtcttagcgcatcctcaatatattgtaacaaaaacgctaactaaatcgcaacatcgcatacgtaggagaaggaagatatcgaaaacagagaacaggaaagaagagaaagaaatgggagaagagcgaacacacacacacacacacacacacacacacacac

SEQ ID NO: 1008 - DNA, 11961 bp, Xanthophyllomyces dendrorhous
cacacacacacacacaaactgaccaggggcttggaatcagaagcaagtttggacaatatgtaggaaaggcacgcgacggaagacaaaagattcaagggaaaaaagattctcgagacgagatgagaaaggaaattcttgaaggaaactacagccgcgagccagaaataagtctggctataccatgaaacaggtccaatcctctcgcagaacataatcggcgagagatcagcggatacgtcattggtttccactaagaagagaagaacatagagccaggtttagcatctctgcgcacaggaaagataggaaaaataagacagaacaaactaacagaaattaagataccaccaagatagccaaggtcaagcgaaaatggggtaagcaagtaaatctccagaggggtttgcttttcgacggatgagatcaagttgtagaggtactgatgccaagcgaggcaacgaagaagtcaattcaagtctgcgccttcctgacggccttttccaagagttgagcgtggatcagcgcataatcggtctcgtcctgtccgggctttcgtctaacaataatctttcgtctgactccgacaggggtataggaaggagggcagatttcgttcctaaaattttcgacatgcacaagaccactcgattcgtcagcgctctgcggtcgagaagtaaggaacaaatagtgtacgtacgagaacgcagggggaggctgctcggcgcggttcgcatggccagagaggttgaccacagaagagccggtcgctttgtcggcggtgtcggcggtgtcgggggatgaagtcttggtgaagtacgagcccttgaggaaagaactgaggggaggcatgatatgtgagccgaagttggtgttggtggcaatagtgagtagtgtccggctttcaagagtgagtaggggatgagacaaggattgaacgataggtaggaaaggcaaaagcaagaatccatgatgctctttatagagttttttttattctgatttctcattgatttctgtcccaggatgaaacgttgtcaacttcgtgttttgtttacaaacgatgacggggcatcacccgcagtcggtcggacccggagggatcaaatacgagcagtgaagtccctgaccgggcagaagagtctctagccgagcagtcaagagggcagagccggaagagctgggtacatacaatagaaattgatgactcttactacggttcccctgcaattacatcaaaagggtttggttgagatcgagtcaggctaaaggtcctctcccggtcaacgccgggagccgagcggctttgcaaacagtcactctgtcggtcaaagccgatgatgggtagggttcgtatccctgacatgtaggatgtaatatgtaaccgatgagctgcaagtcatatattggcgaaccgttcatcttcggttgtctttgattccaacttgttcttatacatagagtcggaaggaggcggaatacatgaatcgagagacgttgccgagaaagcaaagcaagagaagagagatgcgagactgcagaataaattgaatcgcataacaggcctgttttctgtctttcttcctggttcgtttattttccaagtctcttcttttcttttctttttttctcactaatgatgcatgatattgctttcctatatattgaacaccatgaacccaaggtagacagcaaagccttatgtgtttcttcccggactcacaatcaccattcagctcctgatttgtttttcacaacaagaagtcgtctatacctgaatggcaggaaataagaattaggaataaaggattaaggggttaagaaagagaaacaaaaaagcaaagaatatatatatatatatgtgtatacatgacaggagacatagataatatagttttttttttaaattacctttaataggattattctttacaggctaggtaagccaagactgacgaggcatgcatatgacccctgggtcttcattattaatctatagaccccgaacgaaagatccgctcgggctatagcccaatagttgactcgccggctggccgacgatcaagccattcgtttccgactgcttggccttgcttcctgcaaggtaaaggcgtgacctgattaactgacttgacatgggttttggctgacccgagtatggatagccgtggatatgcgggtaggcaggaggctgctcaatgtattacaactttactcttgatcgattgaatatatatacagatacacacaaaatattggagagaaaaagaaaaaaagaagaaaaaaaaagcccacaagacgtacaagtatgaggaagagacagacacatgagcgactgcaaaatatcacgaaaccccccttacagatttctgattttgtccaaacaaatacatacaacgatcaacaataaatccatattccagtcaagaaaacaactaaatgaacagaaagattgccaaaaccctttgcttttgaaggacagccgttctgaaagttgattgatttccttacgcataccttgagatagaatctgctcgatacgtcttgttttcaatcaaagccgaaaacgaatctgacatgaagatcggcatgaagatcaacatctaaaaatcgcacaagaattctacacgaaaatgtacccgagaacagtgaccggcctgaacgaaaggatccggtccttcagccctgactcgagtcatttttctcgaaagcacatccttaagattatcatcttctcattggatttgcaggaaagcgaatctttgatcaataaatattggaaatgacatagggtagtaaggagggtttgatcaaaacgggagtcaagattaagcgagtgatggtttgactgagctgtatgaaggatagaatatgaataataagaaaacaagtgagtggaggattacgtgcgagcgagcgatcgaggaccgacagagaatacatacaagagcgcaaatcttgactgattttttttctaccgaaaatgagaaacggaaacaaaatggcccagaaaggagagaatgaaatactatgcaaaaattgaggacaaagactcgtatacaatggttgaggttcaaagaaaactgaacagcgagaagaacagacaacgataagaacaagatagaaacaacgagacgtcgtggataagaaagtgatgagaggagatcatgaaatgtacaacaacgaggacggatagctagagggatgacagaagaagcaagaaagaaagaagggaatctaaagattagtcaatcctaacccgagctgattctcccaaactcgggattgctgcttgcgctgagaaaaaaagccggatccattccagccgtgggaaaggcctaggatttgagaatcaggtgtggctgggaagctcgactccgcatctgaatcgtctgattcgtccatctctaggtttgtctgatcagagcccgagacaaagtgtgatcggaagagccgttgatcgtgctgtgaagctggggccgaaaccagggtaggaagaggcggcaagagagacttcgacatgaaggctgtgtccgagcactccttcgactgctgttccgatctatcgtcaagttctggagaaaaggaaagaagtctgaaaggtgtgttgtcttcttcctcctcttcttcttctgcctcctcggtggtagtggtccaaatagatgagccgccatccgagctgggataactcggccgtcgatgcgttttggaagagttcgtaacctcgagaggatcgacagtcgggatcgggatcggaataggcatcggggaggcatcaagagaggatgacggtgatgcatcgaataagacatcgtccacgatgacatccttttcgtccgaagagtcgataaactccattgagtcaaacggcactgtccattctctgacatcaagaaccaactctctgagctcggagagaccgatccgtcgagtgggatcctggacgaaaatccgtttgagaatctcatttgcttccgagctgattggaaggattgtctgaagagtatttggatcggtcacaaacgcgcggtaggtctcatctgtaagtgggcaggcctgacgccaagggttccgggcgcatgtcaagtttacaaggatgataccaagggaccagatgtcgttctctttcggaaagtagaatgggtgtgagtttgctggttgtgcttggcattctacaagaagtggatgcaagaggtaggatggtgcaaaccaagacgagatacagagttgaatgcaggatatatatttttctcaaagagcccagataagaatatctcataaagacataccgggagacatgtaaaaagtggaaccgcagccaaaatcggccgagcgtacgtcggtggtggcgagaccaaagtctgcgagccggactgtttcgccataggatccgcaaagaatgttgtccggtttaaggtctctgtgatagataccgagtgaatgacagtgactgtaggaagaggaagcagagggagaaagaatgagctggccagttggacctcaagagtgacaagacagaaggaaacttacgacacagcatcgagaatctggaggaagacgtcggtgatgagatctgtcctgccttgatatctgcatctaccggtgatcatattgaaaagatcgccatgttcgatatggtccatcacgacgtagacgacatcttctgtctcgatcacccggtgtagggtgacgacgctcggatgggccgacgcaagcgtgtggagggtgagctcccgacgttggaaactcttttggcgttcgtccagattacggttgttgagacatttaacggctattttgtcagaggtcgagacggtaagtagagtacgagatggaataggtggattgaggggcaaggaaggaaggaagatagacccaagaaaaacgtgttgataggttagatccggatgagaatataaagttgacaaaggaatcgaaggcaggaattagaccagggcgtggggaaaggcctgaactaaccatagtagggtggctgggctgagactaagtttcgggcaaggtaaaccacaccgtatgcgccgacgccaaggatagacacgaactggagggtgccatggtcgatggtcaacccgacaagattctgacagtccgtggtgaacatgggtgaggatagagagtgtagatgcgaaagtccggggagagatggaggaatgagaatgagagaagaaaagagagaaagggagagagagaacacaacgatgcttggttcaaccgagcgggcgagcgtccgttcgtcgatgagtgatgagaggtaaagtgtatggatggagggaaagaatggaaagaacggcgaagaagaaaatataaaagatattgactgttaagaaggaaacttacaaaaactgatggggaggagaacaatagaattaatatgccacaatagaatcgacgagagaacgtacacgaagcagacggataaagcccgagcaagaggagcgaagtgggacgaccgagaaagtagtggggagagacggacagacaaggaaagatcagaggcacagcgacgcatgcacgcgagtacgcaagcaagcacacaatcgcggacaacatcaagtcctcggccccaattcagtttgggaacgcagaaaccggcggccgacaaaattctcttttgtttgctttttgctttccatggctctccttcggccatgaggactactccgcaggtacagattgaggctgattttgacttaatggcttgcttgtcggacgattactcaattcggtcaaaggcacgatcgatcggcgaggtgtatcaaagacatcgcggattcaatttggcggaactctaaattcgaatatctggttgtctgcttccgagactgtttatcagctctgtgtgtgggtgtgtgggtgtgtgtgtctcctctttctcttttgtctagtgtgtcctgattgtcaattgtcttggctttgtcctgcacctgagtctgtgtatctgtatatatcgtgtatccctccctttatctgttactctctttatcttctcgcactctcaggtcgatatactgatagagcaacaacagcgcagatacgtgaatgaactatctgctcgttctccgatgttatcaaatgacgatagagctgtcaccttttagtatcaaattcgtgatgtccatacacggaatgcgcaccacacactgccaatatcatcaggggccctaaccaaaatgatgagagggacgaaattcccactcgttcccattcccattctgttttcatcctattcccactcatctcgctccactcattcaggtttctcctttctcgtgtcttgccaaggatgcgagctgagtgttacccgtctgtagcctgagtaccatagatcccttgccagaacacctgttccttgagtgtcgcaacaactgccaagtatgtaactgtacaacggatgtgctaggagcacaccctatgatctctgcttgcgtgtaaccctatcgtttgatcctttcaagcaacacgatttgtctgtgtatctgcctatcctgctgccttcgatgcagtacctccgtagtctgggaaccagatatgaaacaggcttcctttgccgtccatagcgtagcctccgaagcctggatactctgttatcctctttgttatctttgcttttgctccctgtttgtctctatcctgagtccctgtcaatttggttgccagcccctatcattcatcttggtatctcatccatgtaatctgtcgatcttactaacccccgcctctgttcctccgagtcccagtatagaggtccgaacctccgcttctccgctcatcactccatcggttatacaatttacaaccacgttggtcaccttcaccgctcataaccctaacatgttcctccttccccgattgtatacaaaaagcacattaaatattcaatttttttacaatctcaatttctatataaaatgaaattcgtatgtttcggcctggaccgtactgaatagatcgtcccgaacttctttcagggcctgtacctgatttcccccttgtcccaaaacacccctcaggacaatatatacaccaccaaccacaccatcaagacaaccacccacatcccactgcctctgtcgctcatctagttggacaagtatatcgtatatccactcactcagccaatatggtcgattctcctgaattgtttggttacccgttgaaatatatctcgtgagcatccttgtcgaacgctcactcttgctgtgtgaatttttagatccgaattcctgtctgaccctgcggcctgataaacgctcctcttaagcctcgtctcgctcgcactccagaatgcgtcgcttagtgtgtgcatggcatactctagacagttctcctcatcatcagttgcgtactcggccgccaccgccgtcctcgtcaacgaactccttaaactatccatctcgactgggatcgccttctaccgaacgtcggccgagccatcttccggagctactggtcttttgccagagaagggcaaccaggtccggtcagatgcatcggctggctggagtcaaagagaaattcagatccgggtgagaaacttgctgtccgaggtgttttcctcagacagctggaagctggccgttcccgccatctgtaagtttgttcttcttttgttgcctttgtctgcgtgtgcttatgttctcgcatacttacgcctatccttttcttggatcttgcttattcaagtatatgttgtccagaacaacctgcaatacgtggcggcatcccatttgaacgtcgctacgttctcggtcctctaccagatgaagattctcaccaccgctggattctcagtgaccatactgaagaagcgacttgcacagaaacaatggctcgcgctcgtcctgctcgccgttggcgtgggagccgtccagcttcagagcatcagggcatctccctcaacctcaacctcaacctcgacctcttctgacagcaaacacatggatcccctcaccggattccttgccgttctcgctgcctgcttcacctccggtctcgccggcgtgtactttgagtttgtcctcaaaggtacacaggcagacctctgggttcggaacgtccagcttagctccttctctcttatacctgccgtgttccctatcataatcgatcttcttaccacgacctcacctgttcagttgggactcgcccagagttggttcaacaaaatgtttgctggcttcaccggctgggcctgggccaccatcctcattcaggttctcggtggtctcttgactgtgtgttccctcttcttctttttcctctcttttttctttttttcgcccttcgccgttcacaacggtactcatccatcgtcctcttcttcttcttcttcaggcaatggtgatcaaatacgcagacaatatcctcaaaggattcgccacctcgctcagtatccttattgcctttgctgcctcggtctttttgttcgggtcggtcgtcacgcctggcttcctctttggctcggttcttgtggtgagcagcacggtgatgtacgcaacgagcgaaccgatggcgacctcgccttccgcccaggcccagttggaccggaacgactcacaagtcgatggagtgtcggatgaagagagtcttttgggtcagcagattgaactcgatgataaacggcccctataggctttttacttctccaatcttttacttgtctagcctctgccttctttcatgcctctattttgtttttttttggtgtttagagttatctgcatttctctcttatttcttacttattagagccgttcatccgccgcctgtgttgtttcccttctctcatttgatcttgccctcctcccttctccttgcttctctccaaatctccacatgttcacctcgcctatctagtaacccacacttgctcttgctctccgtctctcaaagattatcgtttttctcttttctttcctttcttcttcttcccttttcttctctacctttctgtctttgtcgtccactggctctggcgggaacgatattgatggcgatgtcttgatagattgatttgtttcttctccttttcaaaaggattatatacctctcttccgttcgatctcaaatttatccactcttttcttttgtcttgggacgcagggtgtgaagaacagtgttgcgtttacgttgtgccatggtgatatctttgcagtcgtcgctgaggttgagaaaggctatccgctcgactcgactggtttagggttcgatggttccgaatcacggatttgcaagcaccgactgatcctgacttttccgctcactgactgaacgatatggatggtcaagtgaatgagtggttgcaggctgcaagtttcaggcttcatcagaattttttggtttttggttcttccccgttcgaatcacatatactttctccttccccttactccatcacccgctctccacatcctattccgacaatttggttttctatccaagaacgaacaatggtctatgtccctccgtttccgataaggagagaagttgagaaggagaaagggacaaagagggttcgcttaggcggatacctgggatttaggagcctccagcgtgtctccaatccgacgggcttcgctcacgacctccgagacggatgccaagctggtttcatcgtgatcgtttcgtttcggttcgaagacgagaaggcagatcgtacgttgagctttcgatggaacattcagggagtagaggtttggacgaagacgagagcaaaagaagcgacagaaaggaagaaagaacgagactacatacttctcatcccaagcggccaacttttgctgcagcgacttccaatcgttcgatccgaattcctcaaggtacgcccgctgaacccgaacggtcttggatggctgggatagtttcgcggagagaatgttcaatcgaatagcttttgatcgacatggatttgaagggggtttcggtgattttagagttatattcattttttcaagaagaggaaaagaggcaacatgttaggatctcaaactgtccttctaccttcctctccttcactaatcagacatgcacgacccatcatcttgataaccagaataaaaaggaagaaggagagaacgccagcaaatacagaagagaaggcccttctgagagagagagagacgaggaacaaaaaaaaggagaaaacgaaccatcaatgatccaactctcgacctcggattcttccacactcaagaccttggcgatctcggcgtaggtgaccactccggacgagctagccgagcacaacgaggcgagagcaaggaactttgcctttcgctcgggagactgagaatcaaggtctgataagagaaaaagaaaaagaaaagtcaagaagaaggcgaaggaacggatgagctcttgaggaaaagttgggagaattgctttcgtcaaagactcactactgttggactgagggacggtacgagacaaaacattgagcaaacaagagtgagcgctgatgaacatgccggatgtacagcctgagcgaaagcaggctttaccataactgagacagagcaagactatcgactgaagggatagaatgaaggcaaagtagaaagaagaaaggataactctgagggtacagaatagaataagactcggaaaattaagaggaggccgactgcgcggacgaccgtgagaacagatatttctagtagtcattacaaacgatgattagagaattctctaatagttttctctttcggtcatcacaatcccggtaaccttctatcattttctcttgcctgccttccatcgttcacacaggtcacagtctggtgagaactcgagaaggaaaaagagaagaacgaacagagaaggcccaccctctcggtcgacaggagaccgtctgtgggagatctgtgcaacaggaatcatatacccagctcggtaaagccgtcagtgtcgctctatatcgcttcgtttcaagggtgtgttaccttccttttcttcaatcggagtctcgtcatctcgtatggatcgtccgatcagaatgaggaaacaaccccaattgtatcttgtttgaacgcagcctcagaaacagtaatggagtactgaatatgacgtcttgaatcatttgtcgatgtccaggatccggtcatctctctgaccctacagccggtcttatcgagatcccttcctttcttccctatcccctctctcgcccgttccctcgctacggttgagcgttcttcccgacagagagtaccactcgatcgatctgctctcgggtcgctggcctcctgtgtctcgtctaggtgtcgttcgtagacggcttgtccttcggacatatccttctgacatatctttctgacacatccttctcctctctttagtcttaatctctcccgtctgctgtagtcatggcgttctctcagcagagttcttctcaacaacccccagcatcatctggctccgctctcctagctcggtcgcgacaggcaatgccccgtcgaccacagaagggactgaagctacggatagcaaacccagacggatcggacgaagaccaagatcacacgataggtcccaaacgcgaagaactgcctgtgcataatcctactcctgtcaacactcctcaagatggtctgtcgtccggtcttccaccgccgcctccgccgccgcctccggtgttgctctcccatcatcagtatcagccggcattcaactatccataccctcataactactatccagtctcaccgttgtaccatccggttctctccagagctcacacctcgcctgacggctatatctcgcccgtcagtacaaccgagcaaacatcgtttccccatcgaggagcgaccgctccgtttagcagtcagcattccatgctctcaccaataacaacatcccatctctccgacggctaccgtggcggagggagtagcgattactcatccaactcatccaaacctacgactcctgccacaggtctttctc

SEQ ID NO: 1009 - DNA, 15903 bp, Xanthophyllomyces dendrorhous
ggtctttctccgcctccgccgccgcctccaccacctccgccgccggttccgccgctgcctaaagagtatcgatctcaaactcatcaacctcagcatccacagcaacctacatcgccatccttgcttaccgtaccagaccgaacacctcctacttccagcttgaaaaatcttcctgtaatctctccttcatctcccctgtcgcttatctttcctcaaaatcatattccgcctgtgtctgatacgagcgtcacctctccggtcgacgccgtgatatcggggagcacaaagaatagattagatgactcaacagaacccgagagtgttcaggagaacgtcaagtcgcttggtctggagctgaccggcaacctggctgagatcgaggtcagtcttagaatatcgaacaatataaatacgggttggctttcttctgttcattgacgcgttgctcttccgagcatgtccttttctcttagcgtgcgcccctgggcaaagtgcatctgtacgtaaccatggacggttccaagtttgcgatggccgacgtgtcaggaagtaggtcggctgcagcagtgcgcgacagagtattcactgcagtaagtagggactttctccatttcgccaagtctttgtttgtccaacaacaacgtatttgtaaaaacaatgataataaatcgatcaccgtgttgacatggctgacacgttctcttctgatcctcgcctccaaagctcgaggtacgagatgacgagcaggcttctttcaccctctatcgccatcagatgggagctggcgcaccctcatccttggactcgccacctctggacgaccgatcccttttcggctattgctcctcagagccctacggaatccttggactcttggccgtccaaacgtcgttcgaaacctctcagccatctatacctttgatccctccgcctgcgcccatttcttcctctcccgatagcagtcaaaaaagtcgagcttctatcgacagcagattccaatgtgccctcgagccaagggctcgatcagagacgaccagcagcacatctgaggcgtatgatattggcgtgagtcctagtcagcgggagggtggaaccgttggtgaaccaagaagacgtcggatgccccgtgctccgtctgagacctctaattcagagagggattccgtgttgagcgatagagcagctttgggaggggcgaccaagctttcccgaaaacctcatgctaggcgaccttcccatgccaacagcggcagtggtggtggccgaacaccctcaatcggttccattcaacaatcatcgtcgtcctcatatctcacagagacagcaggctcactgtcctcgtctcctcctaccacaaccctttcactcgcaaccgaaaacttggtgggaactcctcgaaagtcatccatgcccatgtccagacctcaagaattctctccgtctctcagtcgaacgtcaacctatccttccagttcttctcacattgatccgggctcaggcgcccactcggttgtcttatcaccggacttagcgacgtctcccacatcttcatataactcttggagtcgatccagaccgctctcgatcgcttcggtcgaagaagaaggtttcttgccgtatgatcagccagagcccgagcaacctgtctctgtcggtgtagtggcaactctttcatctccaaatcctgcacagaacaagacagtcgaagaattagcaacagaagatgagcagcaggaagctgccgagagattcgcacgtctatgggagattgaagaaagagaggcagaggaggaacggttggcagcagagatgctggctttacaatgggaacgagaggaagaagagaggagaaagatccagaacgaattcgattacgaggtggctatgagagaacagaggaaagaacagcagaggtatcatgtaagtctctctgctacttcgagcgttggtgtgcaaatatagcttgatgaatgctgacctcgttctttgttctccatctggaatggttctcataggccgatcgtcaaagagaggagcaagagcaagcatttcaagcgcaactacagcaactacaactccagcaacaacagcaaagtgtccgacaacagcgccagcaggaccgatatcctactcgagatggccagaccacgcgcggtcttcctgttgtagatgattttggagagtgggggagacgtccttctggtgggaatatcatttcaaatcgtagtcttccagttggacgggcaggaacatcagttaatagctctgcatcgagagtcaacgcaatagatcctcgatcggctactacggtcggccaccgtcgacctgatgccttcttgcacgaacaagaacgtcatccgcaacatatctcatatcaatcgccttcctcaggttatgtacctcgaactgtttctcaagaaacggcagcgagaaggatacaaccaagatcttacaacccaaacgtagtgtcttcggtttatcctgtggtctcacctcctggcgggtctctagccgtccggccatcttaccttcatcaaccacaacaaccacccaacccatcatccgacatgcgtcgtggaaccaccgggcccaaccagccggtgcaaagccagacagggtcgttcttgccaatagacagatcggtcccatcagctagaagtaatccaaacttgagagggcgatatgttcagcctcctttgacatctcaacggcctggattccatcatccgtctaataacagcagtcaatttcttcgggcagaaaccacgtcaggatataattctgtctccaacacgggcactcgtgcgggtcctgccgaccagcaacttcctcctttccttcctggcggacttcatcgaggatctcatccttcttatcaggacttgaaccagatcgctcatacgacccactctatacattcccctccgacacctccttatctatctctgcatcctcaccatgtttccccagttgcccatcaaggacttcagccaactggaagccgaccctccggtccatctccggcgtatgaacctcaagcggtgtttgaatcatctcaacgcaacccatccccgattcgaagttcttttcctgctgatcgacatattatccccggaccgaatgcgcctgttcgtccatttggtggagaacggcaaccgtctcctcgtccaaacacgatgtttgacctctcacaagtggcttcatctacttctcttccacgtcgtccgtctagccatcacgaaactccgacggattctcctagggccgatcaaacagagttcaatatttccagcgtctcccaattgagaagaccttcggaaccgtcgatctactatcagactggctcaatgtctgaattgaatcgaccggcgacttacgacccggcacggccgtcgcacactcgaatcacctccgcacctttacctgcatcttattctcctccggcagagtcggcctacgatggaataatggaaaatagagctatcatccatacacctccaaaatctcgagatgagaggcaacatctcaaacgatccgagtccacagcttcatcgtctatggataccgatgaggcagacaccggtcatagtgtgtttgctgatctgtcggctggacacctggccgctgaagaatcttcaggcagtgacgaagacgagcaggaggaggacgacgacgatgacgaagacggagcgacgaatttgctattcctgcccaagaaacctccgaacgtttcctcacatccaaaacctaatacaactcatccagggatcactagccacccgtcttataggtctgactttgattctgcggaggacgaaggtggttctacactcactcacacttcccggacgttacatggccatacaggatggtacccggattctgacgatggaaatcatacccttcaacgaactagaatggacaatcgatccctccctccgattgttactgatagcagtagcaaaaatggtggaggcaacagcatggatgatggggcctctcaaaaccttccgactgctacgtctcttcctctgtcgtctcggtcagacaaagaggctgctagttcgctcgagcgatccgaggaggaaacgaatgagctggaaagcccgtataaatctccaggcgtcaatctcgtccgtcgaaagacagtgttcgctcagaacgctgatcaacaatgggccttccgaccaacgcccgagcaaatggttcaacagcttgacaagttcttcccaagagtgaatctcgaggctgaggtgatcgacaccgcaggacagaccgctctgccatcctctaaagtgtctgctgctccgtctggaaccaaactcaaacacagacagtcgattcgtcgggtcgttgagaatcgaacaaacggtctccagaaaccgaccgcgtcaaacctagccgattctggggtgtcggtcatcaggcgaagaagcacgagaatgtggggaagtaaggtggaagaggtcacgccagaaaagcttaaggcagtggtttcctcgaccttccaggaagaacctactgaatcaaactctcaacctggtacgtctaatttcgttttctctttttttatatgaacagaatatagtgaagatgtggaagactgatctgtcatatgtcgtcattagtggctacgttcaaatgggtaaagggcgaactgatcggtaaaggagcagtaagtatcagctttctgtcgtatttaagtttgatatctgcactgacctattttcaacactcccctcaagtatggacgtgtgtacctgggtctcaacgccacgacgggcgagatgatagccgtcaaacaagtagagctgcctacaacggcctctgatttgaatgacgttcgtcaagctcaaatcatcgccgcgctcaagtctgagatccaacttcttaaagatttagatcatccaaacgttgttcaatatctaggttcgttctctactgtttcactgtcataatcaccatcatcattatttcgaacgtcctaatgccgaactaaatgtttgttgtctactcctcaggttgcgaagaatcagaggattttatttcgatcttccttgaatacgttcctggaggtaagtcaatttcagttctacagtatcatgattgatgttattaatcgtttcccttgttttgtccatacttaggatcattgggaagtgtcttccgaaaatatggtaaattggaagagggtgaagtccgttggttctcacggcagattgtggaagggttagcatacttgcatagtagaaacattttgcatcgagtgagtggtttgatggttcgtttgtcgacatgaggagcaagatggcttatttccgactttggtttgaattacttccttaggatctcaaaggagacaatatcctggtagatccttatacaaacggaatctgcaagatctctgaccttggcatatccaaacagagtagtatgtttatatctcgatttggtttcacacagatagtcctccgaagacgtagctcacaagttttttttccgtgtcgtacagccgacgcttaccatactgatgacgcaacaatgatgaccggttccgtctattgtacgtacaacatctcgatatatttgatcgttatgtcagaattttagtttcttatcatgtaagctgtggacgtttcgtattgtgttttaatcagggatggcacctgaggttgtgaacaaccaaggtcgaggatataatgccaaagtagacatctggtctttaggctgcgtgattctggagatgctctgtggagagcgcccatggcagggcttggagcagatggcaatcatgttcaaagtgagcttcactgttctttccctttacctggctttccttccctgtttctttctgcagctcctcaccatcatggaatttaccgctattctagctgggaactggaaatcgtccaccgatcccggcggccgtcatgctttctgcttcggccgcagacttcttaaataactgtacgttcgcgatcaagcaggaagaacgaccatcggctgcggaagctctcaaacatgagtttcttcaactggaccccaactggacgtgggagcgggactcggagctggctaaaaaagtcctacttggttggggacgatccgaggcgagaaggaagaagaagtgatgcgcgtagtctagagttgggtctcattttcttctgcatctctgttatttgtctttcttttcttctcttctcttcttttccttttctctgttatgtcttgcttgcgtagggattttattctggttcccctccttctttaaattcatcttttaatgccattcctcccatgtttattaacttatctctttcccgtcaagacatcttctcacgaatacatgattaattatgtatgtaacaccgcgacgttctccagccctcttccatctatcttcctcctctttatacgacccttttattatacctgttgatatactgcctcctaatatgagaatgtttgtggagactacgactgaatcatcgaaaccatgatggttgacatcataacatatgtttcatccgagatcttttcattagagttttcaatttcttgtagggttgtcacctgcggcagccgtgactaccataacattgtcccctatcaacatcgccatcaccatcactgttacccacatagaaaccctctgctcaactcgataggttggtatgctcgttacagattcaacagtctgcttcgtgtctgttgatcagatgtgtttctttctttagccgttccctgccctcatccgtgcaaaggaccgtcttgttccgagcgcgaaaccggcctcgttcatccaaccgtcccgttgtttattacaactaagcatcaaccaagcagatttattcatcagcccagccactcaactctgttctccgcacaaccacaatcatgtcggcttactatcctcatgagggtcgacagccaggaggtaacaggacacccttctccttgacatttgctaactcgaatgagaaacccccgttcatctctgtaatggacgcccatataaactcgctcgaggatgattatctttggatgttcaaggaaaggcaagttctcagtctaattgcttagatcatctcttgaagccagagaaaccacagaccgacgcgattgctaagtatactactatctgatcaaaatagagtcaaacttgaagaacaatagtacgtcttctgtatcggctggagtcttcaccctcaatgtccatttcggttgattgatggcggaagatgctcttacggttttacagcgcagatagtttggcaaagttaacgatgcggactaaagcgttggattctggtaccgatcagttagggtacgtgctctgtgttgtcctggctaagtagcggattgcatggttttaccaaaaaggtaagcttccgtttgcaacgctgacctcgggatggattccgcggttgtagatttgataacgcgaaatacgcccttccaactgtgcgatcggcttggagacaaatcagagagaactctgaacaaggtaggcaaaacaaacaacctttagaaactgtgaacagtacaagcatgcacagatgttgatgtgctctgtcctattccgaaaaatcgcaatatcagaggtcgaagcgagacgcgcatttgccaacagcttgaaggaggaggtcatcaagccactgatgacgatgaaggtccgttactctataatcaacctttctgcagtacaacaactaggtgtattgacgcggccggacttgacctccacaatgtacgcaggctactcagtccagaatctcgagtcggatagccgaagacgttaagaactccaaagacgtatgtcttattctatccaacttcatgtgtaaaggccttcgtcaatcgttcctagaacaaaaccagtgttgacatctacttcggccgttgtcatgcttctgtagaaatacaacgagtgggttttatcaagcttccgctatttgatcattcttctgaaggctgtactgcattttccgggtttttgacgtttatctctgttcacctcctgataaaaccacagcaaatactccgaattacagaagcttcacaaggcttatttcaagaaatccgcagactaccacgagttctccaaggatttggtctcatcgggtcattccccatcaaccattccttctccccctcctcgacaacaagcgctgtcccattaccatacaccttcaattctgactggggatcgaggctcgatcactcctcaagctctggcacaggaagccaagaaaggatttagccaactgatctctggtctgagaggcgcggcaggtggaacgggaggctcaacttcaatcggagctgggatgagtgacgaatggggcgggagaggcagcttagacgagaaccgggaaagagaaaaattggcgcatgagaaggaaagagagagggacaggtacgaaagagagaaagagaaggaaagaggaaagaacgaggcagacacaatcaagattgtcaagttgaagagagaggctgaagaggctggttcgtcatcctccttcgttcccgctgtttcttgatggtcgacctttcgatagtaaatcaactctgatgttgcaaaaaaactatagaccagaagtacaggaaagagatcttcaacctggaatctttaagaatcaatatggagcgtctggcccaagggggttcaaacgtgagtatactcttatcttgtcctctttcttatcgtatatgctgattcataaagcctgtatactttggcttaatctaattcctggcacttgcctctaataaatccagtcaactgccgaattcgttcaagatctgattctgaaacttcatgatatcttcttgaaatactcgatcagtatacaagctacctcgatgttttctgtccagatggggagaagatcagaagaggctacagagcagtgagtagtttgttctcatctatgaagagagtccaaacgatcagaagcagtcggactgaccacagaactcttcataagaattcaattggcgagagacctccagagtggtctggcagcgctaggtggaattagagattcaccatcgcctgttctctagtaaataaattcttgttactgaatcgcgagagcgatgctctgtattctgattgcttggtttgatccatactgtagccaaaactactatcacggaccttccaaagacttgagtgcgtgtgacgtgttgatcaaagcattggtctaattaatacttctctctgtatagagatcgatgtttggagattgacaaatcttctgatcccggtgtatcattttcgtcaaatttagttttcgacgtgtgagtctgtcttcgccaagtcaatcatgaattctcataactcagcacgctgacatattgacgctacttctgacagatcattacaagattacgcttttgctagaggaattggtggggatccaaacatcattcctatcattgtcgataaatgcattagaggaattgaagatcgaggtacgtcaatcactgaactcttcatttttagatctcgttcgctgatgatcagccgcaacgtgttctctcaggattggaagccgagggactctatcgaatcagtccgagattgtcgacagttcaaacagtgagtgaatgcgtaattttttttgccgttattgactctgacaaagaaggcctctcgaatgtgaataatcttcagctcgtgcataaaattgagattgatgaggagtccttccaattcccacggaccgaagagatctataccatcgctgctattctaaaggttcgttaaggcttttctcaatcccatgtagttgagccaatcctaatctttgcttgcctgatcgtgcgtagctataccttcgacgactgcctgaaccgccattccgttggtcgctctcggaacgactagcatatagtaaagagagagaagatcatatcggcaatgattttattgtgatccgaacgaagctcaagaggatgcccgccatgtatgttcccaatcgcgtatagagattatctcagtagttgtcaacccctatcctgatgatgtatcttgttgtgagaattcagtcatgtagctactttacgagcggttattcttcatctgtgcaaggttgttgttgccgacaacaaggtgcgtcagcatttcccaccgggcttccgatttctggcgttgtgaccgactgctgacacttcgcgttttggcttactagatggatgcgaagaatctgtcgattatatgtacgtcataggcgttgctcttctcttttgtcaaatctctaactcactgtatcttgggggtttctttttctttttagtttcctctattcttttcggagaagaaggtcagggattaggaagagacggcgtcaaagatgtcgacattcagacattgatgcaagcttccaaggtacgttataagtgaactggtgcatttcatattaaattcgcaagttgattgttgtttctttgtttctttacgggaggatttttaggacgtcttctttgaggatttgttaatctacgcaccaatcatatttgaagataatggtgacattcgaccgagctctcgactgactcctcgctccagtccccatcaaagccatatctattctccaccattgactcaaggttctcaatttggaccccctcaacagtctggattaggcaggtcgaatacgatcaatgcttctgcgatcactccgccaaatcgctttggactgcccgcccgaactcgatcgggttcggtcaacttgccacctgcaaatctaaggttctcaccatccggacgaaatgatttcggctcgggattcaaatttagaagacaggtatgtacaagctgatgaactttctttcacttgttatatgcttcacaccggtatttactgatcactctgcatctgcgcgaattatggttcagccttcattccaaagcggaacaagtactccggatcgacctcgggaaactcctgacattgatgaatacacaaccgcatccacactcacacccacgcccacgcccacgcctcctcgtcttccgcctcgaaagtcttcgaccagtaattcgctcacctctatcgctatccccacatcaccgccagcggtagcggcagaatctgatgcaactataccccgaataaccgattcactccctcctttaattataaaccaaccaatgattgatcgagggcctcataatgtctctttgcacccgaaccctccttctggacccaaccacctcgagctctctacaggaaacctaattgttccgaccccagtggattcaggtgcgatctcgccagggttagctaatttggcatacctctctcaggccgcagagaaagtaattgaggaacaagctagtaccgatgaaacatctgatgctaaagtcttatcaaaatcatcttcatcggattagagcctgccaggctatcttgtgtcttttctttatcctgtaccctgtctgtctgatcatctctgttatcgtcacctctctatagctctctgcttctctttgttaaacatgcttgtcatgtcataccatacatagatccgcgttggttaaaatccgatgcttttcttccgtataggccgagaaacgcataaacttaactctaatcgtggattatttatcttttaagaaaccaacaagaaaaaaagtgatgaaagcgaacgatggtgatgttgacgacggatctgtaaacgtcatgccgaaacagcccgttagtctcttgcatgcgaatcttagggaaggaggagaggaagacactaggagaaggtgtttgaatggacgggtcgtgttgctacaaacgtgtctttctctgggattgaaagtgaaggaatcgaaaagggcttctttcatagatgcagtacgaggataaaagcagaaaatgataaacgcaaccattcaaagggagcaacaggcgatttgattagaatatcaccaacgccttcttgttccatcatcaagaagaaagaaagaagagacgataaaagaacaggggatcatacgctgtccaccgaaaaggtttgcttctctttgagtttttctcgacattcgatatctggagttaagagatccaagaacaagaagatataaaggggaaaccataaaaataacgaataagaaggagtcaagatgagagaacgtgattatctcttatcattttcggtttatgaggtgttttttttgtgagtgatcgataagaatatgttttttcgagttaaaaggttttgaagaaaggatagtcgagagaagagattgaacaacatgcctcttgaagcaaatctgcaagaaacaaaagaactcaaacagggggaaaagcaagccaaggtgaatggaattgatctttggatgtaaaggtctcctaaaggagcttaagcgtgagctttgtacgtaggctccgatatatactgcaggaaagaagagatcatcgccataacatgtcaatgacgggatattttagtttaggtgagttttttttttgcagaaacgaaagactgacctgggcgaccagggatcgacctccaaagaatctcccgttcagaccgttgactccagctgtagaagcagccaaggaactgaaatgtatatagacctcgccctggaagaaacaacagatgaatgtgatacgtgatgagtatgattgagaaggcactgatcgaacagagacagagaaaacacacctgagattccttctcaaccttgatgtggaggacaggcccgtatttgctctcaacttctcctttgatatcttcagcaagctcgacatcccaatcctgttcagtctccctggattaaatcaagatataatgttacagataatgcgctggatcggcgtttaagaagttaaggatgaaaggaatatgcgtactcagcaggattgaacacattgctgacgagaacaaagacggaaggctgggtagacataggcggtcgatttctaaaataacaatgttgtttttgttaggcgaatccagataacagcactggtagctctacaagatatggaacgtacgtaattactggagccggagagctcacatcggagggatcctgtctgtctaacttcctcatcaaagactgtctagtagcatggtccaaccgttgacctacacaggggacgaagaatcgcatatcagtcttcgtgcctaacaagaacgggaatgtattgaaccggaaagcgggggaagacaaaccacgattttcttccaaactttctggcatgtcacctggtccagctccgttagcacccgtagcatatctagcgcctgagttttgtccggcattgaagcctccgttagcgccgcccatcggaggcttcgtcgccttctcattaacagtagaaactctgactttagatgtccaattgatcgaacagacagaaaaagatcaggagctgcgcatacgatgcggagaaagactaggtcgaggacaagaagggtgattgtcacataccctgacgacctgcaagctcaaacccgttcatcgtctggagagcggtcttagcagactccaactctaggaatctatattgaaagaaaaaaaaagaagaaaaaaacatgatcagcacagaatctaattttgaaccagaacattgtctcaacgccagcacgagaaggacaatatgataactcactgaacgaagcagaatcctttgctctttcctgtggcaggatcacgatgaagatcgacaaactcgagctctccaaagggagtgaagacctgcttgatatcctctgcagtcaagtcgaaattaagagacccgacataaagccggtggtaaggaatctctgctccagcaaatcgatcccgatgaagctgtgccggcatagggggtcgtgggttcataccaggcacaccgccagtgtgagaacctccaggctggaattgtgcaacagggaacatagggttgttgatgttgggtcgaggatattgaccaggagggtactgtccgggaggaagaacctgaccaggaggtaggttctgtagaggaggaagcgagccgggcctggatgatagataaataaacgacgcatcaacatcacacgcacatcttattctgagtacatgagaaagaaagataacaaaccctgaagtgggacccgtcataggaccacccggtccagttgacgttgccgcctgctgtttgtttctctcggcctcggtcagttcgactttgatctgcaagcccatgacaaccctacctgtcagagccaacgccttttcgaccaattcgatatctgtaagctcgacgtatccgattctagggttttccatggccacaaggtaaattagccattcgactcttccatcatgataggctggtcagaatttgaaagaccacttaccctttggacctccgggatatcctatccgttacgattctggcgtccttcacgcttccatctcctagcatatcctcgaagaacatacccagatctctagaggtcagtcgagcggctagctgagaaacgaaaactgagcgagcttcagaatcgatttcatctaacaaagcgtccgctcctccatctgcatccctatctccgtctctatctctatctcttcctcctctgggaccatcgtaagagggcgagtgtcgtcgtcgccggcgaggcgaggatcgatgtctttcagcagctcgatccctgtcgagcttttcgaagtctgagtttgtaaaggttatttaatcacactgacagttagcgtttacaacctttccttcagagccaatcaaaccaaactcacactcttcacgctccctctctcggtctcttctctccgctttcatctctcggtctcgatcggctcgatctctgtcctctcgatcccggtctctagcttctctgtcaggccgttccctagtatcttccctcttggaagagtgactcgacctgtgcgaagagttcctacttcgatctcttttctccctcctctctcctccttcccgtcgttcggatctccttcttcgtctctcctctggatcatcctcttcttcttcctcagcacgctgtcgttctcgtcgacgtcgtcttcgacgagcctcctcatcttcttcgtcgtcatcatcatgtcgggagacgtgtcggtgacttcgagacgagccagatcgttccgactcattcctttcgacgcgagaactggtaatttcattcaagaagcatatgtcagaatttgatctctcgcatcttctagttatttccatagattctatcccatcttgtcacttcctgcctatagcgacaggaagctaggcaagagagtgttatgagaaggtgtatggaaataactagaagagaaagaaaggttgaaggaaaaacgacgcgtacggcttcaattcaggagtcacatctctatcgattcgaaccgggttgtatctatcgggcgaaggcgtttctactctggatgacatgtttagctaaatgaacagcctgaatggatgcggataatgaaaaggcagaagaaaagatcaagcgagagagaaaagtggatggttggtggacaggaaaaagaagacgacgatgtatggaaagagatatcagtcttgcttatgtaagcgatcaacttgccatcacttgcttactctcagaattcattcgtctcatcgtttacatcggccacaagtcaaccccttaaggtaggttcttatctaacggtgttattgttccgctgattacagttcatgtgatctttgagggttcaagcgcgcttcaagacattgatcacaaatctatagtaaaaagtgaaagagatcggacgtgacgtgatcagcattgagatcgtaagatagataggcagatatttatgtagagagaaattggcaagaggaaacaaagtggcaagacaagagaaagaggggctaaagagcacaaggtaagaaaggagatggaatagatatgattaagtaattattagat

SEQ ID NO: 1010 - DNA, 11849 bp, Xanthophyllomyces dendrorhous
gtaattattagatatagatatacgatagatcgaacaccttactctgcccatacgggaaaggaggtctataaggtcattcaccactatctccttccggatctgggcttcccatcacgacgtcgagaaaccgtgttggaggcagaagtaccgggaactgagttgcttgtgaatacggtagccacataccatccaccacacacctcgttggagtttccaacgcagggataggtgcatccattgttggcgtcgagtgctccaccattagttaaactatttgagcagtagcctgtgcacaaggaagatggagacctcctgtcagaaacaaacacaactcatcacgtatataggagaaggtcagagacttacattcctggccgtactccgttccggcatatgtgtatcctttcgcctgacatgtggtcgcacactcctcgttggtcatcgaggtagtggaagtgtaagtgtacccagtcaatgttcgattggacgctgtatcagccacacatccgaatgaagcccagccggctggcatggatactgaagccgtggatgaggttgccgaaggtgccgaggacgacgttgacgaagtgacctcggacgaaaaggtggaagaagccacggaggaagtctcggaggaggtggaagtggtaggcacgcctgacgaaacggtagaagatacaatggatgacgaagcagacgacgaagcagacgacgaagcagacgacgaagcagacgacgaagcagacgacgaagcagacgacgaagcagacgacgaagcagacgacgaagaaaccgctgcaacatcattcgtgtacacgctcatcgcggcccaacctccacagatctcagaggagtttcctgaacaggcatcagtgcatgcatcagtggtcaagagcgatcctccattcaagagcgagtttccgcagaaacctgtagagatagagattttgggtgtgtaaagtcagtacagatttatgtctcaagactaagctctagttgatagtttgaagaaaagatgatcaaaccccacattcttggccgtattccactccggcgtacttgtaccccaaggtcttacattctgccagacaactggtcatcgacatagtggtcgacgatccgaagtagtaaccctgaatagttctactcgcggtactgtcgcccacacaaccataagacgtccatccagcaggcgcaggtgtcgcaggcgtcagagcgactgccgatgcagatgcagaggctgctgccgaggatgatgagactggggtggactcggcagtagtggtggcggtgcccgtggtggtgatggaagtgttactattcacgtacacgctcagcgcgttcgatcctccacagatctgggtcgagttgcccgagcacttgatcgtacaagcggtcgaagctgtgtttccgttgacaaacgagttaccacagaagcactcttggccatactcgagtcctccgtacagataacctctcgtcttgcacgcagccaggcaggtcgtcaccgacatcgccgtggacgagccgatgtagtagccgacaatgttcctcgtcggcccatcaaccacgcagccataggccgcccatccatcaggtgcaggcgtcagagaaactgctgagctagtagtagtgtttatgtaattgttgtttttgtagacactcagagcgtttgatcctccacaagtctgagtggaatcacctttgcaggggtagtagcaagggttgctggcgtctagtcctcctccgttgagaagcttgtttccacagtagcctgcaagattttagtttcgaaagatagtccaaagatacgttcagcgttcgtgcttgaaagatacttggaaagagagggaccggatgaaggcttacactcttgaccgtactcgagtccggcatacaaatagtctttcgactggcaaatcgccaagcatgcggttgccgtcatagatgtggagtctccgtagtagtatcctacgatcgtcctgccagaaacgctaggaacgttgtcggcgacgcagccatatgaggaccatccatcgggaacggcagtctcgacaacagggaaatcagcattggtgctttgttgtgattaaaaccagagaaaccccgcgttagaaagtggctctgtttgaaggggcgtttatggaaaaagaaaagaaaaaggcaagaagagagatttacaagatagacatcgaagtcgaagaaccacaaatctcgtagtcgtttcctccacagtcaacgttacaagccgtcgagttgagcacagacggactgtttcggtaaacactatcacagaagcatgcgttgccattcgactaaggcgatagtagaggagatgacacaggttaaccatcgttctgaaacagagaaaggaggatatagagaaactcactattccggcgattccaaccttcttggaatagcagtagtcaaggcacatctcccaagtctacgcaagacagacagtgacgaagaaagaagggagaatgtttgttggccagaaccttctccgacggcacgtcaactcaggtcaagaaaagaaagagaaggacgaaccatatctgaatcggtgaacgaatacaagagcaacgatctggcggatgatgaatcactgatgcagttccctgccgtccagtttgtcggcacaggtgggataggggaaaccattacaccctgctcaacgtatccatccttggtaggttttgtggcattctcgccgtaccagggaacgttatctccaggtagagaggcgatgtagtgattcataccgacgtcttcgtctacgatatcgttcagtcccttgcatgccgcctgagcagccctgtcgatgtcgggcacaaagtgggctgttgtgaaaccaggacagacatcaggatctgagtacgaaagagatgaagatcgagatatctgatggaattataaaacgagctaactcacggcagtcctcgatcactcctcccatgttggcggggcactatcgatagggatcggttgtacagcgtgttagcctgaaagaacttctggtgatatatatgtatgcaaaggtgaaacctacggtatcaatggccgtctgaaggtactcttcatcccaaccggtgatgaaatcagcgtctagaatatcaaagaaaggtacacggtaagcgatccaagttgctctcatgaagctgccaaacaggaagaggaagaggaaggaatgactcacgcagtccataaccgacagcgtctcccactattaagcacgttagtcaaagccaagaatgtgtgagaagggggaacccgatacagaagaaaccgagaacagatcactcactagcccatacgaggtttccaccattcggataatcatagttttgggtgttctagaagaaacattcaatccgtaaggagcgcgcccatgaacgagtcagacgctaagatgatatgagaagtttgtaaaaaaaatcacgatactaacgtaaatgaactcgtagaacaaagagatcaggtggacggggtgagtgtcggggcaatcctaatgttcaagtatcaagtgatgaatgtcagtatccttgttctcgggtgagtactgaaaacagattgagatggaacatacaccagaattgtagttctggataggatacgccatatggtccttgtgctgttcgtcaagggatcccaaaaagaagataccgaaaacgaaaattgtgccatgtatgagctcttgcgcgattgttggtcattgatgaggacagaatggagcgcacgttatcggagtctagattgacaccatcccctataaatatcagaaagtacatgaaaaagagcgaaatattcttcagcgaacagtacaaggagtcttttacacacagagagaatactcacagcaactagggaagaagacttcggctctcattccaccagggcagttgaaggggaagaactctgatatcagtcgattaaagaagagttgacatcagtaaacgcgacctttaagagaaaagacctggcaagaggaaagtggagggagacatactgctctcatcgggcgtgctcattccaagacagacgtaactaatagcctgatcctcgaaactggaggagtcgtacgttctcttgttggggtttccggcgagcattcgaagtccaggagctatgatcgcacgagaaattgagagacagaaaggtgagagaagtaagatagggaacatgaatgagtatgagcgcaaaggtgtgtcggaagatatacgcgtttagacaagagaggaaacgcttacggaacgccttgatagattcattttttggcccaggtctagagacaaatagagaaagatgttcatttggtaagctttcttatgaaaagatcaaaagcaggatgaggaagccgaatgaacaatacttaccgtgggagataatatgtattgacggtgtccatctcgatggctgtgaacatgccatcggaggctctttgaaagtaaagctgatgcagagaagtcgattagcgtgattgatttgaaggacatggttcggataagagagatgagagcaaacctgaggggtccagtagttggaaagatcaacctggacggttgctgtcgtacacgtcgcctcagagatctgagtgttgtaatcatatacagagctgaaggagtccgcgccgacaatggtgtgaacatgggacgaaactgcccctggattgacgacaggatctgtgaagtgcgggtgaaaaccgggtttagcacggtcaagagaagagagaaagtcaaacgaaacagtgcgaacccaatcgagtgacgatgaacggagcagggtgggagctgtgcgtgtgggtacatgtatcgtttttgttgtaattgttaatatcaacaaaagcagaatcggcgcagatatggagagaaaaaggaaacgctaaggtgaacgacgtacaaaatccaataagcattcgcgagaggaacggtctggatgaacagtccgagcaaggcgagctggagcatattttcaaaaagaagaagaagaagaagaagaagaagcaagcgtgatgatggaaaggagtttcttgccgaggttctgtctatccaacctatctctcagaagtggaaagcagacccgaacggagcaagtgatgtggcgacagaagggggttgaagaaaaggaggagttagatctatccagactggttgcctctgaaacccaggctctatctttatatacggatcactttttgtctctgataaactctgaatctgcggaatggagagtaggaagaaagagagatgagtaagaagaaaggattgaccgacaaggaaggcacaggatgaacaaggcggcagactgggtacaaacgtttgaccaagtgagaagaagccgacacaataattatagctatactcgacgagactgaacgaggtaagtttagacgtctcactccagagtttgtctattatgagcgaagcggttgggctggagaggtaaccgctatgaggttgttctctgaggggagagagaaaaagaggaacgcatggttcgtgtgcgtgtgtgcgctgtacccctatctgttctctgtatgtgagcgaaaggatcgcccacacaaacgatcgataaattctatagagcagctcgattgttgaccacaacaacggatggtgagaaaacagattgagattcatctagccagaggagcgacaagaaagagaaacatcgaaaacaagcgataggcaggaaacagagagccgcagaggtctaagcctaccgccccacttgtttcggacaagcgcgtcgagacaagtcgcgtcgagaaagcaatgatcgcgtcggagctcacgctcgcaaactcgcacacactcatgttcggccgcgtcagatcttaatcaaccactaggagagaacaagaacctgaaggatcgacagatgaggcgtgtctctacttttgcgtttcgctttttcttttgcattttcttctgcccactcatctttttatgttactcttacttcaaattgcctgttcttttccaaacaaaaaaaaaatgagaattttcttgtcgtgttcttcgtatacacccctctttcttctcgcggtcatgtcaactccgagccgtcggagagataaatcagatcgggaatgtacgtatgtggcatcgtggtttggtccgtatgagtgattaaacactgagtgctgcggtttcaatatgattataacccatcgaaacctcatgtcttctcttctctttctctagtctttttggatctcaatcgccggaatattcctgactgctgtccatttggtcatctccaaagtcggcacgctcgttctgatcgttttcttgatccaagaacatccaataaggttcaccgtctctcgctcactcaacagatcaaacccgttgaccaagatggtcgaattatgtatcgaaagtaaagcaaatcagaaggaaacagcctttaaacttttgacattcttcccttatatgatctctcgacgtgagaccgtgtgaacacaaaatataacaaggtcagattggatcaatccaaacaacccatcaatcatctgtgggaggaatcaagggtttcaggatcgtccctgacgttgtgatgacgcaatcacgtgaggatggacacagccgtgaataaccctaaccttaattagtcactcccgccggtccttccagtcttctacatgaatgtacaggtccacaatcagacaagcataccccacacagaggatactcctacgttccccacccgaggctatgacgaccatgacacctggtagaaacccgcctaggaaagagagcacactatctacagaacgttcgtacagagaaatatcctcttgttggctgatctgcttcatcatcatcatcgttatcacaacaggtataagtctgtcaaacacaacgactgatccactttgttgctggtgtaccatacctgattccgtgcatctgccatgctcctgtttggatctaatagattctcttatcgatgttaacatcgcgctactcgatcagatcctcgattttttcaagcacactcttcacacagacaagcagctcatatttccaagtcgcgttatcccgttcgttctctgcacttcccgttgctctcttgtcgatcagagttactaaatgaaaaggaacgtttctcgatccaccttctttcggttccgtttgactgcacgtatactggactccactggggacatatagaggtggaactgttggaaaacatctgaggcacattctagatcactacaatgctctcttccaagtgcgcacccccattatcgtcttctctcttcttccctttgaccaagagatatcgtcctcctaactacacaatccttcccaggcaatcccgctctcccgcccgatctcgatcccgatccgacctatcaactacgacgaccgaactcgagagacgtctatcgagtcatccatcccactcatccgtttgacggtctctcaactccaagcgcaaattcaaagcctgtgctctggcacaacagagaaagaaactcaaggtagctgggtagacgagaaagtccagatttgtgtaaaatcagatgtggagggtcgcgcaggggatgtcttgttagatagtacgatcggtcgggaggttcgtccgtattcaatctcgctttacttgtcctttcatacatccaaccttgactgagagcctgaccgactgaatgggaagggagtcgtagctgtactttacgtttcatcatgccatccatcatctagcgatggttagagtcatcgccaccgtcggtgagtctagggcctcttggtctgtttttcttttgctatatactctatgtacggattttgtgcagactgattttcaatcttgtttattcgaacgtgtgtgcgtgggcttgcagagctagtaaggcttgctgtttagtacgttcgtcgaagagtaccccgatttgaccaattgccttgtctcttctctctcttatagaatctcgatgtcccatcttcttttggtgttgcaccatcgacgcttgccgctcggcatcaaaatcagagtcaacatcaagatcaagaaaaggacaagccaagcttacagacatcatcaagaaacacgaaaaataccactgtcggaatcgtcccatcgaggatctagcggatccactttgttttgatcatgatagctgctactgtagggactctttgcgctgttctcccgttcatgtattctaccttgcctctgtgcttcacccctacgttcaagccattctccctccgcttgacacccgctctgtcactgttccttgtgcgcgtttcatctttcgattttttcctccatactcaagaacacgctgagagtgattgtatgactaaacaagaagaaggacaaagaaagaaagaaacactgtgcacgcgcttgtcgatcaaatcttcgtctcttccagacgtagattagaagaacatcgagatcaaacctagtgatcaaacaaccatgcttccaacctgattcttcaagagaagagaagaagatagtggatggcgaagaaattcctcgaccagaacaaagaaactcccaaaaacaagaaaagaagaaggaagggaaaaaggaaggacgaagaaatgagaatcctgtaaaacgcgcagaatgttttcccactctactcaattctctccctgctcgagcttctcccagggcttcagcttgataaccagatcggaaggtctcaacgtgatgcgttccactcttcgtgtagactgtaactttggaggaggcttctccaggaagaacgttagagagatgtagactatgaacatgcggatggagattaacgcttgtttgcttccatagcatgctcttgatttccccatgagatgataaggtgggcaggagagttaggttgatgtcaatgtcagtcacagtgacgtctaacaagataattatataagagagatgctgttctcaccgagatcctttggcaaaagaagcctgccagaccgccgaactatcatactcccccttctcgttcaaccatctctccggtttgaactccatcgtgtcttttcctactcttccttccgtaccctccggacctagaagaagaagaatctttgtgccttttggagcagggaaagactttccacctgacggtccgaccaatgtcgtgtctcgcatagctgaagagaaaccgaatttcaatgagcagtcccttccacatctttgtctttgctagtggttgtttgtaggaaagaacgagacccaaataaagacaaagagtttaagacgagggaagaaagaacacaaaccttcccgaccgatgattgccactggattaccaaccctcaaaacttcctgaatgacagcttccaaaaagggagtatgttcaggcgtcaagtcatccaccgttggcgaccttacatccaaaggttcgatacgttcgagcaaatgttgtcgtaatttgtactggattgcaggatggttgcttaagaatttgagcacctagtgattgagtgcatcaatattaggcgttcatgagctcagagaaagaaaagctaaagaaaagtatcaagctgcgacagatacttacccagagttgtgtggtgctggatttatttccagacatagaatacaaagctagggtacaatcagaaccggacaacatggagtatcggagaggcgacaagcgcaagaacgtacacagaagtctcgtcacccgcaagtatcactgaatcacgagaaagaggaaaacaatcagatcaaacagacatctgaaaacatatggtgagagacatgaagagcctactggagaccagctcatcccttagaccatcaggggagagaacagccactccactttcagcttccttctgaacaatcccatcaatctagttccgattttagccgaggagaaacaaaaaaaaagatgcccggaaggaaacgttaactctgcttttaaggaagaacagcgcataacagaaggagggacagaccatattctcgatcaaagccacatcgccaccttccgagaacttctttcttgaaatcgtagttcggctctggacatactgtataatcctcttgtaagcctctcgattggtcggtcgtactttctctatcattcgcttgataggagccaacgggccggcggataacgtctttgaacattcaagggcgttccgttgagaatcttgagaggattttcaaacgcttgaggtagagatggaaacaaagattgcatactttgaaaagcgtcttgaggtctttatcaatcagattcgagggttctccgaagacgactgcagaaatagctctctatcgcgcgcaacgagatgatctcgtgtgtcctatcaggaaattctgttacatcattctaagaaagatgaaaaaaacgaagacgaaaggactaacagcttgccgataagtcagctcaggctctggatcaaaccattcgcccgtctgactcgaccaagtatcgatcaacgcatggtcctcctctatgaatcgtttacttgtctctttcaagaaagacgaggatactcccttttcaggatgtgcacggatgcgtgaatgcgagaggtcaactgcgcgctcgattgtgcttaaaggctgtggaatagagcaactaacaaaagcaaaagctcgtttatgggctttgtactcctcatctatcacggccattcgaagagagctatgttagatccatttcgactgcaatatctcaacaattaaggcgatcttaccgatagacaaagcaagcaatgcatgggggatcagcggtttgaagaccccagtggaccgtatcccacgatcccaatcttgggaaattagaattctgtcaatctgatctggatctgccgtcaaaagtcttttgcagttcggaggtcggcgttgcccgaacgaatagcaacgaaactcgggttcagcatatgtgtttattcatcttctgattggatcaaatagaggaaggattgtacgcacataggggtaaaagcgcttatcaaaacctgacccaacaccatccctcctgtctttctcagcacatctatgaatgcatcatgaatagtttcggttttcttgtaatgtttagctatatcgagtccgtttccgaagaaagagatggctggaagggagggaacgtcaggaattggtttgggacgagttacatgtttgaacgctatgtaaacgaccaggaaaaggatagtaggtcctacgagaggagggaggatgaggaagaccatttctgagtcggttgggctaatctagctgattgatgctctcttgcacaagggaacgagaatatgaagagaagaagtttttcaacaagagaagactcagaaggaagagaaaaaatagtttgaagcacatccgacttggataacgaaggcgactgtgaaccccgaaaagacatataattattaggaccttatctggctcttccgtgtccatacagactgccggatttacgcgaagtaccatggaacgagacgagagtgaatgcaggacacatctcgggcataatttttgtttatttttgttcttttctttgggagcccgtttcggcctgaccgaataaacaaccggatatttgctaatttcacgtattcagcaagtatatccttgcggcttatcatcgtcctggacagtcaagtctgctgtaagaaaagagagcaagatccgggaatacagtgttatctatgatccattaaaacgaagcttgatctggatcgttcttaatcctctcggagagttgtcatccacagattctcttagcccggtcatttcaatacagcgcaaagcttttaacatttgcctctctccgcgagtattcgaagagatcctaccaaacagcgaccgaagaaccaagcgatgccaaattcgaagacacacatatatatatagag

SEQ ID NO: 1011 - DNA, 31448 bp, Xanthophyllomyces dendrorhous
  misc_feature (18222)..(18231): n is a, c, g, or t
  misc_feature (29795)..(29804): n is a, c, g, or t
cacatatatatatagagatagaaatagaagagaaggagaattgaaagtgcgctgtgtgtgtgtgtgtgccagggagacctgccggaagcggcccgacgcacgtgttctgctaatccggtcgcccgttaccatggagaccgcgactaggatatccgatcgccctatctgcctgcttgtagcgctttcgtactctcttgctcgtccgcccatctctttcgaaactttttcgattctcacttttctctgtttgtcttttccactcactcactcactctctcactcagtatagctctccgtgtattctcaagatggacctatttggacctaccgaaccaatcaagaccagagggagacactttgtcgactctaaaggtcgtgtcctctggctccgaggagcgaacgtgggaggagcgtctaaagtcccttcaccatcatctatggaccttcctctggacagacaccgtgaggtctcttatatcaaccgcccttttcctctgagcgaagcagacgatcatcttgctcgactcgcctcatggggtttcaacattttgagaatcaccgtgacttgggaggcaatcgaacatgctggcagaggtcaatacgatcacgactatcttcagtacctcacgaagctcttggcccttcttcctagatactctcttcgcgcgttcgttgtatttcatcaagacgtttggtctagactctctggtggatcaggcgcgccaggttggacgcttgaagcggtcgggtttgacttgagtaacgacggaaagattcttgaggaggtcggcggagcatagtcagtcttcgttcttcctcgtcaagtgtagctcgcgaagtatttacagattttctaacttcttctccctttaatcagcctaggaggggtccgacatggtggagaacggttcgaggaccggggtagatggcctacaggctaccaaaaactcgtatgcgcaaccatgaagtgagtctcctagcgttcatcctccggagctgtcgtcggaacactgaaaacctatctgtgtgtgtcccttatggcgtgcagcacgtgtttctgggccggtgacttgtttgcgtccaaactcaagatttctaggcccaagtctgatggcaagggggccgaggaagtagggattcaagcatacctgcaagaagcgttcctcgatgcttatgctgttctcgtcaaagcggtcggccatctcgattcagtcgtcggattcgaggtaagaagaaattctccttcttaaaatcatgaaagactattccatgtcatcgatagtaatgttaagttgtccgtgtctctttgttcctctgacctctactctagatgctgaacgagccgcaccacggatacattggtcttccttcacttcattccttcaactacaacaccgacctccacttgtcagactgtccgtcggctttgcagtcgtttgctcttggtgcaggtcatccgcagactgtaccccactatactcgatcttgggtttgtttagtcgtttctctatttgacaaagtagctcttcctcatcgcatcctgcctgaccacttaatctctttttatgccctttcaatagcccttcccaacgcgcaagacgaagaatgttatgttgaatccgaagggaaaatctgtttggcgcaaagacggtcctacaggtggaaaatgtctctgggaatggatgggagtttggggatgggacgattcgacaggacaggctactgtcttgagggaatcgttctttcagaaaccggaaaacttggagactgaaaaagttgatttctaccaggatgcttatctgcccttcgtgagtctgtttctccttatttttttcctttctgttcatctcctcctattctgagactgacgctgttgatcatgggcgtggttggagctagattcgagattgggtcgacactgtcagagaagcgctgggagagaagaaggacgacaagtatctttggatcgaatgcgttcctaacgaggatgttcctgtttggcctgaggatatgctgacagagcagctacttctcgcgcctcattggtgagttttggtctctttcccgattcttctcctctcgctctcctgtaattcttataggattctgttaatactttcgatatgtcggtgcaatgaacaggtacgatctgaacgcgttatttagtaagacgtttgggtgagctttatcatgtcctctttgaatttgaaagaaggacaatagaaaatacatacagattgctaacgagtcgtggtcgtaaatttgggaacgcaggttcatgaccatcaacgtccagggtttagccaaggtaacatcgatcatcatctcgcaatcttttgacaatgagctgaacacggctcgtcatactctgtgttgatacagggcaagttcctaccgtcgtgtctctactttggacgaggagcggctagaaggaattatacacttcaaatcaagaacgtcctacaaagtggatatgattcatttggagaacgacctcagatcatgggcgagcttggggttccaatggacatgaagtaagtatcttcgttctttttcttccactcgcacgaaaggttgcgcgaaacgtctaaatgtactcttcttatctatgtagcgacaagctcgctttccaaacgaccgacttccattaccaggagcgaatgatggacgcccttatggccgcccttgaaacaaacttggctgggttcactttgtggaactacaatccttccaacaccgatgagatgggtgacgaatggaacggcgaaaacttcagttggttctccaacaagagggccattgaggagcgaaaggatggactgaaaaggaaaattctgaaagagggatcggtggagtggtatgagaaaggagcaaggctgttggatgctatcgtcgtatgccgactcatcctcttgtactatctttcgaatgagccgagagctcaaatcgtttatttcttttttcgtcgattcagcgtccttatccgataacactggcaggtgttccaatctcgtcaacctatgactcaaaaactggcagctacaaacttgtttggggaattcctccgttgagctacttgcctgccgactcgctctcttctacgactaccgagatcttcttccctctaaggacatacggtacaaagtattcgactgtggatatcatccttgattgttcagagggagacgttcgttgggacaagaagaaccaagtgctttatcacaaatgtgatgagcgagatccgttagagtggaggaaaggagagatcactgtgttcatacagggtgtgcagctcgagaggatatggaagcacagaaagatagcgttcgcaatactgaacgtagtggtagtcacgatagcagtcagccctaaattgagagggctggtgtggggcttgttgctttggttgtttgcactgctcaaggcgtatttcacttcgaggcttgagatgcttgctgggggaatataaatgttgttttcggagaagtctttctcaaaccatgtgcgcgcaactgagaacgatataggattattggattatcatgcccaactttctggttcctctcttcatctcatgctcatcggacttactctgctcacttactgaacgaacgaaccaagttgtaccaaccgatcccgttcaccatcaaagctgtactgaccataaatcacgtgatgctcataaactgactaaaaacggcagcccgctctccaacttttctctagctcttttttctctcaacacaaacccatcccatcgtctgtaatggaccactgcctctcttcatgttccgagggcggtacccatggcgtttccttcaagggaacggaaagaggtcttccctaagggggttttctcttttggtggttagagtagatgggattcaaatcttctgtagactgttgatataagccgggtaactcttagtgaacttcttcctttgggagagattctgctttgtcgattgagagattgacggagacaggggagtatgctgacttcggggtcatacatcacctttctttcttttcaccattccgttcatttctttccttgtctttccttttcgatgttgattcgattttgattcgattttgattgtggtttatatgaatgtgcttctgctttttctatttctccatctttttcacatgcaaatgccgatgatataacgtcccctactgttgattcatcctaaactcttttctctcgatcgaacccaactctccttcccaaccgcctttctgaggatcttctgaatgcctcaacaactgacatacctccttctaccgacggagtcgatatcccctcaattgtcacccgttctagcggccacgcttaacagagtcactatcttcaggactttggatccagaacacggggaggtacgaaactcctttctttctcactcttgggttctttcttggtattcttgttcaagcagctcctccgactctgctggattcatcgagtccgtgttatgtcgaagaggtttgctatttgctgttgatggatatctcacttcactggtctcaaggaccagaagaaagatgtgtccaacagcaaatactgatgcgtaacgaatctaatcaattctttcgtttctgtgcggtttggttcgatcgtgagcgagaatagccgtttgtatctggctcgcttttgttgctctctcaatcgatccctccatctgaactgttgacgagatggagaatccagtcacctctgggttatagtaagtcagctattttgagtctgttcggtcgtgggtttgaatatctatcacatgaactccactctcatatgaacaaaacccatacacagacattcatctttccggcttaaacccgtttccggacttctggattcccttgaagactgcacgtcaaatcgccaaagatttaggtcttctgagagatttaggaaatctattagattggagtacgagaaggatgagcagttggtttgaaggtgttggaccagatggcgtcggcgtcatggcgcacaagttcgtatcagatcgtttcttaggagaagcgcaagttggttgcatcgcttgaactgtcatgtgggcgttcgaacccttttttgctgtcgttagttggaagttgccgacaggattagtcggcgccgaagtctattcacatgagatgatgacgaggacaccttttacttctgatgttgttttccttccggatcatcaacctgtatgttgcccacccttatctgctactttcaacatcctgtactctttctatgaacagctgagacgttttgatctttaccattgggaattttctcagttgaggacctatctttccgcatccacattagcagacctccaaacgatctcgaatggatctctcctcccatcaaatgttctaccaatctggcattcgctcattctcctcacctcccagatattcgaatcttttttcgacaatcgcgagtcaataagctcttctgaggatccagaatcggccgaagcgagcgaatggtcaggcgctgttgcggtagtatggctaggccgagtcttgagcccgttcatagagaaagacggatcgcgtgatgtgggaagaggtgatgtggagctggtgatgggtgatttgttaagaggactgaggttgaggaagaggagatcaaagccagaagaaagagaatcaagaggagatccggtgaagattgaggaggaaaaaagagagcacgaggatcttgaggaaccgaatggagcagaacaccaaggcgcacaggacggcaaggagaaggaggagatagaagaaaggaggaagactagagagaggacatctgttagatggaaagtcgcctctcaaatcatcgagacgttgggtgtaattgtgtccggttggattcggtatgagctatctgccaacgatctgaatccaaacaatgaactccgctccttccttccaccttccacctcccctttcactccttctacttcctcttcaccagcatatagtctcaacctagatgacctggcggctctcatcgaacaaactgagaagacgttgacgaatagatttgacgagcagtctttggctctcaatacctttcattcaaatctaaaatcctccggtcttcaatctctccatgcgacatccgttccacactttcaccgcgcgcagaaagagagaagtaatgaaaccgaacgagaggttaaaatacaacttacaattcttgcgctcatatgttcaaacctcttgctggcagcctccgtctgctatctactgcatatatcatcctcaattggaaccggagttcaacaagaacaacagcttgggttttctgtaggtgaattaggagaagcagcgaaacgaaaacggcaaagagatggtcaacggtggtcgacaggaacgttgttctgggctttgcttcggtggctatggaaagtcatcgtcgcgttttgagttctccttgtctgttctatctatctctttctttcctctatatttaatagcccaaatcaggcagatttgatatcagaagaggaactgaagatgacgacaagaggggcaaatcgcacataagaatgaggaagtagagtaaggattaagaggaacttcagacgggatagaaggtgaagcaaagtatggggccgtacataagagttgagagtgtacgagaacaaaaagtgatggtggtacaagaaccaaaaatagttaggctatgtattgatttgtaaaatcaattaatgaatgaaaaacaatcagacaggcaacagaagatagcgaggatgaacaaaatgatgaaaacacagattgattgagaagacagtagtaaaggatagaaggaagatagatacacatccggagtaggtgaagaaagaagaaagaaaaagaaagaggagaaaaaaatggaacaaaaggaggaaaaaagaggagggcagatatagagttcagaagcagggcaaccagcgcagatggaagtctgtggacggaaaagtgattgaacggcgcaacttatttggcggacgctactcgagtcctgtctaaaatatatcctactgtagagggcgagagaaggtgatgatttgagttcttgaatgtttctttcaaaacaaagagagcaaacgtaccttctcgtgctctgtatcgtaatgttcgttctcatccagaggagaaacgccatcgccatcgacgatttcttgcccctcgtatccttcgtatccttcgtaaccctcgtcatccactggcgtatgccggagactagagtcagcctcagaataaacataacttccgctacttgaatcaaccgaggattcgttgatgtagctcgtatttgccagttcatctgctatcacctcaggatcacctagcgtatcgcggaactcgatccacctgcgagcaaacatgagcgaaacaaatcagaaaaaaaaatgatcgggacaaggttttagggaaatcagaaacttacgaagtcatccaagggtgttgtgtcaagagctcggcggcggtaggtcgttcctcggcgttcatacataagcagcagagaataaagtctagtcctagttccgaaatctggtctgcatccggcatgggcggtaattcacctgcaccgattctattgataagacaaaaacgatacacaaagccgttgagcactcaacacatcgactttgcgagaaaatcagagaaaaagagagcaagcaacatacttgtacatgatcgcccactcgttctctgcggattgccacggtttctttccggtcgcgaactccaagatcatgcaaccgactgaccagatgtccattgcacctagtcggcctcccggagtattcttgatgacttcgggcgacatgtacattggagttccttggagagaattcattcctgggttcctggtacgattgatcgttcgttgacctcgagcaataatctttgcagctccgaagtcgacgagtttgatgatacctgcatcgctcgtcaaaagcacatctaaaaaaaaagcaaatcattagagattcgaatagcgatgattttcacaatgtatcacagtagaaagaacaaaagtaattgtagcggacacatggggacttactatcgggcttgatgtctcgatggacaattcctttgccatgaaggtactcgagaccttctagtatctgacaggcgtagttcatgatgacctcctcttgctcaattcgaccatattccaacagatccttcaaactaccaccatcgcagtattcttggaaaatgtagactttatcccggtgaacctcgatcccgtagtattctacgatgttgatatgattgagcatctgcatgacggatgactcgtcccgaatctccttgtataccgtcgggaggttggaaacatccgagaaccgaatttctttgacggccatgacagtgttttggtccatgttgtgggcagtgtagactttcccatacgctccggcaccgatgaatcgaccctgttgccaatgaatggatatgttggacgaggaggcagcgagagcaaggagcgagcgatcctccggccgatgcgtatcgaccacccgaccgataacgtgcatatcccagtcaagcgtccctcggttgtcttcgagggattggataagccgcgatcgagcctcatgggtaagacgcacgctcttatcaacaacagactcgccattccactcgccaaccaatcgacgtaaggcagcatcgttcgagggtcctgagtttaggtaactatagtgtataccgtcctcgtcatgcacagcctccaagctagctgtcaccttccggagttcagctagcctatcctgctcctttttggcttcgtagctagacctagcaccaaggatatcgaagtgtccaatgagaagtgccatacaactcgccactttctcttgcaggagcgcaaattcgctccggtctagatgaaggatgttatgaccccgagtcatgagcatggcgaactcgagcgcattgacagtccatctgaatgttttgtggtctgttgggtcacaatcctcacagataaaggcgacccaatcgatagcgaggatcatcaagggccgactgaatctagaccaagtaggttggtccatatagttcgctacccgttgttcgtggtcggatgagaaagcgaaccaattctcaatcaattcctgagaccccggaatcccacgtagggacaatcggatatgggagaccgactcgacgatagcttccgagaggagaatagtggccaaaccgatccttcggagttctctctgaacagacggaagatgagcctgctgctcgatcacgcaaggcggttcttcacccttctgtcctgtttccgggttggccaaggattccaagaaccgatctttgcaggtagccaaacgggcgactggaccatctgcgatcagcctggctcgagacgcatgtagatctaactcgacccagggtagaggaaagtgccaaatcgaacctggccagaaaaacttctctgtaggagccagaacaaggatgtacgtcgcgagatcaagatcaccagcaggctcgccagcatcctctccgctacttccaataggatcccagtcttgaggaagaggattaccgtctcggccgaggcgtacgggtcgactgccaccatagttgggataggcttttgtaagaaggtcggccagtcgctcaggttgatctcgaagacaaccatcagcgatgacgaagagaccttcggtctcgaaggatcctgtgtagatcaagatgtgaccagaacctgcaagcgaggcaaggaagttggtaagatcaatcgagtccagagagtactcggccgaattgtcaaaccggttcgtaagtcgcctgagaacagaccaaaactaagatcaataaagtactttgctattattgaaaagaaacagagattcattgaggagcagcgtaccttgtgaaacgttgcagttttcgatacctcattctaaccgcttctaaaactttgctcaaccaggcgactttctcctctggtgtcatgattttctccgcaactgtcgttgtgacggaaacttttccatcagccaccgttttagactctatcgcaatgatttcttcgtcgaaggcattccggagggctttaggtggcttgcagctttttttggaggattgggcttgcccgtcggccaagttgggtgcaacagtagaaactggaggagagccaggcttaggtacaggtgcggaagaaggcaccctcacttgagtctcaaagtagttgatcacacgctgcatcaatttctttgtcagagagcttaagaagaggcaaaacaaaatgttatgaaccaagtcagcattgatatcttggtaaacactgaacgagattatactggatgggaaaattggaatacgggataaaatactcaccagaattgctcagccacaatcaaatctccacctttgatagcctctgcgctctcattcaggaactcccactcgtcctccaaaatctctgtctcccggaagtaaacagccttacttccactcttaagtttccagtgaagcaacctgaagaaaaatcgtaaggcttccaacaagacctcgtcgtaggtttccgacatacaaggcggtagaagccattttcgattctcatccggctcgatcactgctccgtattgcttcttcattgtacacgccaatgcaacacccaatcgaaaatcgtccaacagctgatcgatcaccatcactgtcggattttcgatcttcatcgcgtacgccagtcggacccggagggattcttcgaccaactgggtagggaaggatattaacttggtgatctctgcctggtaaggcgggaggttgagctcggtaaagatttctgaatgctgtaagtaagtcgccttggcggaagagataagagtgtatacatctgacaaagtctttttctcaaacgttctttggagagaatcctcctttagaacccgttcgacgaaagtcggaggtcggagcggtttgtcttcctctcctactcgttctcctccatggtggttgccagtcgaatgatgtgccccagtttgaccgccaggaacaatagatcctcccggacctcgaatcggctcttccgtgttggccattttgacatccaaatcttgagatcctgtccatgcttgaagaatagagatttgagttcggagagacttgataacgttactccaactgaccagtgcttcgatcttccgttgaaatttgggcgaggcatagaatggtttgtcgtgaccaatcgcttgaatatgtggatagagggattcggcatgggagagttgtgcaaggatgccgaggacctggtcgtaggccgagatcggagtgagtgtgtctgattcgactgtgctagatggaacgtcggccggttgtccaggaggtgaagaaggacgggaggatggcaaatcggcaacatctggttcggcaggggtagacacgagtttctcggcgtcaggtaaagtaaccttaaagttggccacctcctgcaaaatgatgtctactgtccgctctctcctttgcgatacccgtttggtctcctcttgaacggttctccctcggagttgagccctaattccccaccagaggttgattcctaattcgtttcggatcacatcataactgtttctctctccacctatccgtgtcttctccgatcgaaggacgtcccctgacaaaactgacgacagcattgcttgccactctaaacgttcccttccctcgggattagccgccaattctaacatcgatttcgaggtcgatgcatcttgaccagccataaagtgtttcgatccagctaccaccgccgcctgggcaagattatcacctgggccagacagaaacccgctttgcctatcacgaacatcttcctcagacgacaaacttctaggcgtgacctgttcagaagatccaatcaagcccaatccttgacctctatgacctgtcgatcccaaggtggtattggcgaaattcttcatgtaacctggcatgaacccctcacccgctttggcctcttcgtcggagtcgttggcgtcgagaagttgaccgagccccgtctggaaatagtttcggtctgggtcatcgtaatcgcccgatctgccgagtggtccggcaaacgatttggacagttcgcctgcccggctacgatatcgtttttggaaaagtgtgaaaggttcggaacgctgcgtcggtgttagattggatgctgtcggcgtggtcggagaaggaggcactcgggcttgtcttgaagaagacagttgacaaggtgaacgcgataatcgatcagagacctcttctgaggagatccggctttttgtgttggaactataaggtccgttgcggctaaagttaaggtgtttagaaccaaacacacaaacctcaggattcagtctcgatgaaatgtagacaagcaaacagaccaaagaaagaggaaacaagcaacatacctatgccgtttttctgaagagtcagtctcatggtttctgtgtccgttaccagaatttccggcagaatgtctggacgtatgcctcggaacggtgttgtcgtcctcctcgtcatctgacaggttggctagaattcgaccgtgttttcagatgtcacaagtttatcccaacgagaccaagacggagaagagagaagccgagaagagagacaacgataaaataagaaggtgtgagttacttgaacgcctttctatactttctccagatctaacatcttgtctgtataaatgtttgaccaggcatatccttcccgttctcgtatgtgcgagctatctactgaatgcgtcctgccaacatccagaaccgatcggaactccttcacttcccttcatcctttaggaagatctacaatgtatcgatcgctctctgcctctagaggagtactcgcgagtgataacgatggacgaaggatggatcgatgggcgagataaaagaaggacagaactaaccaaaacgaagagtcgccggcatgatccttcctctttcgtacttctgcccgctgattagctcggtctatcgatcggttgatatgcttgataaatcactgggcgtattgtcactattccaccaatagagagagacaacaaagagggtgacgaggagaaagtgaggactcggaatagagaagaaagggtgaaatcccaggttgggccggacatctcccctgttctcttttcaactacagcttacataatcacatcttaaatcgagagcagataatggcatcgcatacttgtacataaagaaaaaattacagtatacctagaaacgagtagacgacaaacagggaagatgaataagagagagaatcattgagccagagaactccggcttagatcttgttgtgccacattgtgttcatagtacttttgccctcacagccctcgcttttgattcctggatagacccaaaattagcgaaccgccgaaacaaatcaagtttagtcccaagtccaaacgctatcgataaactcaatcttgccgctgcacccaaaggagcagtccttggccagagtccactgccgcccctgagaaccggtgtcaacgaccaagtatggatacggctcacgtcgagcctctgcctggaaggcataaaccggtcgcctagggtagagggcaaggcatgcgagaagggagtagaaggacgaaccgcaagttgtcttgtccgttttgtgcccacggacttcgggattgaggccatcgttttcgaaggaggagacgatagtggcgagctagagtactctcgtttcgacgcgatcggcacctgcgggttagtcgacctcgtagaaaagtgccgagaggttcgtatgggttggtcaggagaggcaggctctgtctttgccttcttggactttggttgtggtttcgattcagtctcatcgtcgaatccgctttttgaatcctttgccttggatctcttggggggcttgttgacttcagaatcgttaaacttgacgtctaaagtgatcggtttgcttttagaagccgctttagctttcttcggtccaggcgaattaggaggaaggatttgaagtgtcggtacgaaagcggccgttcttcctccaatagtcaagaactcgataggtgcccgagtaccatcctcctgttacaacagagaacaggttaacagagaatgaattgaaggtattgccatctagtcttttgatatgaaatggaaaacagggcacataccaagactactctagggcctttcgattgattctcttcttctgaatcgtctgctttactcttgagctttttagactttcccttcccccatctattgagaaacagccagtcgcttgggaagatcgaactctctgatcgacactgaaccgcaaaacgacagatatcgcacatctttagtcggatccgagcgagctcatcatccgatagagatttcgcttgctggagcggatgtattcgagcctgatacaagatctcatctgatataaaattggacagatcagcggccatgacaggaaggagacgaggaagaaaaaaaaataaggacgaaccggcgacccagttccctacaccagcggcgacactttgatccaaaagtacgctcttgattggcgcagcccgtttaccgattaacgccttaaactcttcatctgttgggggcgacaatacaggatcggggcctagcagggagattggaggctcattctccgggtcctgaagaagctttatgcgggcaagtcgacgagggtcgatgaatgcgatctggacgggagcgctgccctcttcatctgtttctagagtaccaagcgtaaggatgaactgaagcaagtatatatgagtcaggatatgtaaacttattctttacgagctagagagagcctaccttcatgtactgtattatttttgcagtgttccgtgaagacgatctctgtcagtagtcggaacatgctagtcaaaggctaagaagcgattacatactttgggcggccagtcatcgacgctctttggtccttccacatatttgagagactcctcacccttgattctgagagcgccagtcatcccaaagtgcaacacagggagtttgccttccttggagaggaccatccagaaactgcaccaccgtttgagacgaggatcagtttctcctatcaaatagtcgagtctaggtatgatttaagtaggactaacacctttcctttgcgcttgacatccaagacagttcgaccctgaagagtcgaatcctattaattcaattcacatggcgatgagctgcatgtgtttgtaatataggatcgtcgattctttcaagggtaagctggatgtactcacaaattctccatcttctacattgacaaagacgatattatcctccggagcccattctacgtgatcaatccgacgacctttcgccgctctctctagatccgatcttgctctttcgacctctgtacaaacatgatgagatgacgattagttaatatcatgacatatatgaacgcctctcatcgagatcggatgtacctggaagctcaggcatgttgtatgagagtcagtagatgatgttagtcgatgatggtggtagtgacgatggtgagaaaggcgggagcacgatcggaaggagcactcgtcatcgaaggttgactaagaaaatgtgtactaaccttgtagtgaatgctgttacatcttctttcttcagctcggctgatttttctatctcagcatccttctcatacgagcacatccatcgtctcgaatcgatgagagttccccttcatacagcaggtctcctcgtcccgaagtcgacaaggctcatctttgtctatactcgcttctcacgtcatgcgtcctcgtcctcgtcctcgtcgacttccccgccgctctctgacgagctttcagcgagacatacccaagatcaaatccggctgaaagaagattcatcaatcgtgttcgagatgccggctccgacaatcaatgatgttccaaccctagctatggaaccaccgtcttcaccggaaaccacagtctctcagaacacctcaagttcagatgttacttcggtcaagacagatccaccacgtccggcggctgccgcgccgacggtttcttctttgctttcagcatctgattcgaaactttcccctctttcttcgtcgtcttcgcctgacctcagttcgtcagcgccaagtgataggtcttcatcgaccgcaagttctatcacaccttctcctcttccgtcaacgacctccccgagtcctaacccagtcggttcaaccacatatcctcacgatctccaatcactactcgcagcccatccggctctggccgctcagtacaacacacttaccacaagagctaccaaggtgtccgctcaatttcaaacaaaggcagacgcgctcaagcaagatacattaaagaacttggcaactttgggaaggaaactcaacgagttcacgggctatgatgaaatcgagcgtctcaaacagggcgtgcgtgataaaggtaagtctctttacatgaggtttgtcctaaccacagtccagatcaactaaatatggtctctttttctgtacgcagagaatcaaatgacacaacttcgatcgaggttactagaactgaaggcgacttaccttggctctgtcactaaccgttcaacctctcaacgagaacttaacgatcttctccagcgaaaacatctttggtcaacggctgatgtcgaaaggttcacctccctcgtcagaggagatcacgagaacatgaggttggaggaagaaagcaagaaatcactggaagacgcagaagttgaggtcgaaagaggtttcacagagatgatgaactccattctcaagtctgtctctttgaactatctcttcgtgtatttttcctctttgcttgcgctcatcatcctatccgctttttcgtctttgccttattacaatctcagccgataccatgaggaacaactctggtccgataaacttcggtccttctccacatacgtctcgttgacaatcatgattgccaacctgatagtcttcataacagctatcatttttgtcgaaccttggaagcgaaagcggatggtagagagctttgagacaaaggtggaagagatgagggttggacttgaaaagaaactcgatgtcgtgggccttggtctcagtacaggagcaggagcagaagcagagcaaagttatgaagtgagggaaggcgaagaaaaaagactccaggatggattagatttgtcgagggaactctgggaagaaatcaagctgcttaaggcagaacgagatcaagcccgacttcaggttcaaccacccataacatctctctctctacccgcttcttcgtctctccttgagttctccctggcctctacaacgccaactccccctaccttttgtcctcctgtcatttcatttcaccaatcgtatccttatgtcaccctctcctatcagtcctttagcaatctccctcaaacggtcatacaatcatcttctcaagccctctcttccactcgttctttcctcctttccggctggaacaatgaagggaccgagagagatttagtgatagtaggggctggagcggctataagtgggggtttgattgtcggaatattgaaggagatgatgaaataaatcctctatagagaaggccgtccataccgatgcacaaacgcggttgggcgagacaattagcaggttttgacatagaacgttaatcatcagcgaaagtcttgcatgaaatgttatcggccagccacacatcgaaactcgaagtaaagccagatcaaagagcaaacgggctacgtgagatgtatagctagaacaagaaaataaaacgagagaggatattcccgattaagaaaacgtagcccttttgaaggaccgaataactttattgatcatccgatgccttgatttgatttggtattgacacacacagaacgcatgaaaattagaaagacaaaagaataaaggaaccgtgtagatgagcgaggtgaaacgtagttggaggacggacaacgaggaatgacagaaatcatgcagaaagaagagttatagaagagaggagaaaaatcatgaacaagtagaaggatgaacagcgaagaatttatagtgggtagagtagaagggttctcaggtttttctcaaggattcgaatagtatgcctgctgggcggtggtctgatcatgagtggcatgcacgttcacatccgctgtggcttgatcgaactgtgcctgggcctgctgttgctgttgctgctgttgttgttgttgttgttgttgnnnnnnnnnnttgttgctgctgctgctgctgcatttgttgttgtcggagctggttgtgatgttgctgctgttgctgcatctgggcttgagccatggcctatcataaaacacacaatcgtttcaataaaaaagtgtttggtggaaaagtaagaaatcagatcgtaccatctgctgttgatactgagttggatcgatttgtctggcaggcatggcttgagcttgagaaggatgtcgagcgtagtgctgttgtcacaaaatattcagaactgagttcagatcatttttctttgattcaggagaacggtaagcatggacatgaaggacatggacaaacatgctgagcttcggccgattgagagctagatccagaactactcgacgaggtaaagtatgggtgggcaagcgcctcatgtgccgagcatcgattagccggatcgaactggagaagagactcaaggagggaaattgctgtgttgaattgtttgagaaatgaataagtaagtcagtgaattggaaccaagttgagttggggaacgatctattgaggtcaagcaagtggtttgaaggaaatcttaccgagcggaggagctcttgggattaacgttgtaaaatcttgcttgggatgtttcgggaacggcctcagagtaatttccggctatcgatcatagatggcgttagtgatcgcaaaggaacgacagagagtggaaatcaacgactgcgcttgagaggaaatgacgactcacggagtcattgttgatcttcctgagcgttcgatcgtcaggagtaccaatgattcgcataatctgcgtcagctgatcgttgttatctcgtcctctgaagaggggatatcccaaaatcatctctgccatactgagtatttaccaacgttgaattagaacatcagtcaaattgaccaagaatgcaaagcagataacatcatgaggaagatacgtacatgcatccagcagaccacatgtcgatacttgtactgtatgtcctggaccccagaaggacatcaggagctcggtaccaaagtgtgacgacctatatgttatgaaggatatagagtcatttaagcagaattcataggtatatgcgcgtcgcctttctgaagtcgagggacggttatgtgaccagtgtacaaggtggcaacatacctcattactgaatgtgtttactggcacaccaaaagccctggccaatccaaagtctccaatcttgagttcccctcgcttggtcagaagaaggttctgaggtttcagatcccgatgaagaactcggttgtcatgacagaacgccactccctgaaaaagatgagaagagggatcgatttgagactgcgtatgaagaatcaaaagatagtagaggaaggaagtcgagtcgtacccgaagaagttgatacatgaatgatttgacagtattgagctccaaggcaccccggtcgccctgtgtgtccatgtatttcttaagatcttgatcacaaaactaattaccgtgtaaatatcactcagtcagcctggcatcacggagtttgctcgaatgagccatgacgagaatagattacctcaaagattaaaataagcttcgtctccgtgtgaatgacatctcggagtccaacgatattgggatgcttgagctctatatgttgggaatcgaaacaggaagctttagcgttgtcggaaacaagaaggaaaagttgaagataaacagacctttcatcaagctaatttcacggatggctgtactaggggtaccctcttccggatcaagatgaatttccttaagagcgacaatctcattcgtcgtcctcgagcgaccctgaggtacggttgggcggataggagaggagagcagacgatagtatagatagtatcagacatgagaacaacttgaaacgagcaggactctgtacactctgaatagattgtacgcactttgaagacctacaggatatccgagggaatgaaagaagaataaaagagtaaagaatgtttgagtttacgagcgagagatcggcttggtggcaggcaagaagggaacaaacggaagcataagtcccttctccaagcttctcgagttgaatataattcatgagttagaccgagctggtagagacgaggatatgtatgttgcaaagggtgagaacggccaatggagctaataaggaagacagtcaaggaagacacagagaccgatgacgagagaaagagatgaaagatgagatgatggggctagaaagaatggtgaaaatgttgagagggtggaaagaattagcgttgagcgtaatcattctttctatagactatgaagtaactttggacgggtctttcagcagcactatagatctttctcggaacaccactcctggctgaccacaccttatctccttggcacgcaagtcgccccatatgcgatcctttgacttcagtgcaagaccatacagcctcagcgcaacatagacataagataaccatcgacctcgaaggccgaacgtgttctggactagcatggtatcaatcaaagtagatgccgcgattgaccgatgataccctatcacgtggtcgggtaatatcgtaaccaaaaagaagctgtgtctatgtagcctcctggaagatgatgacctccatcatctaccctgcggcgtcccgatatgaaacttgtcccgctcacactcagagacacctacggacacacacacacacactcgtatactcttcatctacctcgtatctctctcttctccatccttttgtcttgtaatagtagcaagatgaagttcgcttcagggatgttatcatcattggcgcttgtctcgctcgccaatgcctaccaggtcaagatttctagttcggatgaagaacgccaggtcggtcggcatccatatatgatctgtttcaaatctactatctctttcgttctccgctcgggccaggtcgactcacttaaagtgtcaatctcctacctgaatgtatagatatgctctggtatgtgggctggcacgagagcaggtagcaaagagaagacttctattgagcgtaagcagagttaatgattgactcgcgaagaacatatcaagaatccagataccaagactgatgacgcgatctttgttcttggggattattttctgacaaccacagtctcgtttacgaaaggatctggccagttagctttggttgtatacgaatggtcggatgtagactacttgggcaagcctagcccttcgacaatctcatccggtaatgaagaatatgcagaatatctgcccaaaacttatatctgtgcgtgtatcatgagccctttatctgatttgacctctcatccgttttcgccgcctaatccccctcgctgaactctttcggtgcgatgatacaggcacaactttggcctatcgttcaggactctgccagaagagtgacttaggaggtcagtctcatcgtcttctccccccgtcctgccgcatgatggatctcaacacaatccaatctttcccatatcctcacagagtttatcatcaataacgccaaactcatagcggacaaccctggaaagaacgttactcttaacaatacttccatctatacgaccgcgctcaagtttgcatctgctccattcagcgagtcttcttccgttgttcacgtgaaccaccggcggacacctctttctcagtttgacgatgatgacgatgatatctatgatgacacagaagaatccacttcttcttcttctacttctacttcttcctctcactcatcctccttccattcttcctcttcctcctcctcttcatcacgcactatctcctcttccaaaacgacaagaactgcgccgctcgctacatctacactcagacatggccatgccgctggtcaagccaacaagaattcgacgctaaagccgagccataattctacccgaccgagttcgtcgaccggactgaacggaatagatcaattggcatcaggatcttctggagtgagagattatgacggagaggtcttgcattatcaggttaccaaaactggatattactgtgtaagtcaatgtcagaacgttggcgcttgtaacgcgcgctcccattctttcactcttgacctaaagctatcttgttacggaaactgtgcatttagatcggcgctgtgccagtaacgttggtgtctagtggctcaacgtccgtcagctctcgagcgaattcttctacctcagcaaaccatgctgaatacgaaggaacaatcacatttaacaacatctaccaaggacaactccccgctgcagagcaccctaaaatcaacgtatgcacttctgtcctctctcttcctctcacgtatccgcgtctcttctggcctttgatactgaccttggatcggttgggacggcaatgattagttctatctattcttgacgtgtttgtacatcatcacaacccttggttggtgtgggctctgttacaagtatagagccgagctgttgcctatccaggtttgtttctatgaccttggttatgtacaccggtttctcttgtttcttgttttgatctttctcctccttgcgtgttgctttttctcaattttagaactatgtgacaggaacattgatctacctgtgtatcgagatgggtatatactgggtttactaccggtttgtctctttcacctctcttctatatagctccaacaagcttttctttcttgcgttttagagatatttacccatttcttatcttgtatagatacttgaacgctcacggatatggaggcacctccactgcgttcctccttgtcgtttctgccttgaacgcaggcagaaactcgctcagctttttcttgttgcttatcgtctcaatgggtctttcggtggtcacacccacattgggaacgatcatgaatcggatcaaggcactcactgttgctcatttcttcttcggaggtacactcattctacttttcttcttcttcttttctctcgttttcttagtgccagtcagttttttgttcgctaacttcaaggatttctcttcatcaacatgatgtttgatgaatcagtcgtctactctattggaattgttcagatcacattggagacggcctcgttggtgttgctcctcagtttgatcatcgggctttcgttcacgttgacctccttcttgatgtggaccgcagtcagcttgaacgggacgattctgcatcttgaaaaaaggaaacaacatcataaactccagatgttcaagcgactcaacacgattctctgggtggccgtatttcttattgccggattctttgtgatctcttcgatttccatctcggatcgaacgagcgacgactatgcacctcgaagttggaagtacaggtggttcctgttggacgggtcactcagtcttatctacctcggcgtattcgccagtatcgcttggttatggagaccgacaggaaacaacgtcagattcgcaatgtcggaagagattgctcaggacgaagctgaagcagacgccgatgactttgagctctcgaaccgacctggtgggcccgatcaccctggtgaggacgatgacgaggacgatgaagatgacaccaagcggatccagagagccgagaggggtatgatgggacagagatctagtcaagaaagagacaacaggcaggtcgttttcgctcttgacgatgaggaagatcaaaggttcgttggcatcttcttctctcttcactcgtgtttgtctccttttcgtcatggattcttactttggtgctctgtgtgtgctcaattgcaataagcagtgatgacgacttgaaggacacgagcaagagggatcacgacgaattaaaagacggtgaagaagagagacttattgggaaggatcgatagcgttttaccaattttttaatcttcttgttggataccattatttcagtactctcgcctggaattttcaaagaggatgtcgttatttctcgctcctttccagtccatgattgaagcgaggaggcaggcagacaatataagattaatatgccgcgtttagcgcggctacgaagagagattagatctttgaacattctttcgtcgtttaccgcaaatcgtaaatcacgcatattccctctctcccattatcaccttcccctcgactaaacatgtccacctcgacatcggactcaacagcgagctcatcagcacttgattctgcctcttcctctgctctaacaattgcggatagctcggccaaaattagtaagactaaacgcagtcagaagttcaagcggagtcggacgggatggttcgtatgcttttcgtttctgtcttcgggccttcttaatcaacgcgataggaaataaatctcgctcaagatcaaagacaccaccatgagatgacccataggttatgaacaacagcattcgacaaagacctagggctaaccctcatgtcattcttctccccgtcttgggatgacacagcttgcaatgtcgaaaggcgaaacataaatgtgacgagtctgtgtattctgttttctttttccctaacacttttttttgtagagactgactattaggacgccctcctcaaatttcaaacagacagaagccaatatgtattcgttgcaagacgaacagtaaagaatgtgcatggccagtggacgctgtcaccgaattaagaggctatgttatctcctcgtctgcagtgttcccttcggctagctcctcttcagataccgcacaccaaattcctttggggtcgaccgattctcttccgaccacccagtataactttttggcagtctcatcatcgacgacgccaacagtatctgtcaatgcggcctctaatgatttctcggcacttaattcccactctgtatcgtcagtatcagccgattatccatccaacttatcagcttcatcgtggcttggagtctctgcagagccctcttggactgtacggagatcaaatatggatgcaccgactatatctccggagccaagcagtacaactaaacctcaaaagactctagaggaagcgcttgaatattgttttccagaccaagaagaaagggaattggtaagttttatggatatcaggagtttctcgcgtgctgactattgtatcggctctagagactgacagcgtatacctcaacttatgcgcagatgaagcacttcttggaaaatacggcaggtctcagtcaaacaatccctgttccccaccttcctctgttctacctggagccttctcagttgatcgcttccccacgaggtctttctatcccgagtgatgctctcctctttgctctactgagtattgccgccgttcataaatcatctctatacacaattaagatcaaggaggaaaacgctcgtgatacaaacgcggacgattttgctacgttctcaatcgatgacatgactacggcttccctacatcacccctcgacgatcagcagactccagtcgagtcaatcaaagcttctaagtctcgcatcttcacttctccaaacctctcacgctctccttcagtcatcccttgctctgtccaccgcaccatccgatatcctcatcgctacttctgtcacgcttgttctgagctcagtcctgatggcttccaaacagtggcgagtgaattttgaatgtgcaaagatgctgatagcaagaagaggtggaccgagagctatgttggatgaagcgaggagcaagatcgacaggaatgaggacagcccggcatggctgatgaggtgtcggtcaatgctagaacacgtagtaatttttgaggtttttcgtacgttctactttttcttgcggtttttactgctggcgtattggcaggaccctaaacatgaattctttcttcgcttggctgatcttgatcatttgtagacagtattggaacaggagaattccctcagtttctgaatgaaccattttgcccatggtggtcagtctggtttatgtgtattcttcagggagggacacagtctcaaactctcattttaatagaaaaatgaacgattctgattctttttgtttgttcgtaccgttataggtttgatttcgtaggaaacgtcagcagaaccgaagtgttcggtcctgaaacaaacatagcatcacacgtgttggatcatgagcaaggtcaagccgactgggaaactattgaggttcgtagctgatctgtctttgctcgttatattggctatccgcggtactcatctatcacatgtgtgtgtgtgtgtgtgtttagaccaatatcggagtctccagagggatgattgagcttatcgcccgggtaaatgtcttgacatcacaaacactttacgcgcatgaacttcctctatatgccagtccatcgtcctttccccccgctccaagaacacttcgagaacaagtcgaacgggcaaatgagcttttgctcgagctaggtatctggagagaggaaataacgaatagcatgccgtccgccggtacgacgaatgcaaacgacggaagaggtttgggaggaagaggcggtttggaatcgttcagcagagtcgagttcgggaacgcgatctacgcgctcacagtacgactaatctacctccttccctttggacatctctcagttctaccccaagctgacattctatatcttactaccctcttggatccacatctgtgtaaacgcgccagatggagattatcatttctatagacgtgctcgggattcctcacttggatccatcagtccaacgagccgcttacaccgggttagagctgcttgtgaagagtaatgtcacgaacggccaagtcattgcgtatgggtttttttcttctttcaactatcccggctcgcttattcattgatagagctcggtctgatcagtcgctaatcaagaattgcacttgacctttctgggttgtcgttctcttcgctttttattagattaatgtggccaggtaaggatatttcagctcgacactctacgatagaatataagtctattagagacaaacggctcatgatttatgcttcgttctttttctttgcgataatcttatcctcaataagccatcgtttgtggagggatgatgactgataagatgggtcgaacaactacccgtgctgtgatcgagtattatcggaactcatgctgcttcgatgttgatgctgctttggccgtcgtcgaaaacgtaggtagcagacaaacttcctaccggttgtttcccgttcatacgactcactatttatctttttcttccatcctgccgactgaccatcaacgacgacagctttgggccaggaaagacgcaggggaagtaaatgcatcatggagagaataccaacggcaatcaggtttgattttggtttgatttccttccgcatggtgtttcagcattaaggatctatgtagatccttctctacacatttcacaaagtcgggatcaatcgcaactatcatgcaatactctgcctcgctaaaaaggagtagagatagacaagggaggggggactcctatttgggcattcctctacctcttgtcttcttcactcctctgacagattcgtccataccatcctttcgctttgttccaatttgctctctgccaccggttagccctgcaccatgttccatatctccatccaactcccgacgtatcatttctgccaagatgtcatcctgtcctgcaaactcttgtcttcggagagaaatttggtaggccgctatttatgtattgaatgttaatactccaatcaggatcactgcacttccgactgattcgttccaaacgagacgcagtgaactgatatattttgggcagacaaaccgttctcaatcttacgcaggctctgatcagtgatctcctgcttcttgtccaaatatgggatatatgacatcaacggatcaaactctacgaattcacataccaatcgttaaagaaaactcgtcagtgagacatagagaacatagccttggatcaatcgatagaaggatagtgcaaacgtacgagatttcatctcacgaacgaaccctagggtcttgagcgccacctcgtgttgtccttttgctatagctagagaggggagaagaggggcaaaagtcaagccaaataagcacaataaacagataggtagatttccttcatcggctagtgcctagacatgtattcgggacaataagaaaaggaaacgagaaacatcaagaacacaaaccattgagagtgaagcgcatgagctctccagatagatcagataatccaagcacatagtctgctggtgtcacaggcaaaaactgtacttcggccaattcgtatcaaccagctcgagttcgtctacatcaactagcgatgacaggaacagaacaagattagtagaaagaaggtacgttgcttacaggtttgcctgactcgtctttcagcatgttctggacctcatctatagagatcaatgtaccttctttcgtcaagtaatgaagaagagaaatagcttctatatattcttgaagacctcctgttctgtgtgcagtcatgcataaataacgaacgctagacgagttcagccgagaagccgaagctgggtttcatcctttcccattttctagtttttcgaaggctaataagagagtgacaatagagaagggcgatacaaaaacgtacatattctgttgatacctccagaattcaccctcttgtccctgagctctcaaaagctgccgtatttccctttctttgataaaaacctcagcatacttgtcctccgatatggactccccagatgttgtgagggaaactgctagtagtggttcacttggtgatgtagaggtggatgttgttgatgtcgaagcagctaaagtgtgaagaggatcagataaggaaagccgatgaaggaggaagatcatcctggatcgcgatcgagaatccatcagttgagtctcttctctgacattcatggcttataaacaaactttttggagtgtgcggttatatcccgggaaagctataaatgcgtccagccatatacaatcaagatacaagtttgagatcagactgagagaactcgacaacagtttcactcgctgtacatccaacttgttatgaaagctctcgagaagagaaatcaactaaataacaacgacgaaccttgatgatcctttctctcttgtcatacttacgttcaaaaagggagttattccgaacaatgacaacgttaaatctgtcagtaagacgaacaaaccctttccctttgcctttcattcacaaactgcaataggtcgaatggaaagaggagggagataaataacgggcatacatgcgcatcaagagtcatcctgaaggaatcaaacatctgaaggacatgttgtgatgtattttcggtcaacagatctttcgacatggtgagtagagataacccgagggcttgatggtggctgatacattttgatatattaagtgtccgcaccgatgaatgctctggtcaaggctcgcttgcacgtgattcgtgacgacacgttgatgagtgtgatgacgtttgcggctcaaacgagatggtagcaaagacagcggaagacattctatatatgtttcgtcggtcgatcccgacagcaaagaaagaaagaaagaaagnnnnnnnnnncagcggaagacattctatatatgtttcgtcggtcgatcccgacagcaaagaaagaaagaaagaaagaaagaaagaaagaaagaagagaaaatcacagccagccgaccagagagcgaacgagcgaacgagccagaaaagccagcttgagaagacaaagaaggaaggaggcaaacgaagaaaggaggcaaacaaacgaaggaggacgacgaaggaagaagagctaggtcgatatgtcatgtagagaaggacgatagtatacaacttggccacagtgctagttcacatttttcagatatcaacgaaaggaaaggaaaggaaaggagaagatagagagagcgcagggtagacgcccaaacagacgcccagacagacgcctcgattggaggccagtcaggaggccaaacaagaggccagacaagaggctagccaggaaacaggtggagaacaaagaaggcagcggggaagcaagacagaaggacagaaggcggccaccctagttgttccaccacctggcaaaccagttcgagttcttgttggccagagcctccaaagcctcgttctcggcctcgttctcgtcgatctcccggatcccagacaccaggtcgacctcggccggcgggatgatcttggtcttgtacacgagcttgtagccaaagtaggcgatcgcaaacacaggcagaccgatgtagttcgtcacgaacgagatcggctggaacttggggaagaacgagtcgtagcccttgaagatgacgatgaagccggtgaagaagagcgcgatccacgcgccgtacggttggaacggtgccttgtacggcaggtcgtcccgggacatgccctgggcggcgagcgccttcatgaaccggatgtgcgaccacaggatgcacatccacgtgagcgcaccaaacatcgagatgagcgacacaaagtacttgaacaccgtcagcgcagatgtcgccaccgagcagtacgacagtccacagaacgccgtgcagagcagaagcgcgttgaacgggatcccccgtcggctgaccttggcaaagatgctgggcgcctggccctcgacggcaagcgcgaagagcgtccgggagccgatgtagagatcagagttcgcagcagagaacacgaagagcaggatcgcagcgttgatgatcgacggaagcgtcttgatccccgagatcgtgatcgcgacgacaaacggcgatgcgttcgcgttcgccgacgacttgatcgcacccgccagcagcttgctgttcgacggcacaagcagaccgaccaccgtgatccctccgatgtagaacacaaggatccgccagaacgtccgccggatcgccttcggaatctcccgtcgcgggttcttgctctctccgaccgtcacaccgacaagctcggtaccgatcagcgcaaagagcgcattcgggaacgcatagaagatcccgaggaacacaccggccggagtgttgtatccgtagtgggagaacggcccgggttccttccagtatcggaaaccgatccggtcgtgcgacggccctccgccgagatcgaggacgataccgaggatgatcaggccggtgagcacggtgaccttgatggcactcatccagaactcgaactcgctgtgtggggtgtgaggggtgtggggtgtga

SEQ ID NO: 1012 - DNA, 16695 bp, Xanthophyllomyces dendrorhous
ggttgtgatcaaggtcagcaactagctggctgggatggaatgggaaggcctgtatctgaagatctgtcaatacataaatgtgattttcttattcaaagatccttgttttagctggatggtcttgttgtctttgaattagtttctaaatgagtgactgaggaatgaaaatcagtataaaattaatgatacggatatatctcaaggggatgatgggaaatgtcgtatgtgttagggttacatgaagagtctgatgtcagacatcggttaaaatcttaggaatgttcaacgtatagggaataccagtgattcatagctgcgtttgaacctcgatagtggctgccattcaatctcaatccagctcatcaatttgtacatttatagagtaatcgagcaaagattaactacaaaccataaaatggctcagacatcgagtatcgttgccacagcgcttctgtcattgtatgtcctaatctctttctactcttctgcgatatttattatagagcgatcgattctgttgtctactctgctgtgctcctttgctgaacggactaccggacaaaaacaggacattaggatattggataggagtaggcaacagtctttctttccagagggatcggagcgtttcttctgctcctgagaatgatgaggttgttggctccgcaaagccgaaagaagggactactccatcctcgaacgatgaggacgaatcgaaacttagacaggtcacgattgagcaggaggaggagatagttgaatctgacgatgaggaagatgatgaaagtgaagatgaaagtgaggatgaggaccggcctctggaaggattgaacactgttcaggctggattcatggaagaatgcaaaatggtttgttctcttaattcctctattgccattgagagttccatttttcaagaaatcctcgcaccatcttctgtatggatactattctttacaggttctcgttgtccgtactgatttgaagatgaccaagggaaagattgctgctcaatgcgggtacgtacatattactacttcaattgaggagtgatgacagaatactgatcggacatttgaggttattttggatagacatgcgacgttagcttgttacagaacacttttggcatcgaatccgacgctgctgaagcactgggaacggactgggtatggattctgtcttttatctattaaaggaaaagcaagacgagcgacaagcggaaactgaaaaagccttcgtctcatggtttcatgtcatccgaatattaagccaagcgaagatcgcccttcaagtcaattcagaggacgagttgctattacttcaggcggtggctcagtcgttgaatgtttgcgcgagagatatctgtgatgctggtaggactcaaattgcggctggaagtcgtacagttctcggggtcgggcctggtaagttttacacttgtctcgtacaatcttgacgcgtggtttagggcattaacttcaactgttcctcactctctccttgaacccggctggtagctcctgtgagcttgataaaccaggtaagtacttgttctcccctcagtatattttctctcatcgttgcagcagaaactatgagctaaaggcctttgaaacggcatgcgtttctttcttcttttcttccgttccgatgtactttaatgaaagatcacgggcaatcttaaggtttgttgtccacgtctactttgctttttatagtttcttttgtctggaatcaaaatctccgaaatctgactgaccgaagacgatcgacggactttttttcctttttcttttcctttttcttccttttttccctttctgattagttgctttgaatgagtctatcgattagatcagatgtagaagattcgaaatccaaaacgcacacaaatgaaatttggaggacacaaagtatgaaagaaagaatgaaaaataaaggagatctttcgacccttgcaagattgaaggattgagaattgttgaagggtttagatgcaaaacatcattgtcgttgaagatcggatacagacctatgcttaatgaactatccttgtgtgtggcaagacgacccaacggaagggttgtaaatatagaagaagagataaccaaaacatcaacactcgaaagaaagaatcaatgaaaagaccagtggacaatctttcggtttgtttgtcttttctgtttagttccgtgttctgttttgcatcttctcgatgtcgaaatcccaaagcttactgattctggattggaagtgagccagacgacagacaaaagagaaaatgcgaaacaaccaggttcgggcccgatgaacaagccactaagaaatcgagtcgatgcgaatgtcgaccgacagctggaaggcggaaagaggcggacgagggcgcaacgagggaaaatgtggcgggtttgccacgagacacgttatgacgcgtcttgacgcgactgactttcgatttctttttcttcgtcataattttctctcccggcgtcgttctctgttgacggtttttgagctttatttaatctacatgggaagagccacctaccgatagaacgcggatgctcgccagagctcaggtatgataacacaaacagtcaatcgagtcggaaagagcgtggcggaatgaagtgacgaagaagcaaaatagggaaacatgccaaaacagaaaaacactagacttcatgataagacgagaaaaagcctaacaaagggcaaaaaagcgttaattcacgtctctgccctttcttctttccacctccctctgttactttctctcgtcccctgctctcatcgtttcccctgttgactgaacttcctccttgaaacacaaacgaagacggacaaaagacgacagcgacgagaataataacaacaacaatcaccacgaccttcattctctcttcatatagagacacagagaggaaagcgcatacttctcttgccctctcagtcaggtctcgatcactattatccattcccttcactttcaaggtacgcgaagtgaccaactttacggcctgattctatccgctgcatcgttcactcatcgtcctcgtttgtaaaaaaaaaacaaaaaaaaaacattctgttccttcctcgatactgctcgccttctccctgtttttgttcttctatcttcccctagggtcttgttcacctctccatcagattggaaaagaaaggcacttttcactctttaaacccatctgcagtcttcacactcttttttcgcctttcctttcttcctcctactcaatttagccaccacgaatcttaacaaactcatccgacgcatataccccttttccccatcctaccaatctacgtccgatcatggcatccatggttcagccctcgatctttaaccccgatccgtgtcggtcaattcatcagtcatttcgtcgccaccaacaatcccttcgcccaacttctcagtctttctctcggacttcgtcgtcctcgatcgtcactcatgatccctcagttctcgatgacactttgaccttaccgtctaccacgctcgatagctcagctcaccatttccattcgttttctgctgtcagacgaaagttagatttcagagcgaccatcggaacagatgactcttcgtcagaagaggaaaccgagagatgtgccagtccgctctcggctaggaacgaacgtacttctcggatgcaaaagacttcagtcatgctggttgacccagcttctacagtcgcttcccctctcgacagtttacccacagcttctcgcacatcccagcccattggtctgtctaaaacagtcggatacgcacatactcggaacaatagctcaacatccactctgcggaccttccagtcaattcggcctcgatcatcctcgaaacttgggactgacagatcaaacggtctaagcgatatcacatttggaacgggcttcaatgcgccgtcacctcctgctacttcatcccctagcatgcatgcctcctcgtcgacgtctgatctggcgtttaatttgagagaacaactatcccctaccggccctccatctccgaagcgatctcgatcaagttcggtagcgactgttgtcgaagacaaggaaaacatgctggcttcgtcacttcctccatcgttcagatctcgacggactagcccacgtccggtcttcttaccatcttcgtcgtcaacgtcgtacatgagcgggtcttgtcctaagccccaacagattcagaggcttattggcccatctcctggcaaaccggtgggttccggcttcagggacagtcagatggggtcacccgagagtcagcagatcgagatgagttttgaagacgcaaaaccaagtccggatgcattcaaggtatcgttagtcaagaagggacaagatggatctgctaaaaaatcgatgcagagggtacgtttcttgttcttctatattagtctttcaacaagtgctcaccagtcatctcgtccaacttcaacagtcacctctgacaccaaatcccaagatcaactttcagcgcaagttttcatcatcttctctcccgtcgcccaagttcaacgagtttccgttcttctcggacgaggcttctcctcaacccacccggcgcactatcaacccactttcacactcgtgttctaaaccgtccacgtcgtccaacctcgttcactcttcatcagtcctttccactgaccaccctagggtgaaacatctatccgcttcctggtccggtctagctaccagggctgaaggacaagaaaccgatatcgatgactcgcctcatctgcaccgcggtccttcctttgaagaagctatcttgaatgactttagactacgtagtcccgtcaggcgaacagacctcttcccttcgtcctcatcagcatcctccttttcttccgtcacgtcgacacctttcaggccgtcgagattattcttccccaattctccggcagccggggagtttagcacagcactcaactcatcatctggtgattcggcctcatctagtccactgaggccgtctcatggatgtagaacaacccagccggtgattattgatcggtctgactctgaatccaacccggacagcctggtcgggctaggttttaactttcccatctctacttttgggacacctgatgtgagctccccaacgtctgctagctttatcagtggcggtggcgatggtggaaaacgattgaagcggaaaggagaggccgtgatggatgctcctcgattaccgagccgagcagcgttcgagtttgctcaaccgaccctgacatgcgtgtcgttgacgtctgagagtccgacctcgaattttcagagtagcggcgatgagcgggaacagggaggacatcagcgacccgggatggcgagacggccaaagttgcagagagcaatggtgaatcttttcgagaagcgttttgagtgtgtggataagttaggccaaggaaacggaggtgtagtctggtcagtcagagagagagaaacaggtacggaaggggccgtgaagatcagtacgatcttttctgggctaagagataggtacacttgttttctcctggtaaaaataaacatcagagacttggctgacttaagttcctctacacttgcccaggattcgacacgcagaagagcttgacattcttcgttccatctcgtccaatatcgagccccatcacccaaatattctccctcttcatgctggttgggaagaaaatggtcgactgtaccttcacacccctctattccagtcaggtgatctgtcaaccttcctcgcgtctcttgtgtacactccttctgggtcctcgttcgttccgtttgttcaccaaaccaccaattcgactggcggattagatgagtcccgggcgtggaagttgcttgcttcactcgcatccgcgctcgctcatgttcactcaatggatatcattcatctagacatcaaaccttcgaacgtattgatcgacggcgaaggagaggttgtgctggccgattggggacactccacccgctggcctaggatagcgcctcgagagattttgaaaggatccaacttggctggatgggagtcaatggacgaacctgctgcgggaccagctatgggaagtagcggaggcggtgcgtttggattttcagaagttagtccttcgagaacagaattgatggattgggagagagagggagatagggattacttgagcgctgaaggagtcagggggattgtcggtaaggaaggagacatctttagtcttggtctactcatgttggaggcgattacgaacatcgttccgcctacctgcggtgatccgtggcatcgactccggaccgacgacttctccgacctagaagactcattgggactatcacatgtgccctcaccatcaggatttccatcgacaagattgtttcacacattctctaccttcacctcgacctccgatgactcgatgcacactctagattctgtcccactcgtcacacctggcgcatcttactttccctcgacgttcctcgatgttgaccagatgaagccctccctaatgggtacacctttggatgcgaaatcatgggggtctgaaccgatggtcgcattggtgaaacagatgatggcttccgatccttcggtccgaccgacggcaggagggctcttgagtcatttcgtagtcagatccgccaaggatttgatggatgccggtcgaaaggaacgagcgggatcgaccgaaccaggaactcctttcttgttcaaacaaccatctttctcaggatatgttaatgggatgacaatagcggcagctgcgcccccccattcaggctggtcattcgatcgagcgagcccgtccatcaactcgccggtgttgctctcatcagcaggaccgagccttattcccgaaccagagacattcctggcttgtgtactaggaagacagccgaaccggacaggaagcttcattccagctcaggtattaacttcgttcagcggggtacgcattagagatccttctcgagagatcgatttgatcgatgacgaggacgacgacgagggtacaagagaagggaggtccgggatgcaggttgacaaataaaactcggatgatcttactgtttcgtttctactgtttcgtttctactttttcgtttctactttttcgtttcttcttttttctcttttctctgtgcttttctactttcctgcttgcttgttttatttccattcttttcctcttcttctcctttgttaagctgtctgcttgcttgtctatttgcttatatacccatttcgtataatctttagtattttactacctgttctttgtttggtttctcttcaccaatataccaatatatctacctactcgtacactgtcgcacaggatttgaatcggggaaaggcgtctgataaacctacagtgtacattctttcttacgtcttcacgtttcttattcccctttctttttttctttctttctttcttctacacaacaaacatatatttctagtacatcagatacccttccattcccttcttttttcttggatcactcgctcttactgatttgttgatgatccctcttttcctcttcttttctgtcctttttcccaaatagagattcttactcctccccttcctttctatcggacaatctttctcttctcaaaacttgttttctcatttttgcctctcttgattagtcgttcatgaaacttgatatcgaagccgactggtcacccttttcttctattttatatgttgatatactcattcattcactcttttctttgtgactcggtgtgtttcttaaggattcttcccccccccctccctcttctttcatttaacgtaaacctgtttcatgccttctttttcgatcccaattctcggtgattctctctttggttcctatgcttcatattggtagagcctcgatgtgatgtgtcctacctcgttctaactcgctctgccccctccgcgtgtctgtgagatcggttagacaaggggtcagataaacgtctccgtttgaggacgaggcgaggatgtggatcaatccaagagatgtcaaaagacaagatgaaggggaagcaaagtagggcaggcagaagattcatttgtagatgtgattacgggggtttatatataaatacagtttccttagtcattcctctttcctggcctttgctctctatccctcttttcttggcctgagctattgcctgttgttggtcagctcatcgagcagaattcagaaaagaacacaaaaaagagagggagaagcgcgcgtaaggtgttgttgaaaggggaaaggggggaaggatatatgcaaggatataataaagatggtccttggatgaggaaacaagcgaatcctatagcgggaggatgacgagacgagaaggacgttccattcgatgacctgcgctgttctgaaagggaggatgttcgttctgtgtgcccagacatcgaggtgtatgcgcttgatgacggtccgtcaggcagtggcggagggacgagttgtgacgtggattacatgctttcaattttgaaggagttgcgattcagaggtcgaccggttgaagagtacttttggatgcaactaaaacgtttcaagagggagtaagggaaaggggagggaaaggagaagggggtgaaacagctagaggctgatgtcaaggggatccggtctctaccggtttgtttgatccccaagatcctgtttggtcagcgttgtatccggcggaagggaccacgcccgacagaggaacgacactcggtttagggactcggattttgggcgcttggaagccgagaggtgctgcggcgggtaactggcttattggcatctcggttgatgctggaagagttgctcgtctggaattggctgaaggtgatgtttggttagtcatgggcgggttggctggcggagattcatcctttgaaatgaagatgacaaacaacggatggggcaggtaagcatagaacaacaagcaagaaggaggaggaggagaaaacaagcgagcgacttacgacgtagggctcgttgatgcttccgcaagctcctttggagctattccatggatcaccaaggtatccgtccaagttggacttttgtctcaggttccactctttgatcaagtaaccggcaatgcacaaaaaagcgaccaagacgattgagccggtgatcgctgcggccatctgggcgtcggggtcattatcagagttactggtcggtacacttattgagcttctggctgcaagagcgagagccacggccgaaggggccgtcggtgatgagttgaccagggtaagcttactagtggaagggtaaggtgcgaactttgaggcatggtcaggatgtagatctgggaggaggaaaaggaggaagaagagacaaaagaaggggagaaaaaacgggactgacagatcggacggaacgacagggtgaccagagaagatagaccatagtctgatggacgaagtgtctgatgccggcagaatcggtgctgccctagctgagacggctaaggcaacgatgagtgaggtgagtgaggtgagactcgacatggagtgttataagtgaggtaggcaagcgaagtatgttctacccaacagggtgaatgagcggcagcagtgcagtagcggtagcagtagcaatggcaatagcgatagtgacagtagcaacaatagcagcaacaccaacaggaagggaagaagaaacgaaagaacacgagattggttgtgtgtattcctttaagaatgtcattctttccgttagcttctaaaaccgatagaacccaaacaggacaaagaagggcacgcttgtttaggggaacgtcgtgttggataagctcaatggtagtacgtgtgtgtgtgtgtgcgtgcgtgtgcgtgtatgtgtgagggtgtgaccgaggggaagtagccggttttagctgtcgtgcctgggcgccctgagagttagtagaaggtgatcgagggaactataaacataaaactataaacattacgccctctcccacaacgccaacagccgacgagcgcgggcggctggcgagagcacaagaaggctaacccagacggacggcgtcatatcgtgtataggcttctgcttccctttgaacagataacacgcccggttagaaaagtaaggaagatgaaatgaaagaagaaaaacaaaaaacggcaagaacaacaacaacaacaaagaggaaaaagacgctaataagatccgtggacagacgaacaatcagcgcgggatgatgcccctcttttttagaccggtattttacataagcgcttcttattgaactttattctagtgaacatatctcttctctcattgcttcctagaagtcccgcagcggtcctggtcgatcagccgtccgaagaaccgttcgaccggtcccgctccctccctttcagcgtacgatcgtctagccatcgtgttgctgacttctctttccgtgtccatcttgatctgcctggcggaccgaacacggtcagaccgcgctcagggccacctcgatcaagcctacgacggcacacacctcggacaggtagctcgcttcccatcgccggttgtaggcttggacgcacccggaaacctgagttctcacgtattccagcggtgggcggttcgcgcggtcaggtacactgcaagcgtcctgtcggggacagacaagaggaagaaaggaagggacgaaaaagccggacatgacgtcagatatgtgccttgcgcatccttcctgctcactcatacactcacctggacgccccagtggaccatgttccaaaagtctcgccaagcccagccggcatcccgctcgcacaactcctggatctcgttcacccagtctgccatccagctcgcttcatcctggccatccctcgtggccttgagttggagaatatccttgacgtccgctatcgattccgcgcacgcatccaaatcagagcacagacagtcatacatctgtctcacgttcgtcgcgttgccccacttatataaccataaagtcaaataccattcacattcagtcaacggaagtagagagcacacaaagagacaaatgtatagagagagagagagagagagaagtagagatagaaacagggaacgcacattgtgattgatcgataagatctgtgaaccagtcccttccccagtcgacaggttctccacctggtctgtattcaaagaagaaggccatcattcttagcgagactcttcatcatgtaacttcaaaagcgatgacggtgacaacaacagcactcacgataccacccgctcggcacgaatatcgtctcaccctcctcctgaatcaccgtcagcccggcctgttctgcctgatcccacattgtaaactttgatcgatcgaccttcctgacatccctcagaagctcactcctactcccactaggatcccttcggagaaacgggctgtgtgagggcgggtacaagtcccatcgctttcgacccagcacattggtcgagaatgaataggaagagtagacgtctcggtgaagaagtgtcgttgtctttgatgcccctaggtactgttaattgagaggaaaggagagtcgagcggcgcgagtgagttctccgagcaagaagcctgtattcacaaacgcctaatagaaagaaacgaaaagaaaagagcatacaacgaaccgaaaatcgtttcctagacgacttctataatatccgttcaaccagtcatcctcgaacacgcctggggtggtatagaacctgtctcctggtcgactcgaggaggaggaagcaatgtcttccagtggtcggccaccataccttgattccgcttcgagagctagatgccagtccttgatatataacccttgcccttcacctcgggcccatgcgtccagcacatttgccaacccagtctgttcgcatatcgttcgctcggtcggatccgaggtttcatccccatcctcctcctctccttcttcttcagcaagctcaactgctgtcagtggtcgatgaactgaaatgggttctgagccttgaagggagagtagatacgctctgtcgatagtcttggttgtcgaggctgccgacgaagagtccgaagtgagaaacgtgtggaagcagggccaggtggacgtaagtgaggatgggaaaatacaaggaacgtttgggatcagatgatcttgctagtcttgacgagaaagaacaaagagaaaatcccctccaacgaagaaagtaaaagacataagcaaggacaagaacaggcaaacgataaacttcctgcttcagtcacaactcggagaggagcaagaatcaaagacgaacttacgagaaaggtttcatacgtatgggggtattccagtcggggcacggtcttccgactgtgtccacccaattctggttgatccatcttgaattaggctctttattaaacctgtgtttagttgtacaatcgcagtccgaatgatgaacgattgacggtctggaagagactttgaggtttgagtatcagagaaatcaagatcatccgcctgccggaaaccgtcatcgattatcgtccatccatccatccatcagatctttacccagcctgcaacttcctctccggttccggccaacacacctccattcccatcggtatctctcggctcattatgtcaacagctcctggggatgtctctgaagtatacccatcgcaagacatattcatagcctgttctgaatacatctcgagttgtccggcagccgcttccttacctgtttccacaaaattacgcgtaagctctttctttcgtccttgtctctttgtcctgatattgacagccaggaaaccatctctcattctttgtggcctgtcctcttctcttccgacaaagtagctttacggactgttcaaactatcgaccacgcactctcctgtccctcctacctcccggccgagcatctgggacctatccggtcgttccaaatgggacgcttgggagaaggtaggaaaacaatatataggatccggagacgtgcttgatcagtctgcggaaggaagggctagacaggagtacgtccaggtcgggattagtctaggtttcgatcgtgagtccctccttcctcgtatgtatccatgtgatgtgcgtgtgtgtggagatatctacaacaactcctgaaatctcctgacgcctgcaccggctgatgtttgtatggatctacccggtgatagcatcgctctacaaacctgcttctgtaaaaagagactcggtcgaccttgcgaatctctcagattcgtcgactccccctgggtctcctcgaggaccgaaacgagcggggatgggtgtaaaggtatcgactctatcgagcaccccggctgaacaactagacgggcagcatgggcacgaaaagggcgcggatgagagggaacctcatcggttcgtcatagaaagagacattgaaggtctaaagaaatggttgaatgatgagagccgagtaggtgacgtgaatgagtttgatacatttgtgcgcgttcttttcttctcttcattccttgggggttcctttccccccctctctcgggagatgtaaaatccaatctggatgacatactgaacttttgtttgtctttctcttctcttgcgcgcctcgccttcacaaagggttacacgccactccacctcgcatcggataggaatatgctctcggcagttaaccttcttctactcaaaggcgccgatcccctcatccgagaccgtgctggctcagaaggagcagaaaggacgggcgaagaggaagaagggatgactgctttggagatggctacgatcaatggacccggttgggaggaaaccttcagatcgttagaacaggccgaacgtgaacgtgctcgctagggacggatgctccttatgaaatgtactttaaagcgacgaggcgaaacaacaaaaaaacgattcatcaaggcatgtatacaatctgactgacgaacgtcagcccgtctgacttccttactagactcagcaccggtcgctcctcgtctttctcctccttcttagcatgagcataaccattctggaacccatcgaggtccatcttcgattcatcctgcccctgatcgaggatttcgcgtcggatgagagaatttcgagaaatgtgttcatccgggatgatggccgtcaagagttcttcacatcggagctctgttcgaggggaaggcgtcgttccaaacatgaggtcgtacgaagagaacgaagagtttgggaatttttgaaacttcattccgctatagaaaagcgacaattttccacaagcaaatagaaaggcgattagtccacgttttgttctttctcctttttctttctctcaattgatttcctttgccaaaatagtgacatggaaattatatcaaaagaaaagactcaccggaggacggccaggtctctttgttcctctccatcggtaaccaagatctctgctttgaaccctttatgttcgatccattgggtcgttcctgacgactctagagtttcgactttcaatatctgtggtaacggatttaccggtctgtccaatatgcctagctgtcttcctccttcttttgcgccagtggggatccgagggatacagaacgtgtgtttgacagactcgacactgacgaccgaccagagcgaccggtcttccacgcgaacgaaccagctggcggtcccgtgtttgacaggatcaggcggaccggagaaggctgaacggtttgtctggggttgatccgtttggattcgttcctcgtgtatggcgaagaacgaaccggacgtgccgaaagagccaggtgctaacggaacgcggctcggactgtatacttccaaagcaacctttggcgagatgtcgggcaacatgatgagatcttccatacgcatcggaggaggtacaaggcgatgtggaaggagagaattgacaaaccttctgaagctgagtgacaagctcgcctggtccttctccgggaggacagcacgctcgctcctcctcatcgtattccatgtcttctggatctccgcctacgatgtaaccggcatcggccgaacggcggatgactagcaccggagaaagcgcgccagactgagggcactgaagcatgatcgtgttatctttaagaggaagaaaattgacgcgcgtcagtcggagagaggagataaatgagcaaagaaacagagagagagggggggagagagagagagagagagcggggctggactgactatatcgaatgggcttaggtttagatggattgaaagggatggcttcttcaggaggagccggccagtctagttcaggcataggaaagcttggtgttgctggggaaggacgttgtgtgtttaccttccagatgatgtaggctgattatacgagagggaaagaagagggaaacattgaatcttgaagatcaaaatgcaaaacaaagaaaattgtcaatactcaccattccatacatcaggcttggccataaacatgatcggatgaaggagatttcttgattctcttctcttcaagccctcgtctggacagagattgcttccgtctgttgcaagtatccaggatgtacagtctgacatgcaaagatatctagtgagggaggcttgagagcgatgccgttggtagagggaaagtagggagccatgggtaagagcgactttgaggagagggaaaagagttgtgtcagaaggaggatatcgtcaaaagaaaagagagagtgtatgaagaaagccaggtcacccactgtcgattgccttgccattgccgctcgataggggcagacccggcttttttcgaaccggttttgagaccaacttgatctccttgccctcgaacgtgccgatctgaatgcccggaacccccggaactaccgggggcgcggtgatgttgactgtggtcttgatgactctttttgtattcttctttccacagatgccgtcggctgcgtcaggaggggtgatcccctcggtaaggtagagcgttcggtcgatagcatagccatagagcggaggttcatcagtccggtgtgggccatggtcgttgggtgaggtcaggtcggcgtgcttgtcggctgaaggatcagaggtaaagagctcgttcggccaggtgtcagcctcgattgaggtccaacggacggtcgcctgttttacggcaggtggcacttcacccgagatggaaagaacgatctggggaggttcgagtcgagggttcaacttgaatgatgcttggttttgaatgtagtttgcaaagtcctggggatgaacgagcgggtcgaaccaggccgggccgacgagatagactgccggtggagggcagagaaatctatgggtgcaagcgtgtgcgggcaggcatatgtgttagggtagtaagattgattcccagagaacgaagaaggatgagacaccgatcaaagctttgaagcattgagtttaagagtaaactaatccttgccgtttctctttgctgtaggacttttgaccgacgacgggagagatgatgatgagtgagcgttcgccttgtttgaatcgctggtcagaggagaggtatagggctgagctctcggatgggttcattggtaggtttgcttcgaggaagctagatgattgaccgggtagatgagtgagagtgtatgtatgccatggctgacgagggagacttcgacacgactgagacgatggagggagggccgaccggtaggcggtgaggtctggggagggt

SEQ ID NO: 1013 - DNA, 13409 bp, Xanthophyllomyces dendrorhous
gcccgatctgtagtctatatggtgcgcggcgtttcgtagcgagaaaatccaatagtctattccggtctctttcctagtcgctcccctgatggcctccgtaatgatcccgccgacgccttccttcgcctctgccgtcaccgggtaagaaaaaatccggatgaatttcacattaatcccaaagaattgaacaaatctccgtcgaccaaccaaacatctccatccatccagcttcctcttactcttttttctttctctctgtcttctctctgatcatcatcatcttcttgccttgctctctagcttgctcttcgattctgtctgtttagtcctgtcaaaatcatcctgctggacagtcggtagtcgtgttgcagcaacggaaacaaggtctctcttagagcctctagcccattcattttccttccccactctcttcatcgatgatggtcatccggaatatcagccaagcattgtcagtctactcttgtcttatttcagctcgtctcgtatctcttcctctcttatctgtcagccgttgtccttgctgagcgctagacccgtttctacaatctcttctttcgaccgtttctctctttctctctctccctttttccctctgtaacctcccttgatctattgctctctttttagggcaacaccccgaatcctggtaggctcgctcacgctactcgggctcatatacatcctgacagcctacagctcggccagccgagtagacacactatactccacaacatccacaaagtgcaccccgtaccacacctacggacagttaaccgccaatgcggacatccccgaactcaataggtttcaccctttccaggacgactgcaaggctccacagctcatgagagcccttcgttcgctcgcaggcatagaaccatcccagggtgtcaagcaggacggctggcagggtgaaaatatcaattgggccaagggaaagacggtgctcatgattggagattctgtcgtgcgcaaccaggtgtgtcgatttccatcgtttcaatcgtattccacagcgcaaactcatccatctttgtttctcccatccctccttcttttcgccctagctcgaacatttctgtagtgtgagcgccaatccttcatcgcacaactttcttcgctccttgaccaacattgtatactcacccacgcctctttgtgttctcagttcatgaacgtaaccccccagtatcatcaattcccttcatcgggcaatctgcacaaacgagcgtccaaacaggccagccttccccatacatgttacatccctcagatagactttctcttgatctctgccttccatttcggtgtcgatgaggacaacttttggtaagtctgtcttcccatctctctcaacacgtgtgttgatcccctcttgaatagacgggtttattgtcttttcttcatgcctctcctctcctgtttcatgccttctcgttcatttcacaggcgggaaaaggatcagttcaatcctcccggactgtttgaagatcgcgtagatgtatgtcccaccctctcgaccctcagttcgctcttttcttgtcttgttggcgttgtaacactacgtttacttctccttgataaaacaggcggttttccttcctctcgtgcagtcaatagataccctcgtccctatggccaagccccactcgggtaaaaactcaaggcgatcgatcgatctcatcgaggtatcttcaggcatgtgggatcttgctagattcgccagtcgggatatcgtagaaggtcgatccaccatcaccgatttcgatcggtttgtccaccttttctctagtctcttactctcgttctcagcatgattgacggaaatcaaaataaattctgccgcatcattcagagaccagctgttatggttcaagtcaagaatcggacgaatgatccaaaaagtcgtcgaggcgtttccgtctagcaaagtcgtctggaggggcatccactatccgagtgacaagaacgcgaaggtctgtttctagtctatctttttacttgggcctttaccatccttctgtttcttcgtaagatcctcgaatgccattctgaagcgaacacgaattcgttctcatagattgattggttcatgggctggaactgggatgattcgactaaacaccggttcgttctgcacttctctttttttcatttttttttccaactcactatttcgtatatcttatgtggctaaccgtgttgttgttttaattaaacttgaccaattcagaccattctttcatcgtatgctctccatacatcttccctgagtatctacgtatagtgaacacacacagctaacggcagcccaatcttattttccctcgaatctcacagacaaccgaattcttcagttaggttcgttctcaaccgcttgactctgcttcgcctagattccttttcccaaagctcaactcgattcctcttagatcaagccgcccgatcggctatcgccgacctgaatacttatactttccaatccagaccgatcgagtttagcgagtgggggagcttgcttctcggtcagcatgcggttcgttccttgaactctctgttttctgtacaatcgatcttggcgctcggtttacctgtgtgctaattctatcccgtttctgtgtcctcctccgttcgatttcggacatgtagcatcaacagtacgtggatcttgtcgttgggcagacctttgaagtcgagctttcatccatttctgtatttcgatattctcgttgaacacttcctttctttctttctttttcttttcctttaaacagagaccaacttcatccgggaaaaagtccggccggttggctaggcgctgacatgatgcttttcggttcgtctcttctcttgttatcgtcatatcgcatcttgttctccttgagactgaacgactgactcatgggccggatttcctactccaatcgattgcttttcagaacttcgagaggctgtattcagaaaaccgagaaccaggtcgtatccgccaccgccacctccgccgttacagcatgagtcgcctcatccagattcacatccagctccttctgtttgatattctcgtcgttccttctgtccttttgtatctgtaaaacacggacgacgtaaacacacgcacatggcgacgagtttagatttgtttatttttgttgtttatttctttatgtgcttttcaacgcaaagtcagatatggaaagaagaaaaagaagaagaagaaggaaaaaaccacaagtgaaaacgaagaatgaatgaataaatgaacgcatgagcgaaatggaacacattgagaaatcaagttattgcatatattcttttttcttctcctctctttgtggacttccccctagagagtgcgtgagcgcgcagctcccttaatcatcctcaccaccacccatctccttccagaacgtatagatcttccgtcggttactgtcccgcgtgccctcaccacctgccgcctggaacagagcgctcatgaacgtctttttccactgttctctgagttgctcatccacttgctcgaaagcttccaggtcgaggtcgcttgccgatgatgtcgatggcgatgacgagagggatggatcgagtgagaggacgaaaggatagagaacgttgttcaatgttcggtcgtatgtggttgattgttgtgtgaggagagcaagagagatgaatgggttgagtagcatgggcaagttctccggaggaggagaaaggcttggttcagagatagcggcggtggttgatgctgttgttgacggggaggtggtagtggtagacgatgaagcggcggtcgggatagaacaaggagggggaggagtaagaaggactttgtttaattcgggtaggtaaatatctgacagatggtagggtatcgaagacggaaccctgtggtccttcccactaagcgcgcccgaccatcacgaaaaatattgggtaagcgccgatgtgcatcgaagactccaccccaaagaaagagagaaagagatatggaaagaaaggacgaacgagagaggaccaccgactgccttactcaagatagcattgtaagactcgatagactccttccgccagttatccctctgaagtaacctgaacgtcgcgttgaggaatcttctgatgagcatgtaatacttgtccatcctgtgtatttcgtgcccatcggaatcgattgaatatgtatatagaaacaaaatcatcattcacccttgtccacggaaaaaaaccttgcatagcaaggaagagaaaagagagagaaaggcaaaacgaacctcaatcggtcgatcccgctccattctctgacgatactatcccagaacccgccgacaaattccaacgcagccagcgtcctttcgcccatgttttcgcaccctttcgggtcgatcaagagaatcaagtctgatagctcggttgccaatgcctgttggaccaacggcttgtccgacatccagaagcctacaggacgtttgaaatcaaagagaagaagagcattctcaaaaacccttccgactcaaagtcttctgtgcagagagccaaacgggggacttacagtagaacaaccctttccagagcttcttcatctccaaatcacttccgagtcgaccaccgcctccttcgacatcctccgcatcatttctactcaagaagccggcgagctttcggatggctttgtctcgcacggatttgtctgaattatgtacgaccaggaccagagtagcacagacgagagcgtcagaatacaagacctctctgaaaatcacactgaccaaagaaggaaggagagcagtagcgttcccataaagggttgccaacgacgccagaggatggacgtaccggtcgaagcgaggtatttccctaaaggaggagccgccgacggctcgacgggcctcatcctctcaagctttgcttttgatactttcggcatagtgtcgcgactcttgtctgggctgtccaagggatctatgtctcgtccggagtcgctgttgatgtctggggtttccaaaattgggcagcaagtaagaaagccaaagagcaggaagcaagtaaaatgttcaccttaggtaaaagccaggattgccggttaactaagatatttgaaacatatctgaattgctcacgtgcccgccttcccacgtttaaaaatagatcagttccattttgggacggtcattttctcgtccgcctgctgtttcgcccgtcgtccgttcgatcagctcgcattcattcatccactcgcccgtcgctcgaccgatgtcggtaccatctgatgcgcccacagcgcttgagggaagcaagcactcttcttcatactcttatcctgctgctgctgaaacagatgaaggccggccaggcgacaagactgacacgcagtgcaagaacgatgatgatagccagaacggctcagacggggatgatgacctttctgatgacgagaaatcgaaagcagctcgtgttctccaaaagaactatcgaggccatcaagctcgatctcaggcagtgtatggtttggtttatctttcgtctttttcttgtgccaaacgacagcacatgcggcagaagagaagataagattgccagggttgactggagatctctgttggtttcgtatccgcttatcggaaccggaaacatccgtgtgaacagatcctcgaaagccagatgggatcaactgctctcagactctcaagccgtccatgatgagaaaggcgcccaagatggacaggtatcatcttccttgtttaaattttcttctcttgctttctccataaatccctcttattgatttctcttgttaaatcgctcataaaatggatgtaaatctatccggatgtaatccacagaacgacgctggatcgaggtggcaccgggcgcttcacgcatcatccaagataacaaacggtcatggcaccgaagccaatgatgaaggatccggaggccaggatgaagaggttggcgaagagtatgtctagcccggaaagagactagaccgagccgaccaggagttctatcatttaacacttcattttcccttattgggcgcgacgagaaaagaaagaaggcaaagactttacccatcaaagacaagaacctcgaagagtaacatgtttttttttctattatccggttcagatgtatattcaacgtgttattgaatcaaacacctcatccttcttcttatttgggcagatcctactggctagagatggtcgatggtagacatcgctatggcgcaaatctcaaggtggggattacaggcctttctttcttttcctttttcattattgtcattattttagcaatagtatgtatgactcgttgctgaccagctgaggtatggggatgatacggtcagtactaccatgctaaatgggaagaggccgacacgaccgggagtttcttccgttggctcgaccacggagcaggcaagaaggaggatttacctgaatgcccgagaagccaactcgagaaggaacgcgttcagtatgtctctcttccacatcattttggttgactattcgagatccgttgatcgactttctcgtggtactcctctcggacgaacccatagataccttaacatggaacagcgtctgaactatctatgccgggtcgaccgaaagacaggcaaactatactggcatgtgcgaggagaaccagtggatactaggtccgtttcgttcaagatcagacgattaccaagtcatcgtaacacaattgtcttctctatcctccttcttgacgaaaaactcttttcttttctttttcttcttttcgtaatccctcgattcacctacgtaaactagtccgaacacatgggaagacagaggagacggccaggggatcgtccgtcgggaagagcccgactcggatgctcgaccttcaagcccgtccggatcttcttcttcctcattgttcgaccactcggcatcctcgtcagactcttcgttggaggaaaacgaagcgacccattacgcgggagccgccaacgaggatacaggtgggatcaaaggcagatggaagaaactcacaaacatgttctcgaccaagggcgtgggcgaacggatgttgaggaagaccgtcaagaagaacacttggatctttgtggctgatgtggattatcatcgttcgtccggatgaaattttatttagtttaacttttggtcgcgtttcttgagacaagtacgagctgattctgttttaatatttatctttctctctctctctctatcttttcgtctctttgtcaatctgcttccttgtcaagtgtttgtcgggcttaaaaagacagggacgttccaacattcatctttcttgggcggcggaagagtcacggccgcagggttgatcgtcgtcaagaatggtctgatcaaatcgctcagtccactatcaggtcattacaaaacatcgatcgatgtgagcgactttctctttccctccttcttttttttctcttgacttgttttcgagaactttcgtcgtataaggtggagactgattcacaagataaccggcgcgggtgatgacgatcaacgaatcataaaaatgaatgaaaaaagcactacaagacgttcctaaggcaactcgaagaccaaggggccgacctaagtaaggtcaaagtgacaggcgcagagatggtgcgtttcttctctttgtctttacatttctttgtctcagaaataatgttctaaaagggacgttctgagattgacgattgattctgggaacatcttttcccccttggtggatcatcgatacagactcttctagggtgtgtcgttgtttgttctgaatattgcacgaataaaacacaagactcaatattttatatatatatattttctttttttttcgtttttcgtcgtttcctttgatctcttctgttctcttttggatctggcacgactccaaccggaacggtagactcgagaaatacggcaagttttcgaagaagcgcaagtcgctcacccacaagatctttcaccctcaggcgcacaaggaggaggctgccgaggaagaatacgagcatgcctcgccttctgaacgagagaaactcgatggtcacgatcggaacccacagtctgatggacaagcaggcgaaggaggaggacgcgatcagggtaagaaaggagcgcagggaggaagggatgagttcatgcgagttttattgatgggtaggaagaagcaggatgaaccgtcggccacgaacggacacgggcacagaccctcaaaggacaccatggaggcggagaacggggacaaagtcgaaacagtacactcggtcaatgacaaggacaaggacgagaaagatcaatcccgtacaaccccaccaacacaggaacagcaacatgcatccgcgcctccttctgagtctaccccgactccgaagaccaccttgacggattcctacccgacgtcaggtctggagaacttgagtttagggacccctatcttgtgaacttgatgtttcccttttcgtcaccctttttttctctcttgcgtgtgtggacgtttttttttttttaatcgagccttcatactattcgaatttttctagtgacgcctcgacgttcttgcactcttcctatgctcatgagttccttttttgcctttccgagatcaacaaacgaaccaacgaacgaacgaaagctccctgttgacccgtttgaattgattcgaggtcaatcaagttggagtgttcacactaagagatgattcatagatctgttttgtgttcaaatttatttttcattgatatgaaaatcaagcgaaaacgagtggaaagagacgcgaaaggaaggcatctcgtttcatgagaccactctcgacgccagacctaacggacgagggagaataaggtctcttttgtgaggttgtagaagaaggatgtaggagaagggcaggagatgtcgtgaaagaaaggacgtataggtcgtgaggaatgaataaataaatagacaaacaacgtgctcggtcgacgagacttttaagggcaagggaggggatgaagaaggctacaaaggttgtattgcatggaacgagagattcgaaaggatgaacaaaaagtaaaataaaaaaataaaaaaaataaaaaaagagaaagaaaaatcatatggaagaagtggagattgcggagagggtagggcatggagtgagcatgaagaggaacagtccatcaaggacaagtccgttcagacgaccagcgtctgcaagtgggggaggaaaccaggtaggagcgaatgtggaggggacggaggcatagagtttatatgcaaaccgtttaagcccaggtccaggtgacgtcgacctcaccctcggactcgatagcgatggcggtgaaggcgccgacggaaagatcgatggagtaggtcgaggtgcacgacgggcagaggtcggcgacgacggcagagaccgaggcaccatcagaagttcggacgatgttgatggtctttccacaggtctgaagagggaatgaaagttagggttagtgttgatgaacactttgagacctggctgaggaatgagagaaatgagtgagaacatacggaggaagcctcgctatcactggttccccagatagcgtagggaacggcgacgatgtagtcgctatcggagtgaacggttccacaggcgccggcgttaccaccctaaggaaaggagaaagagagaaacaaaagagaagtcaaaggtgagcgcgagtccaagacaaacacaagaaaggaatcagagacaaacctgggtgaagtaggtagcgtgtccagagtaggaatccgaggaagaagcggcggtggaagtggcagcggcggcggccgaggtggtggtggaagtggcagcggcggcggccgaggtggtggtggtagcggcagcggaaccagaggcagagctgacggcagacgacacggcctggttgtggttgctccaatcttggtggtgtcgggcaggcgcggcctggacgagggtgaggcaggtagccaagagagcgacgggagcgaaggcaagcataatgggaatgatggagtgggtgagtgagagagtgggtaagtgagtgagtgagagagtgagtggagttgaagatcaagaagcgaagactctaaagagatggacagaaaagactgatgaagaaagaagaaaacccaaaggaacagcgctccctgttgttcttcttatgcgattcgacaagacgacccgatcacgatctccctgtctgtttgggatacggaagaacgtgaaagctctggaagaaaaaagagggtgagtttggaaacgaacaaaaaacccatcgttcgtatttttttaggggagtgttgaacgagcggatgaccaaagaacccaagtggcccctcgttctcgtccgtctggcctgaggcgtgatcacaccgaggttgggcggggaggaggtgaggaagtaaggtttattttgggtgcctgggtgcctgggtgccttgcctatcctgcctgtcctgcccatctgggctcgtctaggctcgtcacctgtccgtccactgggctgacgatggcatcaagatcacctccgcccatcaggaacaaaagcgatgaggaacggggataattaagaaaaaggggttgagcctacgttttggggaacgcctgcggtcggagcagccagacacacagtctaggccccggccttgttcccttgctttcgtgcgcaagccggaggcgactatcaacgaccaccacattttgagccgaggcggtggtcggtatgccggtcaattgccggccggtcaaggaaaaaaagggggggggagagagagtgagtaaccagcaaacggactgcgtcccgctagacacaatccaacttcgcagaagctcggacatgacccgttccagacccttggtctaggcctggccggttctctaggttcacaactcggagagtagactctgttcgggatgttgccatcggtgatcatggtcatgatctccgtgcctgagcacgcttttcggtaacttggtcgccctggctacgctccccactacaccgggcacagtcacggatgcccaggcaaagaccgacaacgatcttatccggatgacatagagaacagaagagcaagctctatgttagatggtcggtccgacacatgggccacacccgtacaccatcagcacactcgcgcccacattggtatacagcgcacacacctacatacactcgctcatcaccgtgtcgctctcagatctccctacacgatgtttctctcggttgggtgtgatgactaggttgatgtcagggatgtaacccggatgaaacatagttcgtaagctggttcttacggacctcccacttccagcgcatcgtacttccagcccatcgtgctacaatgttcatagggtctgaggaacatgtataagacaggtattctcgaccacttgtagataggagatctcaatcttggatcctttgtcactcgtactcctttccttccttgtctccttgtccttttcttgtccccttatcattgtccttgctcccttgtcgttgttctctagtgatttcatcgatccttcttcccagctcaaagagcctgaactttcttgtttggaacctaaaattccttgtgtggttactactttgtagccggtctgttacgaacccagctccaactcccggctcttacggttaaggttttaattcttttttctttctttttttttccaaactttttgcttggaaatctgctgcgcgcctcggtactcgccatcaacaacatcccatcgcgtcccgatagtctgatcgtctcgctcgacaccgatagaccatcagctaggaaggaagtaaaggaaaggaaagggaaggaaaggcaaacatcgactccaatccggctcgcagtagagaaagcgtgcttgatcgtatcatagatctctcctcttagagattctgctctctctccttcctcacacttcaagcttctctttctcctcgttctctccctcttctcggtttggtctccttgggccgtcgcaatgagctcgaaatcatcaatcaaccccaattggccgtcatatgcttgtacggccaccatctgtctcgccgtcctcggcgctctcatgaggtactttgtcatcggtacgtcttacccaacgttctcgtttgtgtgcccgtgctcatgctgaatatcaaagtcatactcgctcactcccttttcgcttcggacgccatcagactacgccgataaggatcattgcaaagctcttctcaacaccggtcgctggatggactctgattttggactctggcagcccgaaggttcgtccattcagtcttcacttgttctgtgttgccgagcgccttcactcacattcttgttctgtcatatccctttatggccctttgaactctgctatgatccttcatgttccgtttcttcttcttacctcattcaatcatcttcaccctcatatccttctccgtctcgttctatggacgaaaacttgtttctccaggttgcatgacagctaattacaacgcacctttgattaaacaatgcgcgcaatcccggcggatcgtctttatcggcgattcggtcactaggcagttgttctacgccatggcaaagtccagtgactccggagtaccggacgaaccaaaagactcagaagaaaagcacaaagacgtctctttacactcacgaccgcacggttcgtttctttaccttttttttcactttcactttctcttccttcacctccgtctcttcgccctgatccttatgctcgacggcccgactaacgatctttttgatatctctgtccctcgacgatctgaaactctacagacataacctttgatttttattgggatccgtgcgcatcttctctctgttttcttctcttcctcgtcgacgccattcctgtatcgtgcagcgcgccacatatacacatatacacacacacacacatagatagaaatctgatcaaacattttcttttctacttcttggcaggttcttaaactcttctcacacccagacgttgctgtctactccccacaccgtcgtcccgacttatacaccttcccatcctcccccgcccgcgctcctcgtgctcggctctggcctctggtacctccgaaacccctcttctggcggcctggccggctgggaatccaggatcgatcaagtgtttggtatgatctcttccagcagagctcatggcccaaactccctgttggcagacgaaattgtgtttttacctgtccagatgccggtcgtctcgaaactatcacctagtcgggcagagaatctgctgccctcggatatcgacacaatgaattctgacctcgctgtcaggctatcgccttcgtccactttcatgtttcatccgacctctcctaaacaccctccgtcttcctcctcctcctcctcctc

SEQ ID NO: 1014 - DNA, 23508 bp, Xanthophyllomyces dendrorhous
tcctcctcctcctcctcctcctcctcctccacagtcaaagacagagggccccttccaccaatctctcttccacttgccttcaactcgatcctcgctccgtctcagacgaccgacggccttcacttttccccaaaaatcctcaagacccaaatcaacctgctatggaatctgaggtgcaacgacgtcgtctccaaaaagtttcccatggacaagacgtgttgcaaacgatatccatccgtcggttggcttcaggggttgactttgcttctggtcgtcggtgccgtgccgtttttgaaattcctcaaaggtagattaggtcagtccaattttcttgcgccaataccccatccctttagctttgaatgaatgccttttccagtaaccttactaccgcccctgttcatcttgctaggccacaaattcaccatcaatgtcctcccaacaaacgagacgaccgtcctcaccttgacggtcttcgggctctgtgttggcctgtcattcctagcggacagaacgccattgtggaacaaagagaacaaatcgttcagcgcgatcgagttcgcgctcgcctgtctggcaaccgccgtcggtggcgtcctcaccgcacagaggagcgaaggaggaaaagatctcggctttttgaacagagagcaaaccgatgaatggaagggttggatgcagagtttgtcctctttccttactttcttgaccggtcaactttacgaagaacactgaatattgatgatttaatttgaataaaataaaataaaccaccttgttctcaatcgtagtcttgattctgatctatcactacctcggagcttcgaagacctctggaatctacaacccaatcagagttctcgtcgcttgctacttgttcatgactggttgtatgtctctatccttccttcttccttttctcttgtttcttttgattgcaagttatttttttgcctgacaaaccgctaatgattatttcatttcaactctggccattcattctccttcttactcgtgcgcgaatcaaccatccacccaacatagatggtcatttcacctactattacaaaaaggccgagtttggaattgaccggatcgcgatggttatggtccggttgaaccttcttccgatcgtcttggcttatgtgatggacacagattacatctcgtactacttttcggttggtcttcttctctttatgcctgtaccaagcagaaaaggctcagattgactcactctggtttgatgttcgttttttttttcttttttctctaatttcgcatttcagcctctggtgtcgttctggtacttgatcatctacgtcaccatgtatattggaaacaagtacaacaccgtgcccgcgttccttcttccgaagcttgcgctctctgcattcgttatcacgttgttgatgaaatcagatgatgtacttcgcgtaatcttttccttccttgccaccgtgttcaacatccaatggtccccgactgaatgggccttccgagtcaatcttgacatctggatcgtctatatcggcatgctcaccgcctggggttacatcaagttgaaagagctcggaatccctcaaaaggtctggtggcctacggcagtcaaagcatcggtcggcctgagcgtgctctctctcggttggttcttctggttcgaactttcccaaccgacaaagttttcgtacaacctttcccacccgtatgtgtcgatggtcccggtcctagctttcgtcatccttcgaaacgcgacgccgttcctccggtcggtctcgtcctcggcgtactgctttgtcggtcagatctcgcttgagacgttcattctgcagtaccatctctggctagcgggtgacaccaaagggatcctcatggtccttcctggcgggttgaactggcgactgctgaacgtcgcgatcactaccgtcatctttatctttgtctccaataaagtcagcaaagctaccggcgtcctgaccgaggtcctcgtcggcaaaaagaagaagcctagaggattgcctactcctgctaccgctgccaataccatcgaaaatgccgacaatgccgtccccaacggtgctacgtccaacccgacctcgggtcaggccccagcggaagattctatcccgctccttggcatgggatcttctacagatgaacccgagagttctccagcgatggacgacgtagtcggcgctcgtcaaccttcctctttgcccgaacgattgtatcagcgttccggcctgcaacgagtcgtcgacggtcaggcctggagggagaaacttgagaaccactcaggttggaagttggtggctctcatgatggtctgttgggcgttgaacctggccagtccaaggccttgatcggatggggggtttgtatgtaaatttgaacgtgtgatcttcaaagtagagcaaaggggtggaggaggagaggttcttattttgtcgcattgctttctttttctttttctcctttctcttcctatcatctctccaaacccgttttacaacatctacatcatctatatcgtctacaacatctacatcatcatctatctgggtctcttttgattttcttatattttcatccttgtttctcggtctcctctgttagtggtctcccaattttcaaccacgttatctcacacgttgttccctgtgaaacgcgtctatgagtcaacaggcaagatcaagtgtcgatgagataatcgtcggttaatttacatcaggaagttgagcgatcacattctgactcgacgatgaatactatcttccatctctcttctatataaaacaacgagtttcttctcttatcctcttccgctcttatctctctacctcgtacacatcgcttctgaaagtcgagaagaacacgaagccgcaagcaaggatgtacaaaaacacatacacaccaccaatacccgccgagatcccctcggacactcacgcaaagacacctaaggaggaatatgatttcaactatgccctgctcactcagcccatccaagtattggaagggccaggtagagatgtcagacttgagccttttgttgtgcgttctcatatatatgtttcttttctgtgaagaacgaactgtgcgacttgcgtcgaattctgatttgtttcttgggatcttctgtacgaacatttcagccgagcatctacgccgagaaactatacataggagcgaaggatcatccggagctagtcagatatttgcctttcgacctctggcagtctgtagacgatgtaaacatcttcctcgaagagttctttcgacgtgagcaggtaagtccaatctatcccctcccccatgcttccctcgtccgggtccgtcatccatcttgctcaagctttgactgatgatcttcgttgtttcattatatctactttcccggttgctttgggtttccaagtcgaggttgctctacgccatcattgataaaaagacggaaacgttcgcagggatgatcagctggattaactccagcccgatagatctcacgagcgagatcggctttgtctttatgtttgtccttcgttcttcaccttcttctcctttgctctcccatcggaaggttttagtttgtttcactgatcagcctgactcgatcttgatacttacgcgcacgtgcgcatagtcttccccccgcgcagaggacccatgtgttgacacactcagtgtcgttgttactcgaacatggattcaatctgccctccgatggtggactcggtctgagacgaatccaatggcaaggtttgtacccatccttctttttcttttgttcctttcttggtctgcttgttcttggcagaacgtatgttgacttctccttctggacattcctgaagcaaacgagctcaacttaccctccacgaaagccgcgctccgactcggattcgtcctcgaatcacccatccgtatccgacttcaacgaacggtcaagccaggaaaagaaggatcacattccggtcggcagggcgatgggctatacgaggctggtagaatgtcgagaaacacaaacatcctttcgctcacttatatagattggctcgaggacggcaagagagagcacgtgcagagtttggtggagagaaagccaaaggcttagagttctagaatgggaatggccgaagacatagacgaatttggctgtcttgacatacttttctttttccaacaaggattactgcacagtttgatcttcattcacttttgatagacatgattggcttgggatctccttatgccattctctctgtcaaggatcgcgaaggaaagagcgcaggaaacgatggacagagaggctcaagcctgacaacaagagaacagaagaagacgaaagactgaagaaacaaacatatattcgaaagctatccgggcgtcttcccaccaggcgttctctcactaggcgtctttcctccacccggtgtctttcctccaccagacccaccgatcggtgtggctccacctgttcctatactcgtgcccgtctttcgtttcttcctaggttttcccgtactcccgccgccttccatcggacttgtcccgtccccaatcccaccagtgttcccgttcgagttcccggtcaaacttccgaaggacgatcggttggtaggcggcggagtcggtcccatccctccgggcgtgtttgttctggaatttgcccctgttgcaccggagagaggcgatccgttcccgtacatcctcgagttcccacctggtcctccccctccgcctgccgacgaggacggaggttgggatgattgcgatcgtccgagacggaaggaattcgctaacgagccggggtgtcgtgagggatcatactttggaggaacgggcgaggtcgtcgagagggctgtcatctctggaagagagttcagcgtcgtccgaagagctagaaacggtaggtaggatgatcctccggatgttgccgccgttgtggccgtcgtcgagagaggtttcggatcgatcccctgcgctgtttcctgcccattaggtttcgcagactcagataagctttcttcgatcggaggaataggtggtgatgtgatctttgctggaatgataggagcttcaaatcgagggttgaatggcgcggctgacgtcaattcagatcggactgtatccaaggatgtttggattgatcggatggatgagttctagtcaaaggttgaacatagggattgggatttagttgttgatgaaccagcgcgcatacgagagagaaagaacaaatttgaggttccctaggtggagcaaagacaacggagagtgtgcgcagaagaagacttacgagacgggaggatagtaaagaatgtaaggactgagcgagatacaccgcgttattgacgatatagtatgccgccagaagatgagctgttcataacgtatcccccgcacccccgaaacagaggcagaacacaaggcgttaattgttggattctatctatcgtgaatcttcagaagacaaacagactttggtcgggattgagtctctctcgtttatggatgacaaataacgaaggcggtctcgcatgaacgagcgcgaattctatgccggtgaatctcctgatcggttcgagatgaaaacccccaagggagttggaccaagaggtcatttagaatgtcgaacggtcctctacaaaggcaagaaaagaaggcggatgaagcaacactaggaagataggacgtaccgaagttcttcctcctcgttctctacagtctctcctgtatgaagcgtctgcatcttgaggacttgattcgaagattgtctatcgaaaaacggggaatgcgagaaataatccaatctgtgatgaattcccaagacaaagagagccacgcacaatagcgagccaggttccggttagaaccttggtcaggaggcatgaagatggatgaaggcatacacgtttcgctcattcaacggtcctacagcctatcaggcccatcatcaaatccatccgcccaccccagtaccaagcccaacccgagtaccagatgaagataaagaaaaggttatgtcagtttcgatgtatctcccaaatgttcaattttctaccaaataccacgccatccgtctctaccctattctcatcaactcatcaacacatacaacgccttcacgggttgtttctgacagtctgtcaactcgtctatatagagaaaagagagggggcagaagaacgcacctcaatgtattctgggtagacgaataccgttcggttgaggtccggagcatttttggctgaagacgaaggatctaagttcgatggatgttccatcactttggttgtatattttctttctatatgcctttcaaccgtttgcggctttaatataatcctgtcttgaagaaccaaaagacacttaaaacagagtgatggcgtacgaagagggatgaaattcggaaatcgggatggaggcaagggtttggaactgcacggttcagaaacccaacgcgaaagtggaggtcgctcttcgtatggtcgaccgactgatcatcagcccatacttctctcttccttcttcttcttaccgcccaccgggatattgaaaggatgtttgtcttgataggatatctgttacatcaattcaatttaacgttttgatatctggggtaggtacataaactatgagagaaacagccgtccgatgtattctattctttcgtgatataagatgaatagatgaaaaggacaaaggccgaaaagaatgaagatggaagaaaagaagaagtcccaagagataaagaatagagagcaaaggtgtgatggtgatgaaagatgtggatagatggagacaaagaacaaccggatctctgagtgatctagaacggatgcaagcgactaatcacaatgacgaacaagacattcacaactctacttcttctcgctgtccaagggctttcgaacgacgtagaacctgaggtagaacggaatagttcatgaattcgttagtactcgaaaaggatgaagaacaaaagaatagcgacaaagaagcgaggtcgacgtacatcattggagtgaagatcttttgctgaccacccttgaccaaggcggctcctgccattcgaagagtctctccgacctcgaacgttcccttggggacaagtccgaacttctccaaagcccagacagcgttgtgagtgatgacctggccgatcttgctcgttcggaacacggtaaggtaatcgtagactgtctgtgcctttcggaagtctccctcgagggggtagtaccagggaacgatgtcttctcgctcggccagatcttcgtgttggacgactacaggtcaaacgaaatggagattagcgcccgttctgtgtcttcaagtatgttgtacaaaagggcttactctcgaaaccaacagagaggaaagcatcgtgggcagccttggcgggcctcatctctgcgattccgtctccgacctggtgatccacagatgtgtcgacagaatcaaagttattagcgcgccgatcgatcagaagattaagaaaatcttggacgaacctcaatctcgtgctgaatctttctgtgctcaggattagaagggtcccagttttcggtctgaaaggaagaacagtcgaccgattaggacggagatgatgaggaagacaagagaagtatatgacgaagacgtaccatgacccactcgtagattccagcaattcctcctggcttgagaaccttgtagatctcctcgtagataccttcgaatgtaggggcgtggcaggtggcttcgatagcgtacactagatgtagggagaagcgtatgagctatgagcacagaccaaccgtcgagacatcaaaagaagacggaccagcatcgaacgcgttttctccaaactgctcggaaagggacatgaagtcacccttagcgtagtcaaccaagtgagagagaccggccttctgagtgtattttcgagctcgtgcgatttggctatgggagacattttggagtgagaatcagagttaggaagaaagtgtgtaaggcagacgtgaaagataggcgcaaggggtgaggagacgtagaggatactcacaaatcattgttgttcacaccggtgattctggttgtgtgtttgtacataaagaatatcagataagtctccagttcggtcaagagacagagagttcatgttacgaaccgggcatcagaaaatcgagcaatctctcgagcgggtccaccgactccgcaaccgacgtcgaggaccttcattccgggtcggagacccatctgggaggcgaggtagtgctcgtgtcgagcaagctaaaggaatttcaaggttttgaaaggaagagtaagagagaattcaaacagatggttgagatgattcctcgagctgcgacaaaaagatagaggcacatacggaagcttggaaagcttctccggggtagaaccgggaaaagtggaaggattgggcccaaccatactcgtagagctcggtcgctccgtcgtagtactaaacgaagaaggcaagaggagaaaaagaatcagaggcgcgtcagacagaggagaacaagagtcaaggaaggaagattagaacaaagagggacttacaccttgatattggagaaacaaaatgagaatcgagcgcgatgagatgttttgttttgttttgtttgttttgttttgttttcgatgaagtttgtttgatataggaagaaaagaaagatgtcagaaaatgatgagcagacgccagatcggagagaacaagggcaaggaagagtacggaccgttgacgacgtcggtgtagttagacagtcgattgtccatgtcaacctttccgtccttctgagaatctttctgccagaagtttgtgtagttttccaaccggttggactctcttccatcggcgtgcttaacattgtccttgacgaccattctagatatctatgctgtagatctgggagggagagagggagtaggcgaaggggtaatatagagaacgagagagcgtgtgagatgggagaaagaaagaaggagcgaacggaggaagtattaaaaaggaaaggaaggaaataaaaaagaagaagcaaagaaaatcgaacgagacggctgatgtcgaacgactttgtcggatggacgtgtgtgcctgggcacgtgcctgggtgttcgtgtgcctgtttgagtgcctgcccgggtgcctgagcccagatcggggcctccgaccccagatacgtggtatcactcggagccttgaccccacacagcacccacatcaccccaaatacgtcccaaataccgaccccgtctatcacgacacgcccacaccgcccaccaacgtctgcacagccaaacaggcacaagactcttgcagtccgtgcgcttttcgtaccttcttttccatctcagtcttcctactccctagctcttgcctcgttgaccatcgaaccggacaaaggtaagtcggatgggaggaagatgaacgacgagcacgactatcacatagaacgatgcagtacatcgtacttgaggaactactgatcagagtaatgtactcaagacaaacggactggattgactgactggatgatctgtctcaacatgttcaatcgcagaccttgtctttcagcccgttcgtacgaccttccttcgttccacccagtcttccaacctggtgagtctctcagaacaatctgctggaccgtagatctattggaaattcgatggacgtacttgcactcttcattctaatccctgttcatatcacggcagtcgtttcgaccacacagtctagtacccatccttcgctcgttccgtcagggtcgcttccccatgcccgtcctcgtcggttcttcccctacggccacttcgacgaattctccctatcaacttggtcgcccgtcctcctctcattctccgacatctccacatttgattcctaggagacgacgctctcttgactcagtctctgtcctccgtttggacgcctcggccgatgaccctcagtctgggttcgacggactcgccgatgaggaggacccagagtgggtcaaagtggacggcgtgagacatgtggaattagagcttgatcctacgtaggtcaccactccttccttgccttctcttcgtttctctctctcaagcatcttttcgtctctcttcctttctcttcttctgctgtctcgacaccttcttcgtgtctgttgttagccaatatcaaacagaggtgtttgcaagaaaagtactcaagatgctccaatccctccgaatccctcactggtcgtcaatccatctatctgcacaaaacctcaagatacataaagttaccggtagcatgacaaacgccgtgttcttcgtgtccttccagcccaacccaggaagcacctacttttccaggcaaccaaccctttcctcagatccctcccttacgggtagcagcagtccctcgaccgcagggatcggccttctcagcctgagtgaatctccagctcctatgacggatactcctttggataaatctgaagcgcccaccctagtaggttctttacttctatgtatgtctcctcttttctagctacagtctctatcttactattcctctctctttacttcttttctcttcggactagcttcttcgagtctacggatccgcctcatcaacattcatctctcgaccacgagaacttcgagttcttcatttgctctcttcagtttacgaccttgggccagccctccggggaactttcaccaacggccggatcgaggagttcttccaatccagagcgctcaccgctagtgaactccgagacccaaaaatctctggatggattggtcgacggatggccgaactccactctgcagacctagacttgctgtctcccgtccagccgggtgagagaagagaaccagagatgttgaccagtctaagagaatggatcacacccgctaggattctcatggctgatctcgcccatgcccagtcgataggcgctctggcaggtactaatttaaacaactttgttgaggcatttgctttggatacgtttgagctcgagatcagaaagtatctcgagtggctcgcaaagtgggaacgaggtgaaatcggtcagatgggaaggccctggcgaatggtcttcgctcgtatgttgatcctttcttcttatccttcttcacttgttctgtaactgactcacatgcatgtacacactctgatagataacgacactcagtatgggaacctgctccttctgtctaacccgccaccaccaccccagccagcgcacaccgccctgatcgtagtcgactttgaatacgccgcgcccaacccgctgacacatgatattgcgaaccatttctgtgaatggagagcgaactaccaccactcaaccttaccacactccctctccgctcactcgccctacccgacgaaagccgaacgatggaacttttacaaatcttatctagccgtagcaagaggaagggaagttaaggacgaacaggagttagaagaattagatatgggtgtcaaagcttggagtccaggaggtagcgcgacttgggcgctttggggaatcgttagtgctaaagcacaggtggacgcattgaagagcatggacccatcgttcataccagatttcgagtatctcgtgagttttggttcatcgaccattcctttcaaaccgtttcgtttctttggaaactcttctttgtcttttagtgctgacaaccgaggtttgacctgggattatagttgtacgcatcagaacgagttcagatgttcagacaagagatcaaagatcttggaatcatatagaaatcgaactttctcaagtactcttcctgagctttgttcttctctttttctatacatttatatcctttccgtatcacaacacaagataggaagacagaaatacggagttctttcagctcatcctttttttaacccgatttcagttcggttttccttcatcccttcgttttcgatcttgttctttgttttcggattccatgtttgtatatgtgtaaaccattccaagcagagttcgcttgctttcgccagtttctgctttttttctcatccgtatcaaggatgtcttgaccggccaatttaaagtgggagagacagaaaagagaaaaaccccctcagtgttgaagacgattatccgagagacagacagcatggaaaatgcatccggccagcaggtcgttcgtgttcatatcattatatttaaatattcagaagggactataaactagactaaacggaagtgtatagagaacaagaaacacaaccggagtaggaaggaagaagatggtcagaaaaatcattaagatagatacaaatggatctcttgtaatcaattttggatctgcaaccccttcccctatacaaagggaatagtttcctgataggttgccgtttgagcagaaatagaaacggggaaaggccgatgaactctaggccagaagggaagaacaaaaagatatatgtcgagtatgaaacctctttatcgtatttaccccttacgtctggtaaaaacaagggaagcgtaaggatggagaatgccctattttatatttttgattcgaatatacagtcatctggataaaccccacaggaaagaataccaaaacatacagttagctacctgtcatcgtgtttggaaaagaggataagaatcgaacgaacagatgatcatctctgccatagagtcttccaaccccattgctccaacgcttgtactccttctttcccggccccagctccaataacagcccaaggcacagtcgagtaaattttctgaaccgggtcatcacattcctcggcattcggatcgacagaaatgtacttgacgttcgccggattcgatttcgcttccagattcgaagtcgaaatagaagtgtgctcgatccattctacctcctccttttcgggtgtctcttcccactcatcttcctccacagatggagcaaccgtagacgaggacgaggatgatgaaggaagggaagaaaaagaataggatggactggcgctgggtttcacgttgatggcggcgtaggtttcagtcgatacgtaagccggtgcagaggatcgacgaaagatcgcctgaaggcagggatgagggttgggttcttgagccgtcggctgggtttcatgaaatagtagaaacccaagatgtctaggtgagaaaagcctcatatactcagacgatgaaaagaaagaagggacatacaaacaaaaacctcaacggtttttttgcatcacttcggcctcttcctcgagtttcattctcgtaatatctgtcgacgtcctcagcccaatcaaatgaacgggcatccgaagaaacggtcctgatacggacgataggcagtgcagagtccactgatctcgagtacgagataattgaagacgaaggaaagcttgtggagaacatggtggatgggttggagttagttatggggaaggcgaaagaggagcgatttatgttcagagatgaatcagatggctcgatggagtttatgtgttattgatggagaagaagaagacagccagtcgagatgaggtgagaacagagatcaagcgaaaagaagagtgagcagggaatcaagctagaagattagttctttatattgctagtcagtttgctctggggaccaagaacagggggcaaaaggtgaatcgaggagtcatgatgactcgaaaattgaaaaaacagaggtccctaacacaacgtggcaccccaataggaagaacggtggtagtgagaaaagaggcaatagatcgtctgagaagcggacggaaggtgagcgatgtagcaagatccgtccctccgttcgtccccgttagcaactcctccgtcagtcatccgacgaatgacgtgctattggatgaatgatgatacggcaagcaagacagctaataaagctcaagaactgagcatctgttgcgttataccatgctgtctttcttcttcttcttagagacattcagcctagcaaacagaagaggatgggcaagggcaaacacggaggcatggccttgatagtccgttgggaagtcctgaaaaacgattggggtttgcacaagacttcgccgtaaatgcggtgcaacccgaggatagacataacctctgctatcaactgcctgtgagtacatcagtaggtccgagttgaaggaagaaagagatcgagaagagctggttagaacactttccatcgcaaacctaagaacgacgctcatagagtggacagtgcagaggtgatgcatcagagttagtcatcatgggggtcatcagcttaaacaagggtagcatagtctctattggagacaattctctagacacattcattggtttcagcccaacgctagatagaatgtcagcaaataaacaagtcaagtcaaagtatgtatgtcgtcgtgatgatatgggctgaagattgaatggtctgaatgatgaacacttgctcatcggcccatcccgattagcttccgtgtttctcttagaacagccatcatctccttcattctcccttcaaactcttcgagcttgtcaaatttcacttgataccaacccgcattctgaaggaacaatcagccggtatctctcttctctattctcggcccgtccaccgggcttatgttgaatgactcggcgtgatccgatcgagatgacctacttgcaacccccggacaacgtgaacgacactcgacccgctgatggcgaggctgaaaccgaacggttgatcacgtcttcttcttcgacttcctctttgttggaccatgaggactcacagctcacatgttcgtgctgtttcgagcatctattactcattctcgagcagtcgagctaatgtataattatccgacgattgattacgatagatactacgcctaaatggagggttataacctcgttctttctctttggagtgatcaacaatgtgctctacgtatgtagagtcctcttaagctctggatttgttatactagataaggaatcgtccaaattgcttaccgaccttccgttaaacacgaaatcaatgtctcaaaaaggtcatcatcttgtctgccgctctagatcttgttccgtcaacgactcccaaggtgagtacaccatgttttcgcgttgtcttctctcatgtatgatctttcggggactaagactgcattcattcgttcatccggcgtgctcaatgaaagggagtggtcctcttcttcaacatatttcccgctttgctcgctaaagttctctatccatatattctcaccggtccggtcatctattccctccgcgttctctcatgcctactcctatcggtcaccggcatccttctcgtggcatttttaccatctctcccactgcacctccttggcatctctctagcctccttctcctccggactaggagaattgacatatctccaactttctacatcttataaagacaaatggagcctaggcgcgttcgctagtgggacaggaggagcaggaatcctaggcgcaggcttgtggtggctcgtcaaaggatggggcgttcgaaaaggattgggatcgatgagtgtcttgccggtcattatggcggtcgcctattgggggatcctaaagagtggacgaaaagataacagtaggaaggaggatcctttgagggatgtacagctaggtaatgcgccggtcggcttgtcaataagagacaaatggatacttgctagaccgttgatcggaaggttcatgtgtccgttgttctttgtgtacttgttcgagtaagtgtcagctcacttcttctttgttacctccggccagccgatcttttcctctgattttgtgattatcgagcggtcgagctggcgttgttgtgcttctttggtctaaacctcgtctctctctttctcgaagatacactataaaccaagggatctctcccaccttactctatccactccctgctccgtttcctctgacctcccttctcccaagcccacgggacttttatccactttaccaactaacctaccagacctttgtcttcctctcacgttcatcccatatccttaacgtcccaccaattcctatccgcttcctctctgtaccctctatccttcaaggcttggtcctcatggtgtgcttgatggagagcacgaacactttcttggggattagggggattctagtcgtcatcgcactcgagggactctgtggaggtgcggcgtatgtcaacgtgtatcatcacgtcggtcgagttgacgacgatgaagttgacgagagaaccgagagatcaagggatgagaggaccaagcaggagaaagagtggaggatgggtgtggtcggtgcggctgacagtctggggatcctatttgcttctctagtacgtaccgacttcggcaactctttcttcggatggatggttagatggcagtgtgattgacaagaggtggccggttgtctttccatcagatttctatgccaatcgaacttggtttatgccaacatcaagtcgaaaaaggaatggatctatgtcgaaccttataggatgagtgtctggtggacgatgaagtatatatcttttacgttgatataaatactacgacaagtatgtcaatttttcatcgccagactggctttcaagtattttggtgaatgtgttttaggcatgcggaacgttggcgacgaaaatgagttcaaggtattgtcatatagatatagactacaattcagagttcatacacaatgtgagagctagcagaaagaggcttagatggcctgcttgtgggcagaggccttggcgtcagacgaggactcgtcggccttgtctccaagggcgtcaataccggcattgattcgggttccaactccggcgttactaatgaatgagaaaaagtgaacagaagagtcagaatggacgttcgcgtgaatattgaacggagctgtgctggtggagatgggaaaaaagatacttacgagtccttggcaacctccttgttggcctccttggaagtggtggcggtggcagagttgacggtctcggcgacgtagttggcggcgttggtgacagaggtctatagaaagagagtagataaaaggtaaacacacgaccaacctacacaaggaggctgaaaggatggataggtaggtggatgaagaagggatccaacgaatgagataggatggagagaagaacgaaccttgatggactccattgtgaaagattagtgtttgtttggggtggttggtttggttgagagtagagtgaagagtgagaaatgctttgtgtgtgagagggaagaagaagcgaaccccaatgtcatccagccggccttcttatatagcagacgaaggaggaaaaaacccctgtcaatgttcaacgtgtcccaccgtgtcgtcacagctcagcccatctcgccggcatctctggtccgctcgttcgacagtcgagcccggtcaggaacaaggcacaaggcacagacgccgtcatcatatcgatcgctcatctaagttggacgacgtcatgtgatgagctgtgacgagatgtgacgtcacatctccgcagttcgcggaacgcatatacctcgagcgcgctcgctcacgtacatacgcgtacaggtacacgtacacacacccgcatacgaggcgcttccctcaccattgactagatttctctctcaaccaaacagaaagcgctcacagtctagaaccatcgagaagctggcccaactgaagataaacatccatggccatatcgttgcctagaacacctaaaccctaactacggatatagactttcacagtcttgctttcatcatttcgttcgttttagcaatcgatacaagcgacaacaaatttaatatatctcgccaacttttctctccctgtttcttgaaccagatacttcttcacgctgattactttctcttgtgttggatggaaggtcaagaccggtcagtgcgtcagggtctgtaaacgatgtgtgttcgttctgatgcatgatctctttctcttgagcttccaaacgatcccatctctatgtatgtttttgacgagacaacaaggaccacagacctattagtgtatgtaacaaggcataagaaagaaactctaaccgacctgatcacacatgcaaatgaccgttctgattggagggaaaagtcaatggataaacagaagacacaaaaaacacttgtgtttagagtcgttgtagatgcaactccatgtagatgtttcatcacgtaccctcctcggacgcccgggtgtaactcaacagagtctgactctgcgtagttaggtagggtaacatgctggatcatgcatccacaactaacagacgtttccacaccatcaaaccatttttagtcagtgtcacacatttacatatataggcgggatacacgccaaaacgagggcaaggaagaggacctacgaagcaatgttcacgttgtgcttatataacgtcgcgcactttacttctccttccggcccaccgggcgtggtctcgttgaagatgacttcaaacactagctcagatgaaaaggcaagcgaggtctttgtacctggaagagtcgttggtcggatcgagtcctcatccaactgacatgatgagtgttttgaaggtacgaaatgtccgcgccagcagctcttgtctcagtactagcttgctcttccctcctaacgcaaccagcaagaaagagaaaagaacgcgcaccagtttcccaacctttctccatctccattctccaccttgcagagacttcccctccaggagcgtcgtcttatccttccttgccttctgggcaaaccctttgttcgagtacccatccgccggtccatccagacagataagctttcttggactacgggcatgttcaactcgtccttgtcttcgagttgacttgatgacgacgtgttggaagaggtagcatctgatggcgaatatcgtcatgatagaaggtactccaaacagagtgaatgacagaccaagcggactagcaacgataaactcctgatagtcccgaaacaagatgaaaagagcaccagacaaaacgtcagtcagaaacggttctcatcatcaagtcgacgggttgcagacagacattcgatgtcatccgtagagagtataatccaaaagttggagatagtccctcgttagctatcgtcagttgaagagctagagtgaccggatttcaaacccacatcagctctactaatgtcatccatacgagcgccaaaggaaaaggaagagcatcaaaaggaagaacaaacctccctcttctcgaacagggttcgaaaccacatagatcgagcagtcatcctggagatcagcagaaagcaatccgccagtgccgaggacagtcccggtaacggtccatttaacctttccgaacggtgatttttcataagtcgggacgtccggtgggataatcatactgaattcatatctacgtgaatgaaacagtcaggatgttcaatgaaaagaagaagcgattgcccgtcgaacaaatgatgagatcacgtacgtgttgatcccttgctccagctgcacttccgtccccggcccaaacttccgcttagcttcttcgtcttcctcaacccaaacctccctcttccaaacagattcatcctcccagagtccctcactagaaatccagatgcgatgtcttgcttcaactttgactcttattcctttgacttttcgcctgacggggctaatgacatgcagtactccatgaactcttccctgggtcccgggcttgttgtcttccgatcctccaggtaaagaaagatcttctagtgcatgagaccacgtgcgtcctccaggttgaacaaacacgccacgggacgagagcacaagagttgctttgggcttagaaacgttgtaggactgggtttctggacggaggtgatgatgaaggtgagggtagtgagaaggaattcgaaccataatgtttgggacaatagactccgatggagaagaagcctgctcatatgttggaggagaaacgctgaaggaagacatcgttcgtgccacggcctggaaggactttggaaagctcttaagcgaaggacgcaagaaatgcggatgtgtatgattgtgtagataggatcagaccagaccggcacaaataaacatttttaatagagtcttgatcctgttgagggttatgcgctagacatgtgatcggtcagctccgctcaagcccaagcgtcaatcgtgttttcgcagcaaaaaaaaaaaagggaaatcgggcaaaaaaacatgctcataaacgacatggatagtaactcaaggcgcagaactagtcatagcgaagcagtcaataaaacaaacataaatacaaatgacagggataagaggtgaagagtccgcgtgaaagagagaatatagaaagggcaggtacataagtgtttacgaaagaagagagataacaagagaacggaaaagatccaagacggcacaaggccctagcaactgggaaggaaagatagaccttctggctggacgaggcgatctgagacctaaagaacgaaggaaaacaaagacgggggaactataatggcagaagaagagacaacaacgatgggtgaataaagatgtagacttcctgtgaacgggggggaatggtacttacgaaagaaaggagggagggaaggaaggtgtcacactcaacacataacaaacgaaaagaaacctcaagagcaatcacgttctcgacacgtcccactaaaggatgaagagatcggagagagatgaaaggttggttttcgctggccgagagtgaacgggattgaaaagttgggctaagactaaaaggcaagacgcaggggaacgctcgatcaagtctcgccttgtcaagcattcgaaatttaggcagaagaaacaccccgagcggatcgtttcttggcctttgaagctgccattgggtcgaccatgacactagtcggccctttcacgtacttgctgacaagaggcccctcagctgcatggtgaaaagagtagacggaaacaggatcagtgatgggatattattagtattttaaaaagggaagaaagcaatcacatacaatgaatgccctgtcgatgtcggtcaagatcatgagctcgggagaacgatcgcccacaacctttgtgactgcaagcgaaaggcttgggtcggctggggtcgtgagtcaacatgtgagactatgttgtgaaagaatgaaacaaacagaggtaaatatgcgattggttatcaaggtctgaaacttaaaacactaaccttcaaattgaatgctctcgcaaaacctcgcttgcagatgatgcagacgtgtcgtttcttggggtcttgggcagtgacttcgatattccaggggatcatttcgcgaacaactcgggtggcactgttcttggtgttgtccgaaacactcggagacaggacggcgtaaggcctaaaatgcatcaaaaacaagaaggtgaaaagtcagccagcaataaggaaaattagatgaggaaatgaaaacgtacgtagaagcagacgtggcaggggatccaccatcggcaccgagaggttcgatgggtagatggtaggtttgagggtatgaagcccaggcttcccgcacatcaggagcaatcgcactggcgagcagcgaggatgacggctggacggtattttccattccaaagacgtccaacccgtacaagtcaaggtcgttgcactcataggtaagaccagagaacgacttaatgtccaagtcagtcaatgggtaagtggtctgaaggcccatctgagacataagaggcgagccgatgaaggaggatgccgaggaagacgaagcagaagaaccatgatcgtccatcaaaacaggtggtgacgcataggcagactgggccaagaccgagttggatgtaggactgaaagcagagccagagccgtcggattgaatggaatgcttccttgaaccaatgacctgagagccagaaggccaggattggagtggtgcaccctgccagaggtgttgctgcggaggctgggcaacaaatgccgaagaaactccagggaacgtatcttgaccaagaccatttccgttggaagttcgattcaacaatgcctcaatcgctttggcctggatcataacaatctcatcggactggttttgaagggagccgatagatgtcaacaaggttgaatcttcactaacagcggcgaccgagcgatagtactgcgcagttcggttggtttcatacacgatcgatgcctgcccgttgagataagcggcgatggcggcaacagcctgggcagtcgaaggaggtccaaacggaggggactgaatctctggtcgagagtattgttgagattgtgccataagctgggactggattggagacgtgtactggggttgagcaaatagagggccagatgaattctgcgagggacactgggaggcttgctgcaggtacaactgctcgttataagtgttgacggacgccattgtattggaggtctttgaggctctttctgtgaatagttttgggatttggatggatgggagaggaacaaatccaaagaagagaaaagactgatgtttaagaagaaaagagaagaattagggaaaagggatcaagaacaagaaaggacgatgtgtgacccgagtgatacatatagccaaaaaattctaaagttaggtggagtgaaaaccggggtgatctatatagagcgcgaattcagagtctcggccttaaagagaaacaaataaggaaggaaagacaatcaaacagacacaggttgtatgccggtcggtaaatatacacgttcgatcggtcttcaaaggcgatacttggcggggtctgtttgttctgcgaaaatcatccaactgttgacgctacgtcgacgaagataatataccgaccggccgtgagaagaaagttggatcattatatccctcaacgtgaagcggccgatagactccgagtcacggtgtttgcaaatctctcaatacaccggctggttaaggaaaagagcgaccaagattagaaacgtatacagattgacaaggaacttgtggtcctgacgtgattatgtatctgattgtcaacggctcagttttaatggtgagtggcaatgtcgaaacataaaggagaatatcactgctactgcgcagggaattgattaacgaaagtgaaggaatgcaatgcagatccaatataactatgcataacaacgagaaaagaggacggaataaactagaggattttcgatcaacagctgtatgatacctagatagagtggcaaacagatgacagtgatgagaatttagcctgtagaaaaaaaagaaaagaaaaaaaaagtgatcagctctgatataaatcagccttgatggttcatcaacacccaaacggtaaatgttgttatgctttgggctgtgagtctatacatgttgcccatataccccttctttgtgctgacatgtaaacgtccggacactgaatcagtgaaggtttggcttgttctattgactactacgacgggtgtgatgacgtttgcggctcaaacgagatggtagcaaagacagcggaagacattctatatatg

SEQ ID NO: 1015 - DNA, 1606 bp, Xanthophyllomyces dendrorhous
aaagaaagaaagaaagaaagaaagaaagaaagaagagaaaatcacagccagccgaccagagagcgaacgagcgaacgagccagaaaagccagcttgagaagacaaagaaggaaggaggcaaacgaagaaaggaggcaaacaaacgaaggaggacgacgaaggaagaagagctaggtcgatatgtcatgtagagaaggacgatagtatacaacttggccacagtgctagttcacatttttcagatatcaacgaaaggaaaggaaaggaaaggagaagatagagagagcgcagggtagacgcccaaacagacgcccagacagacgcctcgattggaggccagtcaggaggccaaacaagaggccagacaagaggctagccaggaaacaggtggagaacaaagaaggcagcggggaagcaagacagaaggacagaaggcggccaccctagttgttccaccacctggcaaaccagttcgagttcttgttggccagagcctccaaagcctcgttctcggcctcgttctcgtcgatctcccggatcccagacaccaggtcgacctcggccggcgggatgatcttggtcttgtacacgagcttgtagccaaagtaggcgatcgcaaacacaggcagaccgatgtagttcgtcacgaacgagatcggctggaacttggggaagaacgagtcgtagcccttgaagatgacgatgaagccggtgaagaagagcgcgatccacgcgccgtacggttggaacggtgccttgtacggcaggtcgtcccgggacatgccctgggcggcgagcgccttcatgaaccggatgtgcgaccacaggatgcacatccacgtgagcgcaccaaacatcgagatgagcgacacaaagtacttgaacaccgtcagcgcagatgtcgccaccgagcagtacgacagtccacagaacgccgtgcagagcagaagcgcgttgaacgggatcccccgtcggctgaccttggcaaagatgctgggcgcctggccctcgacggcaagcgcgaagagcgtccgggagccgatgtagagatcagagttcgcagcagagaacacgaagagcaggatcgcagcgttgatgatcgacggaagcgtcttgatccccgagatcgtgatcgcgacgacaaacggcgatgcgttcgcgttcgccgacgacttgatcgcacccgccagcagcttgctgttcgacggcacaagcagaccgaccaccgtgatccctccgatgtagaacacaaggatccgccagaacgtccgccggatcgccttcggaatctcccgtcgcgggttcttgctctctccgaccgtcacaccgacaagctcggtaccgatcagcgcaaagagcgcattcgggaacgcatagaagatcccgaggaacacaccggccggagtgttgtatccgtagtgggagaacggcccgggttccttccagtatcggaaaccgatccggtcgtgcgacggccctccgccgagatcgaggacgataccgaggatgatcaggccggtgagcacggtgaccttgatggcactcatccagaactcgaactcgctgtgtggggtgtgaggggtgtggggtgtgaggggtgtgaggt

SEQ ID NO: 1016 - DNA, 2042 bp, Xanthophyllomyces dendrorhous
ggggtgaggggtgtgaggtgcgtcatgcacaggcagaaacgaaaagatacagcccggtcagccagccagtcgagcgcatgcctccctccgaacagagtgaaaagcagacaggacgaacccaaagacggcaacgccgagcatgttcagcaggaagatcgccgcgatcatgatcgtacaccagatggcaggcgagtactttttgtggtcccagtactggatgacgacgactccggcactgaaggagtgaacgcaccaagacgacgcaaacacagcgcacacacacagtgcaaacacagcgcaagtgaagaagcacaaacacaacgcaaatgaagtacgaacacagtacagaacaggacatcagtcacgagaggccggtgggtcgacccgaaaagacaagcgatggctacgtacgtgatgttgttgggcgtgacgatgaggtacttgaacaggtagttgtatccgagagagaagccaagctgggcacaggcacacacacaggcacaggcacaggtacaggcacacagatgcgttcgtcagtcgacacatcagaccggtccgatcgacatcaggcacactcacagcagggtcaaagaaccgggaagagtatccagcaaagccttgcttgtgcggcaagaacgtcgcctgctctcccagactgatcatcaccatgtagcagacaagacccatgatcgagtagcccatctgagcgacagtcagagaagcacgacaaaacaccagacgcaacaccagacgaaacaggaggatgagcatgactggaaggcgatcacagcagaagacgagccaacagcagaggagcagagctcggtgcagtagaacccagcagaacacgtaccagcagcccgacaggtcccgactttgacagagcagaaccagaaccgatgatcagacccgttccgacagcctagaagcaaccgacaggatgcagagagagcacaagcgccaaggcgttagcagatggcacgcaaagacagagcacaaccgccgtcacaggacgacacaagatggaagagacctactcctccgatggcaatcatactgatctggatgggtcgcaaggcgcgcgcagcagatctcggtcagaacgacagacacagtccgcgaagagagcgacaagacaaacggagaaaagggaaggaaacaggaaaaagaagaaggaaaaaaaaagaagaaaaaagggaaaagaaaagaaggaagaacaaaagagaagcatggacggtacggacatgtctggccttgagccctcggtgggtcgtcgtgttttcgatctggccgtacttgtcgtcgacgtcttctgcagcaggcacggtcgcatggaaggcgcctccgtccttctcaaagtctttcgatccgtactcctcgtctacgcggtcgtccatcgtgggaagagagcaagagagaggggtgaggggtgagggtgagagtgagggtgagggtgagggtgagggtaagagtggtagaggacacaggagtccagcgagtccagcgagtccagcaagaaagaagaaaaaaaggcgcggacgggtggagaggacacgagcgcaagagagaggaaagagagagaagaaggatggaaaggatggggaagaagaaagtcgaaaggggaaagccggacggatggcgacgattcaagtagtcctcgcgtgcttcccatttttctgtccttatccgtttgcccgctctctttgtcgtcttgtctctcggacgctcagcctgtcgacctatctctgggacgatgtcgcctgtggcctgtgaccttggtgtggccttggtgtggcacggtggggacggtcagtccagacggggctcatcgatctgtttgaaggaggacagcgcaaattggctatcgtccatccttatcagctgatggctatctctgccgccttctgcctcgcgagatctgggtccgattcggggtgggtgtgcctgtgtgtgcctgtgtgtgcctgtgtgtgcctgtggacgtgcctgtggacgtgcctgtggacgtgcctgtggacgtgcctgtggacgtgcctgtggac

SEQ ID NO: 1017 - DNA, 599 bp, Xanthophyllomyces dendrorhous
aggctgagagcacgacgatggtctttagcttgtagcttgtcgcgctcgtcctctacgctcgccttccagccgcagacctccctcgcagtgctggctcttcggtctctatcctccgtcctctgctcactgtcctctgtccaccgccctctgtccttgtgtttctctctctgcgtttctctctctagggataccctgtttgcatatcatataccatatactatacaccacatactatgcaccacatactatgcaccacatactatgcaccacaccacacgcatcgcaaagcagtccggtcctttcgttctctctgccgctcatcgcgcgtccgttgatgtagcctcactctatctgcgagacacctacactttctgcgagacactcactctctcccaagccagtcgttgtctctctagatggctgggtcgatctactatgaggagtctgtagctcgcccgcttgccttatacgccgctggtcatgtaccgtgcagactgtgccattctccttgtcttctcacagaagaggacatcatagagaggacacaacagagaagacacaacagaggggacgccgtaccgaagacgaagacgaagacg

SEQ ID NO: 1018 - DNA, 522 bp, Xanthophyllomyces dendrorhous
gacgaagacgaagacgaagatgaacatgtacatgtgagcatgatagcacagagaacgactctcggcggacagaccgtccatacgtccgttacccgtgttcttgttcggtttcttgcgttcttgtccgcttgcgtacgttcttggttgttcgttctctggcccatctatatctggtcgtgttctgtcttgccgtccgatgaggagagcaagctcggtgggctgagcaaatttgacgagagcgcgagcttctgactgctggtcgcccagccttgccttctctccgagaggctgaacctgctggccatgccttggctagacgatcatatctgtctggtgtttctgtttctatcttgtctctatttttgtgcgagaaacatcagtgtgtgccgtgtgctacatgctgttcccttttccgtcgatgatctttccctcttgcccttctcgctcttctttcggctgtgctctcttctcattcgctgctccttctctcttattggtaaaacagacaagcttgagcttact

SEQ ID NO: 1019 - DNA, 601 bp, Xanthophyllomyces dendrorhous
  misc_feature (358)..(367): n is a, c, g, or t
cagacaagcttgagcttactcattatgcagcttactcagtatgcagcttactcagccggtaagctaaacagccggtggatttgtcgaccatttgtcgaccagctgagtaatcacacacaaacttgaaagtctctcggctgccgcctggatcggaaggagtgcatggggcgactaaccggacgcaacgtcactttctccgcaaacacatcctttccggactgtatataacagcctgatcacatctcttggccctccaccagcatccatatctgcgccttcctcttgtccactaccatccactgtcatccactaccatccacttccacgacaatgtcgaccagctcgcttcccaagacannnnnnnnnntccactaccatccactgtcatccactaccatccacttccacgacaatgtcgaccagctcgcttcccaagacatactctcactactacctcgagaaccgagggacgtttgactcgatcaagttcaagcaggacgtcccgctcaaggcacccggcctgaaccaggtgctcatcagggtccgtgccgtctcgctcaactaccgagatctgatcatcgccaaggaccagtacccgctg

SEQ ID NO: 1020 - DNA, 759 bp, Xanthophyllomyces dendrorhous
ccacgacaatgtcgaccagctcgcttcccaagacatactctcactactacctcgagaaccgagggacgtttgactcgatcaagttcaagcaggacgtcccgctcaaggcacccggcctgaaccaggtgctcatcagggtccgtgccgtctcgctcaactaccgagatctgatcatcgccaaggaccagtacccgctgagcgccgtccctgagcgtgtgagtgcatgcattctgtcttctctctcttctctctcttctctctcttctctctcttctctctcttctctctcttctctcgtcgcggtcaagctgatcaatctgcgctccgtcctatgagccaggtcatccctgcatctgacggagcaggtgacgtcgtcgccgtcggagacggtgtgtccaactggaaggctggagaccgggtcatggtgagtgcacactgccttctcgcccggcctcttgctgatgtctgaccgaacgctaaccggacgctcatcggacactcaccgaccctcgctcggttctgtctgcccaggcgaccttcaccctcgaccaccagaacggatactttgacgaggcctctttcctcgacagcacgatcggcggtgctatcgacgggatgcttgccgagtatgtgatcatgcctacgagtggtcttgtccgggtgcctgagcacctgacatacgaggaggctgccactcttccttgtgctgtacgtcggtcgactctgttgatattcttcgatgtctttcgatgcttcttg

SEQ ID NO: 1021 - DNA, 60479 bp, Xanthophyllomyces dendrorhous
  misc_feature (59232)..(59241): n is a, c, g, or t
tgtgtgtgtgtgtgtgtgtgtgtgtgtgtgtgtccatgcacccgtactcatgcgtccgtgcgcctgtgtacccgtatgcttcccaatgctgacctgtgctgtcacactctgatctgttacatcccggtctgtcgcttggctgtgtccagtttgcgctgatggccggtgcccgagcgatcatcacttcatcctctgacgagaagcttgggcaggttgccgaggccgtcaagacgctcggagggagccgactggagacgatcaactacaagacgacgcccgagtgggacgaggaggtgctgaagaagacaggaaaccagggtgtcgcgcatgttcttgaggtcggaggacagggcacgatcgagaaggcgttctcgtgcctcaagcagggtggcgtggtgagctgtatcggctttttggccaagccgggggatatgcctccgaatgtcgctcttcttgcgctcgtcaagggtgcggtcttcaggggcttcctcgtcggctcgaggcgacagtttgagcagatgtgcgatgcgatctcgctgcacaagatgcggccgatcgtgggcaaggtgtttgagtacaaggatgcccgggcggcgtatgagttccaggctgggcagactgggtttgtaggtaaggttgtgatcaaggtcagcaactagctggctgggatggaatgggaaggcctgtatctgaagatttgccaacgtgtcaaaatgataacacgtcgatatgtcaatatgccaatatgttagtaggtcaatatgttttcatgtaactataacttttttgtattcatgaaggatatgagtttcgagcagaagcttggaaatactgtataaaacttgaagagacgtgctcataccttgcaagaagtcttactccttctcattttctgtcttcgccctcttcacagcgtggccttgatgacaaccaaatatggaaggaactgagattttttcctttttttttgctctcactcagctcaaccaatattttccttgaaaggacaagtcgttttgacatgactatcgtgtcatgtctttctgctcagatgacgcgtcgctgtgtatagaggtaaagaacttagggttaattcaagatttgggtctatgcatctaatactacattgctgttcaacatcctgttggccgatatgccaggatcttatgtactatgtagcaaaagcctctgaatagaaggataacaaacaagccaactggctgttgaaggtcagagagaaatctctcacaggcccaaggaaacagacttacccaagtataattgaccagggggaaacatgaacttgagatagggatcattccatgagtaactttgaggccaataattttacatccgaagctatattttgcatccagatgatctgcgtatgtaaccataagcacattggttacgtttcatttttccgatcgttcccccgatatgagttttggccatcgactttttcctggctcaacgccaacttggctctgttcagacccgccagatcccttgattccctgcgttttatgggagaaagtgctgctaaccctgggcaaaggtcggatcattcaccggcctcgtactctgcctgtatgtcctggggctgtccgttagggaagctttcctgatacctttctcttcttttccattttgtttgtcaactgtctttcgttcccttctctgctcacaaccattgcaaacacatatacgcccatcaaggaacagcacttcttcctcttctctgctcaagaatccattctgctttgattgaccactacagttctaggctggcatttcctctatatttccaccaacgcccaagagtcttcataagagaaccttgtcctgacgttcgttgttccgatggaaggcgctaactgtatgtcgaattggctccacacctgcacgcaacaatctatctttctccatctgcccttttattgatatgaacccaatccctccccttcttgtctcgttgtttttcgttacgaagcgattcgaggttcggctctcgtctcttctaaatctgttccgccccagagttctcatccgatcccagcccatcgcattcattcgagttctcaacacccgaaatcagggtcggtctcctcgaccgattccggtaaatcaacgtcttcgtctcactcgggtgaaactagcagtggcagcagtccgaccgatacctctctctcaaccgtctcttcgtcttcttccttggacaaaaaggccaattctacaggcaaactatcgaacagtctgccgaatcatgggcctgtcaagtctttgccatcaaacaatcttggccagcccactgttttgaccagatcatcctctagtgttggttctgggtctcgtaagtttattctgacagagaaatcttttaaacgaatgcttagtcgttatattcatcgccgtgcttccgttcctttctgtccattcacaacatcagaaaatacacaccgtcccaattctctcctccatcggcccaaacgatcggcccagcctacccccattccaccgtctctccgatcgtcccatctgctcaagtcggagtcatctcccttctttgctaggtcaaaccctgatgcatgcccccgccattcatcttctcaatccagttccagccacggtcactatactcggggggcaggaacgaccccttcgcctcctcggaatgaaggttcgacggatgacaagaagaacacgtgggccaacttggtgttgaacgtccagatgtccagtcggattagaggcagagaccagataaagataagcagcagttctagtggatccggtcagagtcttagtgaagaaagcctcgtcataggttaactgtcaaggttgtctgtcttggtccttctctccttgtttgctcacaattctttattcccttctgactagtattactccgtacattttcttggctatcaatcaaacaatctctgttcttttttcacgtcctcatctcttctacttattcaagcagaacctgtcctttgcatattcgtatccttcttcgatagggcttgtctccatcttgttggacattttccttctccaatttcatatctgcttcttttctttcaccattttctttctctttttcagttttgggcgttttctcttttgggttttgatgcttcttccatcctttcgtttttggattctcgcttgggatatcactttttgggttgtcattgtttttattttgttttttctttttgttctagtccattgtttagtttgttcacacctgttgtacacgaatgaacatttggagtacctggcttcttgttcggtccgagacgggcatttgaagtccgtatgattctgtaaatattaaagtttaaggtgactgactggctggctggctggttagctatctggactaccgaagatgattcattcaggatatggcatatgtagattatgtggatggaatctgaggtcttgaagaacatcacgattctgtagaagaaggggttcgtcttttctgacatctttggagcaagtatgaggatcagcttaaggaaagccgattttcatccgaaaatcgactgcaaaacaagtgagttaatagcatcaagggccaggttggtacgactcgtaaagagtacagaagtactttgagattctgtatatacgcttacgagtgcgtcaaagtcggttctttcacctcattcatcggtatcgactattgatcagacatcgtttgccctacttagatgacaggcaaagtgtgactagctatctgactgatcaatacagcaacttcgtacaatagagttgaaaagaaggaagtctgaagacggggagggattacactatgaactgtagactataagacaaagacaaagatattcaaatcaagattagtagatacatataaagaaggatcaagacgataatctgcttctttacgggaaaaaagaaaaaggaaaaactataaatatatgtaatttggtatacataagtataaaaagagtgtagaagaatccgataaggatcaaaggtatattagtggacaggataggtaagccgagagatgagaactaagactaaatctacaagaaaatagcaagggagttgcatagacgatacatatgttgcatatttggcggacgcaatcagacacaggcacattcaaaccccacttaagacaccttcttcagtggtctgggaagctgaaagaacgaggctcctctgacctagatctcgtcctcgacaaatacagaggtgtatacatcagactgtccaactccggcgaacaaattggggagcacgacttagacgaacagggtgagttgccgcaaccggaagatggcgaacaaggacgaggtagaataagatcatcccccaaacgccttctgtgccggcctactgaaccatagatgagcgctggtaccaaaggaggcgaaaggcaccgccgatgaaatggagactgcgcagacgtaataagcggggaggtcttgagcctgtcaggcactggagctgcctcgggaacgttgtaaaaaaatgaattgatggccagaggagagttctgggacgaccgagtccggacttttggtcgcgtttgagaaggggagggttcaggagagaatgaaggtgaagccgaagatgtagtaagcgaagggggaggaggatatgaggaagaggaggaatgtctttgcggtctgtgtgccttggagcgttgaaacattctagaagaaaatgaaggaggcatgacaggaagtgcaatgtgcatttccactttctgtttccgagttcgaccagacaatgggggaggagtagactgaacagtatcggtggtcaggacatctatcggctgcaagaagctaagacctacaagggagggcaaccgggtgagaagatgaggacatgccagagaaagaaaggaaggcaattggaaagagtggaaactgctgtcagagaaccaccactaacctagggtattgacctcgcttgactgttctccaacactattcgaaaggggagtgagttcttctctcataaggaaggcaggttctgggatagccgtcgagaacgaggaataaagtattcgtgtagctgatagcttgaagagtttataacggaactgcttcgagaagaaacgagaatttggtaaggatggatgtggagagtaaacaagccagggacggattgtaagagcatgtcaaagtagacgtgagtgtattggatacgagctatagcacagcagtacatagcgacagagaaaggggcttgatccggatgctgattatcgagatcgagcagaacagagcaacgaggaacagtccctggtggtgcgagcttacacaggcaacagacaggaacagttcgagttcagcataaggaacagcaaaggcacatatccgagttgggtcaactttgtaaatctccagtcgctatatcagtgtccatgcccacgcttgtagcgatcagtttaggtacaccggtgcagtctgacaaggtctctcaaccgtggtcagtgttgttgaaagaagacgcctacacagagtgatccagtcagccattgatataccagcccagaaggagatagctcgaatgatgcaaagatggtcggttaaatcagagtagagagagcgtaggtaaaaactgggaccccattaagttgtctatgcattttggcactattgttagggttagtcaataaaaggttgatggtgatgtcaccgcgagtctcatgcaaaccgtcgacacatgatcatcgccctcgtcatcacattgcatctctgacaatgccagcgaacatcctcgagccaatctttgtataagaacctgttcagatctgttttggaacttcttccctctcttttctccactcaaacacccatcttgctttacacacaaaccttacctaccttttcaacaacaaatcacacctaagcttacatcatggagtccatcaaggtttgtctgatcttgaactttatcctctcttcgggtccccttcctttccatcactccagattggtctcgtttctgacctttgttttttaaatcacttcagacctcgatttccaacgccgccaactacgcttctgagactgtcaaccaggccactagcgccacctccaaggaggccaacaaggaggttgccaaggactcgtgagttttcgatcctgcacaccaatcttgattcgggtgggcatatactcacacaccattctcatatatcttgatctaacagcaatgccggagttggaacccgaatcaacgccggaattgatgctcttggagacaagggtttgtcctttgctaatctcaagtgaatggtgcagtcactcttttgtactcacttctctgattttcgtcacagccgacgagacttcgtctgatgccaagtccaaggcctacaagcagaacatctaagttatttagatagtcgtccatatttttgcctagttttttttaaactatatccatgccatttgattcctttggattcccatttatcacatctgagatgttattataagcaaactttctggttctgatggcctcatactctggaagctaacaaatgcttttgtgaaagaaaaagggtctatattactgtgatggttacgtaatcaacattgatctctgatagccggttagccgagatgtcttcgaagacgaagcatcgagtactctgcctgaagctatattcgacacactacatcgttcaatgtctgcatcagaggtccctaactttacgcctgctggtcagccagaaatccgtacgtagacttgttaaaatggattcagttctgtccatgatctatcacagctgatcggtctcacatagtccgagcctatcaaagagatcaagcccagatatctcaactctccattcttatccaagataccttccgagccttattcggtagattgtctctatttatgtgaagtcactggcatttagcatgatcattgacatctagatgacaactcaggatctagagacctgctcattcatgagggcatcctcggcgccctttcctctctgatttattatagtctcacattcgggataggttcgtagtcgccagcgtcttgatgcctcgaatacatgtcaaattaattggaatgatgatattataactggaaattggcatcgatcgatcggacgtaatctaggcactcgaacgataggcgaagagtataccgatatactacccttcgcattgacaactcgtcgactaccctctcgaactgtatgttttcttggatcttctcggctcagagccggctacttgactaacgcttaccaagctcttgactttgctctgccgttacggatgcctacgaatcttatacagaggcgcctgctaactctgtttttgatactattgactcctcctttacttctgcgtctcacaaaacgtctttgcatacgttatgctcgactcgatcgagacctggaagtaggacgaagaacagaaacggagacgcgtgaagacagagtgggccgatggatagtgaaccaattggaaagaggagagacttggatctcgttgctaggagaagttcatttggcttcattcttcttcggtggtagatttttcgaatttggcaaaaggatgatgggaattggatatgtacgtgcatctgttcaccttttcctctcttctgaccaatcttcatagtatggagctccaagtttacctgatatcttctctctgctctatcgtctcacggataaatagatatctactctaccgcctctacaagatccgtcccagagaccaacgtattcaatactgggtatcctcctccttctccccctcttgaaacgcttgaagcatcttcttcctttatcgtcagattgccgctcatcctcacacgatcgatctgatcataaaatcgactccaagttctaccttccggggggtcaatctattctacaggagaataattcaataggtgtttcggaagaccatgatgaagatatttctgaaaaccatgcggccgaggtagaagaggaaaatgatgaagacaaggaagctaggaaatgtacgttgtgtttggagagctggaaagcgccttgtgtggttgaatgtggacatgtattttgctgggattgtctcggagagtggaggagagaaaaagtttgtctcttcacgtgctatcttcctttcctcatattctctcctttcgcttttgacactgactcgagacgggtggttgatttccatgattatcgtctattcacctgctggtgatgtctgatggactcaggcggagtgtccactttgcagacaaccattaaatctttcgagattgttacctctgtataatatatgatcccacgcagtctctctgatgtcgatgagtctacagtcaagccagcctacagctctctcaactcagagccaacgttggtcgaacacacgcgtttcgaccgttcgttcatacttacgtaatcgagaccatgaccaaaccatctgcaaactttcaaccctcatccatttttgttttcctttcatctttccatctaccctaaaaccttcatgtgcggtcctggatcatcttgcacaattaaacacacccaaccgaaacctactgctatgtctactgctgctgctaaagctgttgagaaggcccaggccaagtctgatggttcgtttccgtgtctctttctatcgtatcattgtcatcgttattcctgatgcaggtagaggcaatctgcttgatggacggaaaaaggatgggaaagtaaattatgagctggaaaacaagaacacaagctgacactacatcttgtgatgaatatagcctggctcgagaagaacgaggaggctgttaaatcacttcgatcccgtatgtcttattctcttttgttcgtcttcgcttcgcgtccgaccttggccatctgacaagtttcgttcatcaaccggcttgatcaccttacttattcttaaaagagcatcttgctgttgaggctgagcttgaggctaagtcgattgagctctttgctgccttctacgccaagcgacgagccgagactgagaagatcccttccttctggttgcgagccatggtcaaccacccaacttgtaagttagcattcctccttgatgcttgccggtgtctcatcaagaaggaaagtcaaagaagctcatttagaccttctttggttggaattttgattagtggccgtcttccttcagggagctggagatcaggaggccttgacctacctaactgacatcacccttgtcagaggaggagacaagaaggatttgagggagtacgacttaatctttgtatgtgatattctcgtcaaaccagtagattcccgcatgcgattagaccacgtcggttgaacacatctcatttatgctttgcttttctctgatcagactttcgctgagaatccttactttactgaaagtaagatctcatctctattttgattcgtctgcgctagtatccagatgagaagcgagtccgcaagtgtctcatgaaaatgctaatgtttttttgggtgtgtgtgtagagacgttgaccaagtcttacaccgtcaagaaggaagaggataccgaggacgaggaggactatgagctcactggatccgttagtctgctttacgttaagttcatcgcatatgtccactatagtaagctgatagacgtttcatatcccgtcgtgccttctttcctacttctttcgaacgacgatgaatcaggtatccactatctcatggaaggacgacgcacacaacttggttaaggccaaccctcagaagattgatgaggaggaggacaacatggagcccggaagcttcttcaacttctttgtcaaggaggaggaccagttcgctgtcggctcgcaccttagggacgagattctgcccaagtgagtctaggattcttcaacaagaacaaggaaccaagagaagaagatcttttactgaaacctggcacgtgtttgttggcaacactcttgctcgatcttagtgcgttggagttctttgctggtctcattgacgactcggacgatgagtttgatggtgaccttgatgatgagtctgacgaagagatcgacttggacccgagacccaagaagaagtccaaggcttacgcgcctctataaggacgaagtgaattatatgtgctttcactgtatgattgcaaatgagtcttcctgatacgtcaaagcaaatacaacaacatgcaacaaattgatacaaaagatatcacagacggatgcgtacaatgtaggtgtatgtgtccgtccgtttgcctctctatgcggaaaaatgtttcactctattatgctgcgcacctcgtattttgacctcggctcacttaccccaacaatcaccttcccttccctctctttctttctattgtatcctgccttttcttttctcttctttccttggttcctttccagtcttttcccacatctgtgaccgtttttgcgtccgcaccaaacgccaatctatacccaatcatctagacaaatgtccaaaggcatcgtctacggccttcacgcgttcgccgcagagaacgaggacgaggtgtcctttttacccggagagatcatccacgtgctcgagaaagacgacctgtacggagatggttggtggcaggtatgtgacgttttctttcctttggatatgcttgctcctttctctcttgtttcgtgtgtcactgggaaggttcccggctctttgtgatccactcctctggagcaagaaccaggatgaatgtctagatcttgggctttctaaacaaacacgtccatctccggccacgcaagactgattctgtgttgactcaacatttgatactcatcagggtcgaaatgctgccggacacgaaggcctatttcctgtagcatacacttctccggaaccaccttccactccacttcctaatcctgctgctacttctgcagctgtccctgctacctcatccgaaaatggaatagaggcacctacatctgttcggcgacgatcttccgcgtcggtgcttaccatccccaaagccactcttgatgcaccctacgaacaagcttcaaacaagattccttcgccaaacggttctcttctctcggtaaataaagatcagcagggagatgctaccccagtccaacgttcagaagctcaaaggaccagtcaaccgatgaaagatacgatgactgatcttcaggcagcaattgattccctcgaaggtggattgagaaccgatgcgggtaagagagaaaattctgcgtttccggaactaggagcgaacgatcatcgatctatcagatcatctatcgtatctggcgaggatggctctctatatggggagtctgttcacgaagaggacagggaccaagctgccgaaggtgaggtgatggacgaggctggatggagtgcgatgacgaggaagagattggctgagaaggcggcgagtgagaaccaacgaagattggctagggaggaagaaaaggaagcgcagagaagagaggccgagatgaacgagagctcagactggacgacaggagtgcctccggatatggtctattcggattccgacagcgaggatgacgaacaagatcaagaatccgatcacgctccttctttctctcccgttgcgagttccattccggaaccaatcgttaccgcgcaaacaactcctaccacggctcaacctccctcgactttcatcgcacctatcgctggcttggctgcacctctagcattgtataatgaaaactcttacccgtctcccaagcagctagagtcggttcctgctcttccagatattgctacatctttcccgaccgatcctgaacctctttcagccactcctagagcgccggcctctgtagtcactcctgtgattcagcaaacgggtcgggttccatctccagtttctcagggaggtacacccagaagcgttgcacaggccctcacgcctggtgaaaaatcaaccgccgcgcaggacatggcggcgactcaaccatcttcccttgcgattgagccttcaccgttcagaacagttattcctgatccagtcagcccgaactcctcttctgtagaggaaggatttcagggtgcctccaaactgagcgacacacaggcgcctccttcatctgctgtccgatccacattgccccttcagcagcctcaacggtctcctgccgctgtccaaagtgtgttgcctctttctccttcaccacaacagcagcagcagcagcagcagccaccatcagctttctctacaccagttatcacgaatagagcctcttcggtgtcgtcccaagaagcatcgatcgctacgttctcgcctgatacttcggtctatacatctgagcctggactcagcaaacgagctagctcaattgcaatgggagctgggaaggctgggatgcagggagacccgatggattggtcagtagacgacgtggttgattgggccaagagaagaggatttgatagcacagtttggaccaaattccaaggttcgtttaaagagaatgtcatgatgctggtagagtataaattttcgacaggaattgacttcaaatcctctttgtgtccctttaagaacatgaaatcacgggcgatgttctactcgagctggacctgaatttgctcaaagagatcgacatcatcgcttttggcaaacggatcaagcttgcttctgctatcgccgaacttcggcctaccgccggatctgtcactcaactcggaagctcgctcgatggcgccgctggaggcactccagcttctatccgatctgtagagcagagtccgtctcaacagcagatagcactcaataatccggcagcctcgtatacttccgtttcacagcaacagagccggagagcctcgaatgaagtgcatggtagctctggaccatcaagcgagtatttcagcttagacactccgcctgctcgatcgagagagtttgagaatacgaactctggtttggctggaacgactgcagtggcagtggcaggtaccggtgtggttgggcttggattggcagacgaaaaggttcgtcaagtacatctgatgcgtttcctgagggcctcaagctaaaataccatcttcctggtattttcattcctctgaatagactctgtccactggacggaccccgtcggcagcttctcccggcgctagtagtcctggttttgccttggcttccgcctttcaaccgactcgaattgctgaagagcctgaagttgtttctccaatcgaaaccgtacgtctggttgcattcatcacatacataccagcatgaatttatcttacttattcgtatggcttgttgtaaccaggtggtctctcctgtcgttcccacatccgctgagtccccgaagcccgccaatgtgtcgactgataaggtatctaccggctctggttctagagatagtggctctctacctgccagcccagctttgttgaataacaaaggttccttcaaccaccgacgagccaagcaaagcgtggatgagagcccgaaaggctcctttgttggaaatctactaggtaacaaccggactggaaggaagcctgccccaagagtgtcttcgtgagttacctccctaccttgtcaatacgattttgtttggaatcaaagacgaacttctgtgaatagcgttcttaccaatcggtttgttcggttgggtcatgagcagaggatctggctcttcacctaccatccaacaatccccttctgcgggtggtacgctttcctccttccgtcgatctaccagagatctcagtggcgggtccgccaatagaaaacgactctccacaatcgaaactggatctactactgtttcctccggatcgccaaccgaagcttcggctgctgctgcaccaagcgctactcagacctacggtcgggcactggatagagtccctaaggctgatttctctgggttcctgaaaaagaaaggcgagagatataactcttggaagatgagatactgcgttcttgttggacctcacttttactatctcaaatcggagaacgttagtcctctttgctgcttgcgtttctacgtctgtagtattcgaaaacaaagactgatttggtttggaaacttgcttgaccaatctacaggattcaaaattcaagggttatatcaacctccaaggatataaagtcattgccgatgagaacgcgaagcctggagaatatggtttccgaatcatccacgataaagagccgacccatctgttttcactgccggagcagatcgttgtccgagaatggatgaaggctctgatgaaagcgaccatcacgagggactactctggtaagtgaatttcatcagtaccagagaaagagcaggcttttaaggttttacttaatttgaatgatagcgccggtggtctcgagttgcaatattcctaccatggtgagatgttttttttgtctgtaccagtcaatcgtataatctctgtacgaaaaagcttacgaatacatctacttatctgccacagaccctgaaagaagctcaaacaatgagtcccgctcctcgaccgccttcgcctacaaccagaagcgcggctcagcaagcgagtcgccgaggaaatcctaaccagctgacggctcgagatgccagtgttttggtgagacaccagtacccttgtcatctgaccaactctgaatgaatgacttgctaaaatgattatcatgcttgcttcagatgggattgtcgcaagatggaaagagcgagactcagagacagagcatgcctccgtccttcagaatgccatcctccactctggccagtgctccaccaagaccttcgcgggagatgcgacgaccttctagtggggtcgtggcagctaatggtagccgaaccgccgctgctcccaataaaagcggagacgaaaacatcgactgggtgaacaggaatttgccgtcaggcgtatgtcttgtctttctttggtctttcttgcttaaagttaaaatgtttactaatcagtcgtgaattcttaaatttacagttccccccggtcgtttccaaccctgactctttccgaagtggtctcgctctgtaagtcttctctctgctgatacttttgtctttcttcgcttttcgttgaactcactttgaatgataatgtagtgtccgggtggttgagaacatcacgcatattccatctgagatcccggttgcgagctttgtggtcaaaaccaagcaggaacacgaagatgtgttgtaccgagcattcgattactttatcgacgctggtgtggatatggacggccaacatggttcgtcgtctccatctggcctcccttctcttggcctcatcaagctgacggtctggctcttcttttgctttcttccttttccttagtggacgacgtggtcgatggtaatgcagcaggaatcaaccgcctcatcgaccaaattcgagctagagccaatgtcctttaaaattaaggtgatcgctgagggagaaaagactccttctatcaacccatttttttgttcttttctcacacatatgtcctttcgttctctttttttgaagtgcatggcctgggttaattatctctctatccgtctttatccccttctaccctaataccctgcctttttcattatctgtttacctcgcccaacttactttaccttatatcattctcctccttccttttcccctcgatttcttcctttttttttaaaaattacatatgccttaaatttgcatcacagcttttgcccttttgggaagtcctcttaataaacccgctccttttctccttcttttaatcgcggtttttactactgcctccaatctcttctttctcttgtgaatatccacaagcttctgtcgctgtcttatcgaatgaatctctctctaggttggattggaccataggagcgttcatctcgtctttatgagcattagatcaatgcccagaaccggacgtcaagaaggcagtgagtgctggatcgggcaatgcggtaaacagtgaagtgaacgatataccaaacagacagagtcagcaatataagagattcatataggaagcatacaaagacaagacaaagatgacgcgtcgtgatgtatgccaagatggattctgtttataagaaaacttgaacgcttaggacccggacagaaagctctcatgcctgagggcaagctcggactctagtccggaccttgatcggcggcgtttactccgaacaccactcgggcatggacatcgagtcaccgacagaaatgtattaatcagccggccttacccacttggatctcaatgatcgttcgctttctccgttatttattccgtctccgcctccgttcgctcccttatgttctttgcttattgattaaattccgaaaacacatgatgagactcaaactgaacgatttctcgagataactcttcttataatacaatctagataaatacagacatgtgaatatacttttggtgatatcaaaggactaggaatacacagggttgatagagtaaagattcggatcgtatagatgacaagaaagaaaagctagctgaagcaggatcaggtttgccctgtgagaagtataaaacagcccggatgcgaagtagggcctaacgtcaggcagagatcggccagatgatcccttcttgtagaggcttggcttgatggtgaagcaaacgcctctaagggaggaaacgtttctaagatggttgtcttgactggcctcccgtaaaatttgccgcccgttatatctttttcgtttctggagccacgaaggaaaagagcctcttgaatgtcaagagaactctaatgttatggggagagggagagaggatactgattcggaccgatggaactaagcagggattctgtcgaaagctttggcgcgttcgaggaattcccaaggctcgaggtagagctcaaaagagagccagccaagaagttccgtctccattcggttgatctggttgagcgtccaggacgtccggtcgacaaagctcgagttgtggtaagagttatcggtcgacatctttgttgcaaggaggaaagccgagaagatcaggcggagcgaggtgtccttgatcgtcttggaatcggctaccaaggttgggtacttgagctgaagcttctcgatcagatgcatcgtatacaccagcacacagaatgggtgaggggtgagcgaagtccagtagtggaggtatcggacgatcgagccttcgtcttctgaagtgattgagttggggaacttgacttgatcgccgccaacgcaggtcaacttctggaggatcttaaacgcttgatctgttcgatgccaagaaaagaaagagaaagaagtcaatgcttgtactttaagacggccgtccgagacaaagcgacgaaagaaacacgtacaacaatcgttctcggttgtcctgatgttcatcaaaagatccattcggtctcggtcattcagatcgagatccagggactcttgactgggtgaaccataaggtgaggatgcggaggacgaggcttccgaggtgaacggagacaatggagagagggctgggttaggtaccgggctgactgccggcttgtccaccaggctgtatgccggaggaggtcccgatggagggattgtgagatcaaccggatagaagaaggacatgattgagcacgatgttgttgtcagagtaagatgtgtgagcgtgtgtgtataagtagagaactggggagaaagaaagaaggaaccgaaaggctaagacgccatgctttataaacatcttggcctgttcgaaagctgtcgtaaatgatgagtcggtcacttcggccaagacgagtccgagcttccaaacatgggcaggcggccggccggggtactggccgagcggggcgcacgaacaacaagccgagctttcccggccggcgcgacccagcacacgctgtaaaacatggcccgtctgagtcatcaacaggacttgccaatgtgcacctaacccggcacatacccacgcttgcacctgcattttcggctgccgagtttggtaagcgacttcggcgttggttgtctccgtgagcggccgccgtcagagcctctttaccactgcgaaaagctgtgatcaactctcattgcctctataccttcttcatatcgctttcttgttatcctcacaggtcctctcataggttctctcatggctgtgtttgtatacaatggggattttttaatctctgctttgttctgtgagaaagaaaatgaaccgaaccggatgaagatagggacacacacgcccgtttgattggtaagacccgcgctgacatatatctgtaccttgatgcatacgcatcccacgtacgtccggtcgcgtcagtgacacgtgaagttgccgtgggacaagtcatcggcccccgtctctgatcaacagacggagatcagcacaatgactcgattatatctcttcttctttctaatcttctctctggctcgagtttctgccctgcgtgcctgctgacttgacagaactgttacaaaccacacatttttcattaaccacttaccaatcaaaccaagatcggctctgtcagccagtagtaaccttggttatgaatacttcttggccttatttcccacaatgttatccagtcatcatctcgattacagcatcctctctcatcagcctgatcgtaatctacaagacagtacaagatgagctcaacaatggatcgaaatgacgtgttgaacagctccgttccgtaagaagagcaaagcacgtttctggtcggccggtcggatataaatcttacatgccgatgatgactctccatctgatgtatcaatctcatctgtgcggagtaccataactctggagaacggaacgggtctttccgatattcgacctttacccgaaggcaactaggtctgtagcgatctccttccgtttctctctttttcaagcaaaagccatcaaatttagacagatgcgcgtatttgtacatcgttcgagtctactcgatcttttctcgactcttcttttttagtatcccttcttgtttcttcttcccttctgttcaatacagtccggcttgtacaccgtttactggggagccatttgagctaggtcgatcggaacgagacaggacaaaaagggaattccgtcaatcgtcagctcttctattcgcttcgttgagttggaacaagacgaagaaaaaagtgatggctcaccagcattctgctcagcaaaccgggctccgactcgctcagaatgcttgaggaatttatccgagcagtgagccacacatgtgctctagtgtgttcatcaataggttttttaatcgattttaattatatatagaaacatttagcccagtatctgtcagttcatgaatcggcgaaaacaactgatacgagagagaagagagaaacaaacctccttgccggtaagggtcttgctggtgaaatcgttgacacacgacgagaaacatcgttcgaccaaaccggagtagagcttcatgaagtcttgcatctttagagaaaaagaaagacaagtatccatttaaaaaaacaaaagaaaaagaaaaagattgagaacaacaaataacaggatggttagagcgttcgactcattgaccaagactaatcggccacatacaagaccgaaaggtcctctcgatcaaaagagtcaaagcaaacagaaacggaatcaaggaaagaatggacaaacctgcttcttctcgatgatcttggtcatgtgggcctgctcggcagcgttgaacctgtagataaaaagagcaaaagtgacatagaacgaggaagtgagtcacttaggctcgcatgtgcaccagaagatctataagcacaagaagtgaagcttactgtgagaaatccatcttgtgtatatgtatgtatgcaaagtatgaggtggtcgtcgggtggtgtcaaacgtcgacagctcgaacaggagccgaagctagccgcgactagacggatcaactacaggatttgacaaagaagcactatagaaatgacttggaagataccaatgaaaatctctacaaaaccagcacagctctaggtcgtctgaagatttttttccctttgcccttcctctttctcataatttattctttgacgtaactttcccactctatcagccctctccctctagttgcccctctccttctcaccaacatacacacagtagactctacagcactcgtcaaataaactcatcatggctacccgtacgtgttctttgttagacctgtgatcatactctgaccttggtagtcgagcagagttaaggaacgttcaaaagagagaaaacagctcaactcataaacggcatttgaccgatactctattttctttccacgatttccttctttctccttgccctatcctccaggtgtccagttcgagaactcttccggttagtttgctttccttatagccagataattctgctcctcgaaagagtgctgacctcgcctatcggtcctgtcgacctttccttctgatctcgttagatgtcggagtgttcagcaagcttactaacgcgtgagttggttgacctcttcataactcaatcactctcttttcgtccatgcgtatcatctcactaacaacccgtctccgacttttcctgtgctatcttcagctactgtttgaccgccgttggtggatccgtcaacttctactctcactttgaggccgagcttcaggatgtgattcctatcgttaacaccacgattggaggaactcgaatcattggacgactctgtgcaggtgcgtcttctcttttcttcttccttgcaatgccagaaatcgcatctgatgagttgcacctctttcctgtcttttccccttcaacgccaacaggaaaccgacacggacttctcctccccaactcaaccaccgatcaagagctccagcaccttcgaaacgcccttcctccttcagtggccatccagcgagtggaggagcgattgtccgcacttggaaacgtcattgcctgtaacgattatgtcgcgcttgttcaccctgatatcgatcgggagactgaggagataatagcagatgttctcaaggtcgaggtcttcaggcagactgtggcttccaacgttcttgtcggatcttactgtgcattgagcaatcagggcggtctcgtccaccccaaaacgtcgaggagcgagcaggaagagttgagcagtttgttgcaggtccccttggttgtgagtggttgtcttcctcttctattgttcctccctacttttaccttggttgtctccgtttttctcctgctcactagggtctcgtatctttgcttgtgcttttctttgccacaaaggccggtaccgtcaaccgaggttccgatgttctgggagctggtctcgtcgtgaacgactggtgtgctttcaccggaatagatactactgctaccgagatcagtgtcatcgaggccaccttcagtacgttccgctctttcctccccttctcgaccctgattgtcatctaacaaggccacctgtctttgtcggaaacagagctccagggacagtcttcgaccgctatcatcaacgagatgagagattcactaatcgacaactacgcataaaatggatgtattatatccttgttttctctttggctttactcgtttagaatgtactacgtcatacttttatcttttcgttgattcctacaaagacaaacgcaagctagagaaagtcgagcaagaaagcaagctagctcagaggaggatgagttggaaagtgcaaattgttcgaacaaccgaccgaaggcaagacttagacaaaatcatttatgacttaggtagaaaatctggaaatccgtttacccccgggtgttcatccttactttctttacttctccctcaaggacattgtaccacaaagcaaactcgacaagataaagaaaaatggcacctcctacctctgaatccgttcagcttgcagtcctccaatatcttgatcagtcagccgatggaactttggctgattctagagaactcgtcgtggacgggacgccgatgaagggaccagcagagcagatcatcgtcaaggccgccgtcgatagtttggctcgacgagaggtgcgttctctcctttctcctttcttcttcagctctttacattgcatttgagttctcccagctctgtattgttctggaagacgatgctgagatggtagtattgacggaaaggcttgatagaggacgaatcatcatctttaagaaagctcgcggctgatagagagggagaaaaggctgcattgtgaccaagttgaaaaagagttgaatcgaatcaagagcgagagtactgaactttacgaaacttcttgttcgcttctccgaatggcttcatgaatcacaacagatgatttcttacgttcagaaggaaactctcgtcaacatgctcactccagaagggatctcaaccgccaaagatggttcgtttgaagtccgattctgggcggccttgcctctcgtcggtgaaggtgaaggaaagactctcaaagagatccaggaagctattggagagtcggtcgctaagctcggtcagccgacagcaatgaagaagaagtgggtcactagggacggagtgaagttcttcaaagctgtgagctctctttccttgttttctttgttccttccaaatgcctcaagtggcagggactgtcttttggctgatcgggacatatggggacgatctgctttcaagattcctgccgttacagacgatagtcagaaggacaccatggaagtcgagagcactggtgctcacgccggaggagacaaggtgttggcggatctcaagaagcgaaagctcttaacccagaagtgagttgttctcctaggttcggccttgacacacaagagtagatgatttactatgttctttgggtttatgtcgaaccccaggaaatttattttcttctcggccgcaaagggacctgagtttgctctctctatcaagaaacaggagaccgatttgacgaccgagatgatccaaaggttgttcggttttccgactcactgtattttgcgtacatgtatgctgactgggcggcctctcttttcattgccgtggcttgcggacttgtagcggagcttggaagaacgcttccttcaagaaatacaactttgaggcagctggtgtctcaccagagggaggtgcccttcaccctctcctcaaggttcgagaggaattccgaaatatcttcttcgagatggggtgagtgtacttgtctcgaggtctgggtgtgccggtttattacaatcgcgcttacgacaatattctcccttttcttcaactcgatagattcaccgagatgcctacgaacaagtttgtagagtctgctttctggaatttcgacgccatgtttgtgcctcagcagcaccctgctcgagagatgcaggatactttctacatcaaaggtttgttctcccgtgtctttttaagatcttcacttgcgtgtgcgcactaaaggtctttccttccggtcgtctggaacataaatatttggggtttgaattttcagagccttctacgtcgggttctcctcctgccgactactacgagcgagtatcaaccgtccacgagaaaggaggttacggttcgatcggttaccgagctcctttctcccagcccgagtctgagaaacttttgcttcgaacgcacaccacggctgtgtcgactcagatgctttacaacttggcgaaccagccgggcggattcaagccgaccaagatgttcagtatagaccgagtctttagaaatgagactaccgatgcgactcatttggccgagttccatcaggttgagggtgtcgttgccgattacgggatcactttggccgatctcattggtgtgtctcttctctttcttcatttctccgaactttctttctcagaccgagccttgactcatcaatccgaaactatatttggcattttttccttccaggtttcatgaccgagttcttcaagaagatgggtatcgagaatcttcgattcaagccggcttacaatgtatgtttttttcttcttcggacgaccaggtttatcacttgtctctttgtgctgttacatctacaccgatgttgttacataaactcattcgtatatatatttctttgatcgcatccagccgtacacggaggtgggccttctctcaaacagatgtacctatacttatctccgacacacgtcgtctaacacttttttctattttccctcagccttcgcttgaaattttccagtaccacgagcagctcgacaagacgatcgagatcggaaactctggtatgttcagacccgagatgttggagccgatgggtatcccgaagggcgtccgcgtactcggttggggattgagtttggagagaccgacgatggttaagtacaaaattaaagatatccgaactctcgtcggacacaaagttgacgtcgatggggttagaaaggctgctgccgttcgtctagacaagggggtcgtttagaacgttcatgtgtgcaacatgatttgtagggatcttagtacggacggtgtagctattgaatcttttatgaacgtaatagagaatgtactagaacaaggttaatagaacacaactatgccacacagcacaagatgcctagaaagatctagaagcttttctatagcccttagaaggattcaaaaaaaaaagaaatattcaaataaaagtcaaaaaaaagggagggcaacttgttgcttgtcgtcctctctttttcccttttctctccatcatccaccacttcgctttcgttcgatcccatttaccagaacaagtcagtaccgttcacgttcgttcagaggtccacggaagaggaaagaccaagatgcccggccggtttgttcgtgcattgaagaatagatgtgatattgactgttttgttacatctctgtcctccatcttccttcgccctttccctccaccttctttcctcaccgacccgttgcgattaatgtctacagttgcaatcaaaactaattaaaatggccgctcctgagacctttggattccaggtatgtttttgggctaactgtggcgactgtatttttgtagaaactatttttactgatgtgtttttcctctttctcctttgcttcgttctggaaccttctttgccttctttttctcgatctcttataattaacgaaacataggctgagatctctcagcttttggatttgatcatcaacactttgtaagtctgttacactcccttgcgcgccaatgttaaacgtttgcgcttacctcatcatgttctttacctatgacagctactccaacaaggagattttccttcgagagttgatctctaacggatctgatgctcttgataagattcgatacgccgctttgaccgacccgtctcagcttgacaccgagaaggttagctagctattcttattggcttgcgcttagttatatcggaaatagtgacaaatgctcctgtttttctctttcactctgtaggaccttttcatccgaattacccccgataaggagaacaagacccttaccatccgagataccggtctcggtatgaccaaggctgacttggtcaacaacttgggaacgatcgccaagtctggtaccaagtctttcatggaggctcttagctccggagctgatatctccatgattggacagttcggtgtcggtttctactctgcctacctcgttgctgagcgagttcaggttaccaccaagcacaacgatgacgagcagtacatttgggagtctgccgctggtggaactttcaccatcactcccgacactgagggagagcccctcggacgaggaacctcccttaagctcttcttgaaggaggatcagctcgagtacctcgaggagaagaagatcaaggagatcgtcaagaagcactctgagttcatctcgtaccccatccagctcgtggtctccaaggaagtcgagaaggacgtcgaagaggaggaggagaaggaggaggagaaggaggagaacaagatcgaggagattgaggatgaggataagcccaaagagaagaagactaagaaggtcaaggaggtgagaaatttatgtttgtagcgttctggctcagcgaaacgattgctaacatcttgtctacgattagatcaccactgagaacgaggagctcaacaagaccaagcccttgtggacccgaaacccccaggaggtcaccgaggaggagtacggagctttctacaagtcgttgtccaacgactgggaggatcaccttgctgtcaagcacttctctgttgaaggacagctcgagttcaaggccattatctacgtccccaagcgagctcctttcgacttgttcgagtccaagaagaagcgaaacaacatcaagctctacgtccgacgagtcttcatcatggacgactgtgaagatctcattcctgagtacttgaacttcgttaagggtatcgtcgactctgaggatcttcccctcaacatttctcgagagacccttcagcagaacaagatcctcaaggtcatccgaaagaacattgtcaagaagtgcatggatatgatctctgagatcgccgaggacaaggacaacttcgccaagttctacgaggccttcggtaagaacatcaagcttggtatccacgaggatgctcagaaccgaaccaagctcgccgagttcctccgattccactctaccaagtctggggacgagcagacctcgctcaaggactacatcactcgaaagcccgagattcaaaagtccatctactaccttaccggagagtccctttccgctgtccgagacgctcctttccttgaggtccttaagaagaagggattcgaggtcctcctccttgtcgaccccatcgatgagtacgctgttacccagctcaaggagtttgacggtcttaagcttgtttgtgtctccaaggagggacttgagctcgaggagaccgacgaggagaaggctgcccgagagaccgaggccaagcagttcgaggagctctgcgctgccatcaaggagaaccttggagagaaggtcgagaaggtcgtcgtctctaaccgaatcaccgagtccccctgtgtcctcgtcactggtcagttcggttggtcctctaacatggagcgattgatgaagtcccaggctcttcgagatgcttccatgtcttcgtacatggcttccaagaagaccctcgagatcaaccccacctcgccgatcatcgttgagctcaagaacaagttcaccgctgactcttccgacaagatcgttcgagacttgacctcgctcctctatgagaccgccttgcttacctctggtttcaccctggaggaccccacctcgtacgcctcccgaatccaccgaatgatcgctcttggtctttccatcgatgaggaagctgcccctgccgagcccaccactgaggccgccgccgacaacgttgccgaggcctctgccatggaggaggttgattaaacggttgatattctccatcaatagaaacccttcctttcctcttccccctctcctcaaaacaagaaggtcttggcattttgtcatgcctctcttctatttttaacgagacgtacgacattctcttctttttattcgtttcttagttcaagttcttttcattgcatctattattttttgtgggatgtattcgtaacaaatgatatgtcttaatctaatcaaaagcaaaaacaagaaactcttgaacctgattacatgagcttcctcttgcttgcctatcaatattgccacgacgttatatgtagggaagtcaacatatatgcatagcgtacgtgtgttctctgtaagcagtgatcatggtcagacaaggggatcgagcaagggagagcaagagaggaaatgccgaatatatagaagagaaactggtgattcatcggaactggggaaagaaaaggaagagacaaatcaattactgctagaacaaaagatcgcgagacacaaaataagaatttggcccaggcacaaaaagagaatttgaacccaacgcgggactcgaacccgcaaccttcagattagaagtctgacgctctaccaattgagccagccaggcgcttgatgttaataatcctttattatgaagtatagccttcacttcttgttgctcccacgatgtcttcatccgttcggcttcaaagattcttcaaatcatagtgtgaaaacgggcttttcgctctggtacttgttctccgtcaagtctttattggtttctcaaaatcatatgcatatcaccctggtgtctcaataagatgaattgaggagctaggaaaacaaggaacgaccggcaggttttgcgattcttaaataaacacctcgaaatctttgcatttctcttggcctctactcgttcttcgcaccatgttttgttgaaattaacagcttgagcttcaatgtggttatgataaatcaaccacttttcggttgtcattgaagatgattactgaaataaaagggtgaaaatggacttttctttgtggcacttgttcccaatcaagtcctcactggtttcccaaaccatatacacaccacccaggtgtttcagtgaaatggattgagaaaccaggaaaacaggagggagcccgctagaaaatttatagctcttcggaaagagaggcttgggactccgcgcagaaggaggtcggaaggtgatgtctcaagagtagataacaaataacagatgaaattatgtcaagactgctgaaatcccaacagtcattacaaagtaatagatcgatggatgtgcgagcatgttctctccctcttacatatgtcacctagagttttgccttatttcggttctctaaccacttgctgaacacctgaggttgctgtgtaatcagtttgacagacaggacaagcaaccagaacgaaagattaagcaacccaatgaggcttgtctctaggatgtactaaaccctctttccattctttccttcccgaccctatttttctatagattcaggtccaccgggatatgtaggagagattgagaatttcagtggttcaatatctgaattcttgtatctatcaaatcttttgcattgactaatgttctggctttctgacctgtgagttccttagaacagagtataagtctatataatatttgtggatgtttttctgcctaaaaaggcgctgcagaaagatatgtacagaccttgtttatgtacaaaagggaatggattatagagaatgttcggagattacaagtaacggattatgaggtggcaaacaaaaaagccttgaaagagcgggaagataggagatgaatgaaaaagatgataagaaaatctatttggagaaaaccaaaggagctccctcagtgatcaatcgaccaagagaaatcgactgtttggggacacaagcagtggcattgtggttaagggcgtatcctcgctcgcagtcgaggacaacacacttcgactcctggcactcgacggagccggcatgaggaatgctggtgcaatcgagaccggtctgagctccagggaagggagaagtgcatcctccgcctgttcaagaacataggaatgtcaagatcaataccaagccatagtatgagaatacaaaaagatatcagaaaactaacaagactcaatgttggccttggtatcaatgcactcgaatccagaagcgccggacaaagtggaaacagggcaggcagtcatggaaccagggcaagggtttcgagatcgggcgttgaggtttcgtcgtcgcgctccgggagagatgcaggtctgtccgttggcaacgcactggccagagcatcgctggtatccggttgcacaggctggaaagatcggttgtacagatcagccaggtactcatgtctaaggggcaatgtatggcaggggcaagacttactgaatccacacgttccagagcaatcgttgggaacagagttggcagggtacttgcaagaagtagtcttcgaacctaggagacccagagcgatgggctgagcaagggtaacaagcgagttgactagagatggaagggaagagtttccatggtcagtcggacggtagcgcgagtagttgaagaatggagtagtctatacgaacccgtctgtccaattaacccaagaagtccagagttcttgctggctccggcctggaggttcaatatagactgaggagtaagaccgttggcagtctaattatataaattagataaagagtccgatagttgattagtttaatggtcatcgaaacaagacggataggtttagacgcacggcgcagatacaggtgcttcccaggtcgatgataagaaccttgacgttgagatcaacctgggaatatgacaggaaccagaaagggcagatgataagcgtacgatagacaaaggaatatcgagggatgcgctagggcacttacacagataggagcagtgatcgctccggcaacgagcgaagccgcagcgaggaaggtggcgaaaaagttgagggcgagcatcttgagacagagacggaatgaaggaggggaagaagggaagaaagggagacagggagatggaaagaggacggagggaaagagtaagggaagaagatgaagaagaagaagaaggatgaggagccagaaagagaggaagtacacaggacagtcatgcctcttataccttgggtttctactgactcctacacctcgatgagactgcgacacattctagattcgatagtgcctcatttctggggcttgaatcggatggctaagagacaagagacaagagacagaaactctatcagagcccgatggcacttggaagaagattatcagggctgaaaagaggccattgtgcgcgcatgcgttctccagggcagagcatccccagttgcagaaacatgattagaagatgtttattagctcaatcaatcttgatcggtcgtctctgacttcagggaaccaaaacagcagagtgatatgtgagtgtcaatataagcctgaactttatgagatatgacttcataagcacagagttagtccatttaatccaggtcgatcctgtgaaggaaggtcagtatgaggaacgagcggtctatggtcagttcaacggaaactaaattagacatatcaagacacgtcggagggtgttcagaggtgtcggaggaggctaatcggatgccctgaccgatatcaatgccaagctccgctccatccggatcagcgaatctctcaggaagatattctagtttgaccttaaacgaccaaggtcgaatggtagaactcgtgcgaaggaagatagaggacgttatgaaatgtcctgccttgtgaggatggaggtattccaagttccgagacacaaaaacattatctatgtgggtcacatcttatgtgcctgtgacagggacaaaaaaccgacagggacgacaacagggataacaaacaggaaacaattgacaaacagctgacagagaggagccgaaacgataatttacagtggacagaacagtgcctaaattatgtaagcaactgtgagtaaagtttagattagacaggatgtccccaatgccgacgtccccgatacaaagatcggatatatgaatgaaatatattatcgttcagacacatccgctcagtagccgatgatgctagatgcaatcccggttcttcttccgagcccggacctatcgattgttaaattctatttattccgaggcgtaacctttcccaagttacccgacggatgaaaactcatgaaaagttctgaaattcatcgaaattgatcaaaaatcacctcattttaggttacgaccctgcgaacccctaccattttggttacctgcccttcaccaggaagagaacgaggaggcaagaatgctagtgtttggcactgccaccaatgctcatgctgacactgcctaaccgacaggggcaaactagatccatagcccatgacccataggatcttggtgggtttgtggtctgagagcaaccaagtccaagatggctacgtattcaccccaagttggctagggttactctcatcaagcctaaggcttacaattatagcggcgtgagtgttagggttgtaaacttccactcatcagttttccagttgacaaacacatctccctgttgaggttcttccaccgttgcccttctctctcacattcaacacatcatggccaacgtccatccctctatcccattcccgccaacaccagttcctcatgctccatctcctctaggttttggtttcggtttatccaagccatcgtcctctgtttcttcgttcgggtttggctcgacaccagtcaagaagacacctggctggggatcgctccattcccaatcttccttcggaggtggcccgtcgccctcttctgcttcagcctttggctttggaggatctaacctgccttccccatcaatcctcacttcggcctcacaatcagatcagctggtctattctcatatatcaatcggatcaccccagatcaacaccccgtttggaaagagaaaggcatctcacccagttcctacacccccacctacattatcttttggtcaagggtccaactcccgtcgccgagaaagagaagaagatgaggacgaagatgaagagatgggagatagcagatcttttggtggaaggcacgtgaaaccgctgaagaagagcagagttaacgccgcagacgaggaggagcctaagagtactcagacgaaacagagaggttcagaaacaaacactgcagaagatgtggacttgggagtccttctaggttcgttgtttactctctattctgtatgtttaatttgaagaatgtgcaaggaaacatatacgtggatttaccggaaatgcacttcatgaaggagctgtggctaccaacaaatgataaagacagacacatgaactgacccacacatattcaatttacagcacttctgcctccagcctcgctccttccgatcttgacatcgctgattcaacagaacccgtcgcttaagtcaaatgtacttgctcttcttcccagtccatcgctgccaaccgcgctggaagcactccggatagcagaacagaatgtgatgtcatccatcccgtttggatggtccaaagcgggtggaaacgtaagcgaaatttacgtgttgggaagagtgaaaggatctgtaggcgaagtagctacattggttcgtatccagttgatcctactcattaatcttagaatgcggcgtcgacttgtcttcattcttccatcaagtaatctggaattgacgattaccttctcatctcttgatattgatcataccttttgtttttgtatttagattcgatctcatctcccgttctttaccacccagccgacaccttctcatcccactacgacattcagctacctttctcaaagcacaactgttttacttcgactgactcaccttttgcccggtccgctcgaggccctcgaagtcgtctggcctgtactcgcgaacgaatggcttcagtgggttggagctgtgtccagactggtcaacgatgaaggaggcatggtcagtgctaacgtggctgaaggttggatcagagagctcgaaggtttggccggagatgaaggtcaaggcgtgggcgaagaagcccagatcagaagccaattgagagaggtcgggagggcttggattggccaagttgggtggctcgttggtaggcgagaaggaggtatgaggatggagtagttatctattcgatctgggtcgttcttctctctactttggcttcttctctctgctgtacgggtacctgtgcctcctcacctcactttgcttgcatcttcccattatatacaacatatatgttctcttttgattctctttttcctttcccttcctttttctctcctctttgtgttatcttgtcctgctaatgtatcctctcttcgccatacctttcattcaatcatctgtaccagcatcccagcctcccttcctttctatatccatcctgtcactcttcattctccttgatcatctcctcatcttgctatccttcccttcccttctccttctttgattatacatgggcgaacgcatactcatcatcctccttacctataagcacgtctactaaatacacggaacacttgtcaaaaagatcgaagcgaaaaaatctgaacgcatctttctttaggtcttcatgaaagcatcagcttagcctgcaggaggaatatctgatcgccatagaagtaagaaaagtcaagagataatgatagagcaggggaagaaacttgggctctgatgctccttgattgaacagtcctcatccgtcgcctacataaccctgacgcagacgaatatcgatttatattacgtaattgttttctatttatcgcttctgtttcggctctccttttccttgttcttttcccagtccggtcgttcgtactctttggacgactcattatcatcggcaagtctatgaaccagtttctgttgtttcctgatggcacgtctttttcagctctgggagaaccttgaaggaaggatgagggacgagcgataaaagaaaagaacaaggaaggatgtgatgaaaggcgcgagggagggagttgtacatcatcgagagatcttggatacgttcatgccaaaagaaaagaaaagaaaagaaaagaaaagaaaagaagaaaagacactgagaaggagagaaagaagaagaaaagaccatctaatcaaatagagggacaagagaacgagccgataaaagagatgaaaggaacgacgcgattactttcgcttgaccttctcgagaactagaagtcggaaccgagagatgagaataagcttttgatcgagataacagccagagaagagcagatgaacaaaccggtagcctcggagacctcatcgaaatcagttccctggatctgttaacccgtacgcgcatagagagtaaacacgaagattcgttgtcagccaactcaagcccatcactcgatccttccaaacaagagtccaacggatggcgtagataaagatgttggtatctaaatgtacgaacctcggtgtggataccaacgagggactttcgaagagcctacaaaggagaaaaattccttgagttagcctagtccattctttgacttttcaaaggcgacacgaaaagatgcgtctgctatgaggatatgaacaacaactaacatctttagaagcagcgtagaccatcttaggcttgatcttagcaccatcaggagtcctacgtatagcaaggcgatagccggacgagcgcggcgagtgtggtgaaaagaacagcgagaagaatattacaacaggagattaaatcagagaaagatcaaacacaatcagtataggcagctgtcgtttcatgaagagaattctaaccccccctcactcctgaagatgctcataagaccgaaggaagcgaagaagacgaaccacatgtagaagacgagcttgtttcggataccctctccggaatcgaactcgaagtcgtacacggcccaccggcactcgttctcaggcagctgctcaatgaacgagtcgtacgacttctcggtcgatttggagagcacaacaatctcagtgttatctggagacatgccgaagacgatgtacttgatcttcttgccggccttaagctcctggtaagcggagagacattcttggttgacggaagctccagatgactatcgtgagagggttgtaattagaaacgagggcaagtcgcaagaaggaagtgaagaatgagcgatgaaggtcaacaatgagatggggagattataaccgagcgagtaagcgatctgatgaacactgtgaagaacgaccaggaacggaacaaagaaaaaaaaactcaccattgtgaataagataaaaagataagagagagcgagttaagagaacgagattgagagaggtgcggtcgaagtgagagaaagaggaagggagaaggagaaagaaacaagagaaaaaaaccaaatgaaggcaggaaggaacgacgtgagcgtgtcggcttacgtaagggtgtgtatcccgtagtcgtctggtctctctttgttatagtctggtctactgttcatcttgggattttctatttgctctcatactgtatttagttttgcatcttgctactgccatctgtctgttcactatctcctgcattgtgtcaagagacgattctcttaccaagatgagcagcgattctttcagaattcacaacccatcggcatctccagcctcatctgctcctgcatcatctgcaccaggatcgccttcctcatcttcgtcaaccaactcgacctcatcgtttaacgcgtctcggccggcagcggcttttagagtcccacatgcacccaatcgaccaagtccgttagcagcagctgcacagagttcaggaaggaggtttgtaagctatcagggcaatagcgacagcgaagatgatgagcctgctggaggagcaagaatggtttcgaacggagacagagataatgttggcagagtggatcaagaggtagagttggggtgggtgttggatgccaaagggaaagggtacgtcttcttcatcttgagctagattgccacacggaactagctgtagactcagaactaacgaagatatgtaaacccaacagcacgtatatcaccccacaggtcaggtcacaagaaatcatcattccttccctcgccaacaaagactggcgaaactcctctcgagcagcaagctcccgtgtggcaacgacgacagcaacaaaaactcggaaaaccgaaatctaccttccacctggagctaagacggatccaaatgctggcccggttaacaccagagagatcactggcgatggccctgaggaaggtggattgatccgacatgtccgtctagcaacttctaccgttgccataagcacgaattctactcctgaagagtccccgactggagaaggcagtgtgaaagccaaagaaaaggttgaactgactttggaggagagagcgcttagagcagttttggcttcggccggtgaacaaggctcggacgacggtgaagaacttgatgctatccctaagcaagaggatcagagacagaacacgattacagaggaagaagctttcagaagggatgtagagaccagaccagatgaggtatgtgttcttttatctgcgcgcgtctcaagaatcgagctaacctttctcttggctttacctgccgtgtgcctcagtcttccttggacgattatgcccgagtgcccgtcgcgtcttttggcttagcacttctgaaaggtatgggctggaaggaaggtcaggccgcgtctcgaacccgacccggcatggtggaagcctatgttccaaagagtcggccgtcgttactaggaattggagcgaaggaacgagacgcgccaacattggcaaaaggagagaagccaaagaagccatggaaggtaaaggaggaggcacgaaaatacagcccaatcgttagagtatctagttcgaaagaggtaagtgtggccttcacgattgccgttgccgttatatatctaccaagctactgaacatcctactggacattttactgatactatatgttcctttgtcttttacttttatgtacggaatcatcatcatcatcactccttctatgacgtcttagtcttctgtatctcgttcgccgaatccagattctcgccgaccaagccggtctccatctccctcgcggagacgaaaagaaggtgaccgctctcgagactacgctcgagaatcagctttgacttctagttctagacggaaacggtcgcgctctcggtcgcgttcgcctgataggtcttctcgcaggcgggaagatcgggatcgctcaaggagtccacgaaggaggagggaggagggccggagttatagcagtaggaacgagaccgagagcagggaccatgatgaccggcgaaataggtatcgagacggcagaccagattatgagagggatagagatagccggagggatgataggcgggacaaagattgggacagaaggcggcactagatatacgacatacctagtatggctttgactatagagtcactcaaccgatgatggtcgataaatggcccttttggacttggatcctctcagaccacaacccgcccaatcgtcaaggatgtgagctgagtgttagccgtctgtagcctgagtaccatagatccaatgccagagctcctactccttgggtgatgcatcaactgctaactatgtagacgtacaccgaatgtgccagggccacatcctatgatctctgcttgcgtgcaaccctgtcgttctatcctttcgtgcgatacgtttgtctgtgtatctgcctgtcatactacctccatgcagtacctccgtagtctgggaaccagatatgaaacacgcttcctttgccacccatagcatagcctccgaagcctggaccctttgttcatccacttgtcattcctccgtgctgctcttgttcccagttcgtgtactcgccatacaccagtgtaatccatcatcgagatctatcaactctgttcccttgtgcctctgttcaccccagttccaatctgagagcctgaagttctacttctgcgctcgtctctgtatcgatcgcgcatcctctgaccgatgggatctcggtggtttgtggtcttagaacacccaaatccagaagggccatgcatcgttcaccatcagttgaggttgctctctatcagtcaaagccatatagctgttcaaacaatatatctgtatcgatctttactctcagatttatattcatcctatctacaacacctggcagcactgaggtagcgagtccgaccaaagaagagaaaagatctatccagacaagcatcccagtatgtgttgagcttagcctatacacatcagaggtcgagaacgatcgcaagaccgttggctggctcgactactgtgatgatcatgttgtacacctgacaccggacgtctagatgaacactgctgaaattagctgcacgcggctcgatcgaacgaattatttctgtctctttgtctctctgtcttcctgtcttcctgtcgctttgtctgtaaactgcagacccagcactgatagccttcacgatgttattcatcacgaccgacggctaatcaaaccggttgtaggagatattcctagtaaagggggaacatctacttatcaaaggcttgcaaagacacacaaagtgcaagaatggagaattccgcctgacttttgtcggaaaaaagtcagacgcggcagtcttgtcagtcgtccaacgaagccagccaaagcggccctttcttagacaggctctcgatcttcaaggttacctcaatacttcgtacgtgtggattcagcaatacacgtcccttctccatcttttgacagagtttgaggaagggactttttttcctaaaagaagaaatgaaaatacggaacctttgactgacgaaaatgttcgattgaattctgctggccctgtcatttttttgtctggtcttgatatctcccccggatgcacacacaaacttgatggaaacttctcctttggcctcacgaacctcttacccaaaaaatccaaatccaatcctcgaaaatttgccctcctgaacttcttattcctcaacctacacatccaactctgcttttaaacgcgaaacccgcttttcaacccctgaaaccgtcactcaaaaacccctcgccgtccttccaacctctcccaaaattttgtcaccgttgaacacatacacatttttgacctagcagaagatgcccgctcacgtccccatcgtcaagaagcgcaccaagcacttcaagcgccaccagtcggatcgataccatggtgtcaaggagtcttggaggaagcccaagggtgcgttggaattttttgcagcaactgagtaaagagttgaggaaacagaagatccgaagtggacaacaagaaacaggtctcggacagatgtagtggtctgagacagtttaataggaggaagaagactaatttccttgatgatattctggtgttggattggggtttgatttcgttctcggtacaaatgaacaggtattgataacaggtgtgtacactttcttcttcttcaaaagtatcaagtctagaagatggaagaccgcttgctgtatatccgagactgatccttacgttgtcttttcttccagggttcgacgacgattcaagggacagacccccatgcccaagatcgggtccgttctacattttcgcaagcttccctgactaatttgattattctctaatactcccattttataccgtttctcttttgtcctggtcacctcctgtccccctttcatattcgtcctcaaatggtcgattttttcattccctgccccatttctctcatcatcatcccttgcgttcaattgaacaatccagttacggatccaaccaccttacccgacacatgaccccctctggtcacaaggtcctcctcgttcacaacgctcgagagatcgaccttctcctcatgcacagcggaaagttcgctgccgaggttgcccacggagtctctgcccttaagcgaatcgatatcatcgcccgagctaaggttctcggtgtcaagtaagtccaaatttccttcaagccatatcagttgaacgcacagtgtgatatgatcgatttctgacttgttgttataatctactgtgtctctacttagggttaccaacgctggtgcccgactccgatctgaggagtaaaggatgtgcacgtgaatgacatgtacacttcttgaatagttttgatctgcgagaaagcaatacacagttgatcactggcgacacactgaggcatcaatcaatttgctaaacaatcgagagctttgtacgttgagatcaagattgacacaacactttggcccagaaggtgatgggaacattaatgatcaagcagaggacgattgagccggcagcaagtaggaataatttggaatcgtcaatccctatcagcacacgattgtccggataaaccacatgtacactggaactcgacaggtctcttcacagacccactctctggatagtctgtacggacccatcgtgattgccatttgtctttctgaccgtatctgaagttacagctgatgaataatgaagaaaatcttcacagccaagataacaataccatctgggtgtctaactgaaaaagagatccagcgagaatagaacttgcggctctctgctatcatctcataactaacggacagaaagaaagaaaaggcccgcacggaagagatgacggaaaaatgtgctggaggttgttgacgtggcaagggacaggagagtttggagtgtaaaattgcgcagtttctaggcgattcgctcgaccggccagccccttgccagcacatcacaaaaaaaagagggaggcagcaaaataaaatccctgccacacaagatctctcttttttctctttctcctccatcttcatcaagaacaaacagaaaacatccagcgttctcgccacctttctttagaaagaattctatagagaatcaatcttttctctttctaaacatggtctcttcaagcagtcgctcgccagcgcgacttctttctactctctccttcctattctttgccatcctcgctttcgtcgcttttgggtcccagggggtccgagctgagggacacgaggaatacggaactgttatcggtgggtatcttttctgctcctgctgttctttctttttcgtattgataaactaaagatgagcgctgacaagttgtctttttgttgtcttcttttcctttgattttcaggtattgatttgggagtatgttcatctcatctcacttttttttctgtgcatttctgctgcccgtgttcgcatgtgcgctagtcgtcttgcacttcacattgatactgacatcgcttggttgctcaccctattctagactacctactcttgtgtcgggtatgtccatttcacttgcgtttttcttgctaggtgcatctgctcatctcaattctctttcttcctcacagtgttcagcgatccggacgagttgaaatcattgctaacgaccagggacaccgaattaccccctcttgggtcgccttcactgatgacgagcgaatggttggagatgcggcaaagaaccaggctccccagaacccccgaaacgtatgtgattatctgttttctctggtatatgcagaaaacaccatcttacaagcttattcttcatgtttgatccttgttccttgatagactgtcttcgatgccaaacgattggttggacgaaagttcgacgagcaggatgtccagaaggatatgaagcactggcctttcaaggttacctccaaggccggtaagccccagatccaggtcgcccacaagggtgacatcaagaactacgtatgtctccctccttttctactttcttttttgcttttccgtcaaacttaccgtttgtccaactcctgcattatgtctatctagtctgctgaggagatgtatgtatatcttggctgtacttctcactcgctttaacagattaactaatatatttccatacagctctgccatgattttgaccaagatgaaggagaccgctgaggcctacctcggaaagaaggttacccacgccgttgtcactgttcctgcctgtaagtcactttccacatcaatactgaatccactttgtgataccaaatctcatacccatatcttttctattcagacttcaacgacgctcagcgacaggccaccaaggatgccggaactattgccggacttaccgtccttcgaatcgttaacgagcccaccgctgctgccattgcctacggtcttgataagaagggtggagagactcagatcatcgtgtacgatttgggaggaggaaccttcgatgtttccttgctttcgatcgacgacggagtcttcgaagttttggccaccgctggagacacccacttgggaggagaggacttcgacaaccgagttatcgactacttcactaaggagtacaagaagaagaccggaaccgatgtgactaccaaccttcgggccatgggtaagctcaagagagaggtcgagaaggccaagagaacactgtcctcccagatgtccaccaaggttgagattgaggctttcgagggtggaaacgacttctctgagactttgacccgagccaagttcgaggagctcaacatcgatctcttccgaaagactatgaagcctgtcgagcaggttctccgagatgctggtgtcaagaaggaggctgttgatgaggtcgttctcgtcggaggatctacccgaattcccaaggtccagtcgctccttaccgagtactttggtggaaaggccccctcccagggaatcaaccctgatgaggccgtcgcttacggagctgccgtccagggaggtattctttctggtgaggccggtaccgaggatgttgtcttgatcgacgttaacccccttacccttggtatcgagaccaccggtggtgtcatgaccaagctcattccccgaaacaccgttgtgcctaccaagaagtcccagatcttctccaccgcggccgacaaccagcctaccgttctcatccaggtttacgagggagagcgatcgttgaccaaggattgcaaccacctcggaaagttcgagttgaccaacatccctcctgcgccccgaggagttccccagattgaggtcacgtttgagattgacgcgaacggtatcatgaaggtctctgctcacgacaagggaactggaaaggagaattcgatcacgatcaagaacgaccgggacagactttcggccgaggatatcgatcgaatggtcaaggaggctgaggaatacgccgacgaggacgccgccatcaagaagaagattgaggctttgaacggagtgcagaactacgtttacggactcaagtctcagcttgctgacaaggagggacttggtggaaagatctctggatctgataagaaggagatcgagtccgccatctctgaggcaacctcttggttggagagcgagtccgcttccgctaccgtggaggagcttgaggagaagttggccgagatccaggcgatcgtgaaccctatttcggccaagttgtacggaggggatgagcagccttactcgtgggtatttctttgttctctgttgtgtacactgtcatggtaacgttgtgtgttaaccgcatttgtctcttgctgcctcctgtacagccacgatgagctttaatcgatttccttttccttacctttccctttgcttttttgacgtaaactaagaagacgatgacaaggttgagagaatcagaaatagaaaaggaatctatatatgaataattgttgtcaatttgcactacttgttaccttgaccggacaaacggcgatagtttgttctaaacagcggctgcacacgactgaacaggacagaactcggttccatcgtctgcttcgcacaagccgttgggatgtggggtagatgggacaatgtcattaaaccgaggaaacccgaaagacgggttttaagagcggcacttcgccggcggcctggtggtgaacggtatttatcaagaaattcttaaggtaaaacaactctagcgctagttcgtacggtccggttcctagggttatggaatttatttgattagaattcaattatcatcattcattcaccccccaaagatctccattttctttttttctcttttcttcactcttttattttacatttccaaagactctcaaaccctctgtctggagctcatcacgatggttctactgacaaaagcctccttaggacgtattccttcgtacgtgttaaacctctctctgtctgatggtgttttgtcttctctttgcatgggccaaagggagatccggaaacggaaacaacaccagccaaggtcccggaggagtcgaaccgtcaaataacatctacaactctttagctgatctttttgtccctcttttctcgtctgtaccttctgcttgtttgccttctctgggtgcttgatctgttctcctcaattgtcaacggaccttctcctcactgttatcgatatccatgcatcgaccggacgcttgctatcttctgtcaactcaattctctgcatctcctggatctgatgtgaactgaatttcaaaccggcgggcttatcttctttcctcttttttttccttggccggatacatctctgtcttcttctaatcgtccgggtcctccgcaaaatctccggatgtttggtctgcaatcatcttggtccattgaatttcttggttgggtgggacatatttctaatctagccgggtatctgtgtcgtccaacttgggcaaccgattcaaggccaccaacatcaacgtaagctcgaagaataagaactatgtcgccatcaggtaagagtgctcttcttttacttttcttgtatcttctctgcgcaaaggcgactatgtatacatcgttggtctgtacttgcaagattagatgttgatagatctttctccctgcacgtcatgctcaatcgaccgactgtgtcatcaatttaattaggacaaacttgaagggagatgctctcctcaacacccctcggttaaataaggtttgtctctgtcgtctctttgtgaacatacacacgtacgtgtatcgtatggcgcagcttaggaacagccactgatgttccgaattgattaatcatagggagccgcctttacccgagaggagcgatcaatctttggattggagggaatgcttccttatgaggttcgtcatccgcttgattagtcgactgatgtgttggacctctcctcatcctcgtatcctcttttgttcttggcgatttgttggcattaggtccacgatcttgatgtgcagtgcaagcgagcctgggctcagcttgagaagcagccgaccgttctcctcaagcagtatgtcctctacttacccacctttcacacgctcacgagctcctaacatacgtttaccctaatttatctcttctcttatcaaagcgccttcttggcctccttgcgagaccagaaccaggtactcttctaccggttgatgagtgatcatctcaaggaacttctcggagtgctttacactcccggagcagccgaggtccgttcttgtatctgtacttcctaataccctatgaccaaagacagtcaagctcactgcatttcaactgcccgactgaacggatgtgacaggccgtttcgaattactctgccctattccgaaggcccacaggatgctacatcgtacgtcttacaatctgtttttctatccttaaagccatgcttccgctcgatttctgaactctctatttcgtccattcatccaatgacagtcgtttcccaacgcagacggaatggccgcccagctcaagtctcacttgtactccctcaaccgacaggccgatctaaatgagcgagctggggaggatgattccaaggcggcacccatcgatttgattgtcgttactgactcggaagccattctgggtattggagaccagggtgtcggaggaatcaccatctctaccagtaaagctgcgctctacactcttggagccggtatcaacccgaacaggattttgcctgtcgtgttggatgtcggaaccgacaaccacgcgttgttctctgatcccttgtacatgggatggaagaggactcgtatacgtggaaagatctacgacgagttcattgacaagtttatcaagaactgcaaggcgctctttcctgatgctttgatccactttgaggactttggattgtccaacgctcagagattgcttgacaagtacgccgacgagatcccttgtttcaacgatgacatccagggaaccggtgccgttactctttctgctcttatggccgccgtcggcatcaccaaatccactttggctgatcagcgaatcgtggtgtacggcgctggatccgccggaatgggaatcgccaggcagatcagagatggaatggtcctaattgatggattaacccaagatgaggctaacgccagattctggtgtgtggacagaaacggtttgctcgtcgaatcgatgggagattctctccgacactctcaattgcaatacgctcgacctgatgccgaggtcgccgactggccccgagaggaccccaaccgagaggcacttcggttgatggatgtcgttcgagccgttaagcccacggtgctgatcggaacgtcgacccaccagcgagcgttcaacgaggagctcgtcaaggagatggccagccacgtcgagcgacctatcatcttccccatgagtaatcctactagtttggccgaggttgatcctgctgatgctttcgagtggactggaggacgagcccttctcgccaccggatcgcctttccccccttgtaggacctcggacgggaagacctacgtcgtcgcccagacaaataatgctcttatctaccccgctttgggtcttggagccatcgtctccaagtctcgaacgctttcccccgggatgttctccgccggtgtccaggccctcgcttcgctctcaccggcactcaaggatcctcaagcttctctcttacccgatctttcggaagttaggtccgtctcggtcgctgtcgccaccgccgtggttaagcaggctgttgatgaaggaaactccagggttccccagttggagaatatgacgcttgccgaggtttgtttcttcttctctttttctgcatgcgcgcagggtctcaagagcagataagaactgaaaatggacgaatttctcatctttgtagatcgaagagttcatccgagctagagtttgggaccctgtgtacaggcctttaggttcgttttcccccttgtttcttctctcatcgctgtttccctcttctatgtgctccccattgacccttgttttatttcttcgtattattgttttgatttcttttagaactcatggattgagcgaatgaccagagcgttgggattggaacgacagcttttctatactacagttttgtctgatttcgtcttatactacttctccattcatctttcttgtctcctgtcattccctttctctttgccgcttgtggcttttcctccctttcttccaaccccccccctttccggtagtttttttctcttggtaatctgacagcaataccatgtgctttttctcaaactttgtttaattgctccatcaatcctcgataagcccacatcgacattctgatcaagagagaaacgaaatcattattataaacggggttccttcttcttctactaaaaaaaccaatgacaacactgaggtaaaacaagacagggtagaatagagaaatcaaagactgaaaagttgggaaaaatctagctttctgacaaacttccccgatcccttgttttcctcatctcttgacccctaaacttcacggaatctaccttttttgtttccgctctcctcttctttggctaaaactctattccgaaacgggcttgtaactttttccgccaacccatctcctccttcccatccatctcaacctcctagctaaccctctggccctaccccatcctcgcacgatccaatcctcagcccacctctccgacgcaagacagaggaccacgttgagaatgacgatacctagtagttggagtttgaacgacaactcaagagacatcaagtcgaggaagagagcgataggaagcgaaggagacaagagaacgtatgttgagaagacggagaggaccacgagacacatcaccaacgagactttaatgtcaaggtttgaggcgatgtttgaacaaggatatcagtaaattttcttcgatgagaagggaaaagtagaggaaggccagagaaagaagtagaaggcgaagaggcttacagttggtgtagagaggctttctgtaaggaggtccgacactgaacacagcagctactaagatgtattggaatgatgagacaaggaatagcgccgaattctcatagttgatcgtctcgagtttatctacattgacctctggttcttcgtacctgtgagttcggttcgaaagagaaatgcaaccgatcagaagaagattcggatttggaagaaaacagaaaacgccataacggaccaaggttgagcctttacaaggaaaaacactccaagctggatgccagcgttgataatcgtttgactgatgatgcttgtcaacacacgtttcgacaccaacgacccggccggtcgtttcgggtgaatatccgggtagggtaacgtacgacccactttcgtgattagttttgagatcagagcgatgagttttagtattttggaacaaatatgataagagacaaagcagagtgtcacatactggcaacagcaataggaatgataatgaagagatcgatgtactaagaaagcacgatgagagtgatgtcagctcttggtatactcttcagaatgaagatatcgtctaccaatgaacttacgagaaattggaaatctccaagggaagacgcaaacgaatacagctgtcgcaaatgaatgtgataagaatactgtgaacaaggtcaggaaatgagaaacttagctcaccagagtgatagtcgtaaactgaatgagagaatacaacgccctgtatcattcgttccaagcggtaaagcattagaacggacaggggagacacaacaaaagaacagaagtaactcacatgtatttgaaacaactgaaactcgtcactaaagcagcccttccctctctgcaaaaagtatccacgagaaagaacaccatcagattccagtctaaccgatgttatatcaaagaaggaccaagattaacttacttaatgacttctataacacaagagatatccgccacccgactagtgaaaggcgcggcaaccgaagcctcggcttcagacaatgagattcctacgtcagctgccttgagcgctccacagtcgtttgctccatctccacagaagcaaacggtatagcccaatccttgaagacgctcaactagctcgtgtttctcatcaggagacattcgggcgaagatcactcctttgataagcatctatcgacatcgaagtatcgcatatatgcacgaagacatcagtcctagcgctccagacgggactaaaccggacctaaagaaagagagagggagataccttctggaatgactctacaggcgcccaatcgaccatccaacggaaaacatcaccggtaacagccaggttgtactcttgaggttcatcctcgtcctgctcgaccaactgagtctgttgacgaggaacaggcttcatagtgtagctgtctagcttaaaatcatcatcgtccacagaggtccactcgatcaaagagttaggattgtccggggagcctatgtccgcaagaaaataggagaaacgacgaaatgacgatatatcaacactctcgaaccgtatgtgtttttgcacgaatgtgtaggatatgaactgaccttccaagaagtttggcaagaaaatgctggccgattgagagaccaatccacattctctcgctacgctaacggctgttcggacattgtctcccgtcaccattctacatgccaaatgggcacctcgaagtacactgatggccgaggttgtctccggtttgagcttattctcaaagatgatcaaaccaaggaattgaagatgcgactcggcttgctctctgtgcgatatgaggaagcatccgcctagttagtaggctgaaggtgacaaggatgaatgggagaaacggtgaacaacgaaccgtttcatgcgttgcgctttaagccacgtcagcccagggattgactttccagcgatagcgattactcggaacccatgcttggtgtagtacgacaaaagatcatcgtagtccttggggactggtgttcatgaaatcattccaattcgcaaaccagaagaaagaaggttgatggtaagaggagagattcttactctgtcaaaactccaggtcaaaaggcactcacaagatgcaggatcgcagatatcggccatcacttctggagcgcccttgacgtagacttccatgctaggtgacttgagcctctttacaatcacactcatccttcgaaggctcgacacaaaatcaaacgttcggatgactccaagttcaaggaaatgagcgtgctataaacaccaaaggaatagctcagttcagtcgattgtaccgaaacaccttctggagaacaaggaaaagaatagagacggacctttgtaccagacttgagagcatcctcgacctggaaagcctcacttgacaaaggccgaaccactgtctggactagcgtctgaggtctctctgctgtcttgccaggtattttggaggatgaagtcgtcgagttcgagttcgaattcgacgaacttgactttccagcccgaccttcttctagaatccaacgcgtgaagttgaacatctccatactagacaattgcacacatccaaaacccattagagaccaacaattcacaagagaaatgcccgcaaggtagacacaaaggagaacacgcactctaatggatctccaataatttcctgattaacagacttcaacgaatggcaagtggcgagcgcgtacagcatcggggtctttccatccaatccacctgtcgacggcacgtctgatacatcagaatgaagttccgagaaccttcctgtattcttatcgattgatcggatacccaggacctcaagaccttcctccgtaagggtcccggtcttgtcaaaacagcacacgtcgatctttcctccgatgttgactcggttaggagagatgcagaagatgccgagctttcggagtcgatcaattgcaaaggttgtgccaattgaaagtgtggcagggagagcgggaggaacgacgacagtgatgagatccaaggctcggataaggatagtatgccatttgatctatgggcgatgaataaggagagagacgacataggtcaagcgcctgctgaatagggttatcaaactcgtagagatgacttacaccgatttcgatgaactttccaacactaaatggttgaaatatgtgtggaacaatcagttatgaggtcttatcttatgaaacgaacttgagacgtacctgataaggaatccgaaaccagcaatcaaacccagaacgccaataaatcgcatagagtctcggctgaatatatgacacggtcagagcgttgaagtcaatgacagagaacacctttttaaggaaaaagccagaaggaacttactagaacttgaaacccataggcttagggaataacattgatcgtaccaaagcaccttttgtcgtgttgaatcctaagaaccgacccgcacaaaatatacggtcgtttttgtcagctttcatgtatgtacaactcccatcaaaagattggaacacggagaagaaggagaaccgacctgttcgaacaaccagcgccaaagccctagcggctgggttctcgtttgcgggtctaaccctgataatctttgtacccgaaaacaaaaagttcgcagccaatgccggcgatacgtctgtactaccatttttttcttctaccgagagtccaagaagagcatcgtctttgatcggcatctttgcaacaggtaccgattctccagtgagcatggattcattcacaattgcgtctccagtaagaaggacggcgtcgcagggaaagagagtgagggtggcatccgaggcgtcgaagatatcaccaggaacgagtgtggcagagtccacggtttgccctgtacagttatagatccaaaaacatgagattgagtacggtccaacgatgcaggtttaaaaactgggcctacattcatcattgattaaggcttggacagggcacgagaacctagacatctctctcatacgttcaagcgtctaaccgcagagagaagaagagagggtttctttcagcttcaaccaaattacacgtcaactaatgaagattagaaagcagatgcttcttccatactcttttcgtttctatcaaggtttgcaggatacttgagacactaatgagcgcaatggcgaaggcataatagtagtagctgaatgataaaggagggcggaagtgatgagatttatacatcagacactggacgggtgagacaagaaagagatcaaagataaagagaagagaactcactcgtcaaatgtccacaaaacgatcgaagccacttggaagatatagaaaggatgcaagacctgaagagaagcgggattcataccattcatccagtcagtcgatcagaggattcctgatatcaacgggtcaagagagagatgaagtagagaaaacaaaggacaaacttcatccatcaaaatactcaacacgccctttccctcgatgtctataacgttgttcccaaacaggatacgtctctggtccctagtagactcatccaatccgctcaagacggctttgatcgatgtccatctatggtctcgccagtctctattcaaatacaggagacaataagcagtctactcccaacggattgaacaagacggagaggaagagaacggacctgatcatcctccaagtacctttaccttcgcctcctcgttcatccaatgcatatcgagtgtatcggtattctacgactttaaggaaccccatggtttcctcccaagtcatacttcccgcctcaatatcgagcggaataaggtcttttgcatctggaacaatagagtgaccggctgggcgagtattcatttgagtaggagtgacggtaccagtagtcgtccgagaggctgtgttggagggagtgcgtagcttaggagggaagacggtggagattgggtaaggatagggtatcgtctggaaaggaatgatgttgatatctttgaatggagtctgtagaagaagagttatacgtcagtaaatctgccatgaagtggaagcaaaagaggagagaggcgaaagtagaaacctacctggacgagaacccatcgttttcccaatttttcgaggccaaactcggtctcctttccaacccagtcgacccagagcgtgggtacccatctgccaacaagtccaagaccacctccggtaaacaacacaccaatccaccaaagagtttccttccacctaacggtttcatacccagtgaaaagtaaggtgagatcctcgtctggaagttcaatcaactgcttacttcccgaaagtggatcaactggaggaaacggttccaccggggtgttctcatccttggccgtcctgatatcactagtgccaggggtccgatggaagagcggatcttcggccaaaagagggaccgtctgtgaggagggtgagtggggggaccgatggataggcacaagatcgttgttgtctgatcgataggattgttgggagtaggtctcactccgggcgtcgtcagagtcagagtcttgatcgttcgagctgtagccccagttgtcgccttcatccgaggagggaatttcggatccatctcgatcagacagagcgacagagcctgctcttgatctgttggaagaccgtttccttcctagcgatggccgtgaatgagaacggtgggacgagaacgatcgctttctattgatgttcgaagacccaccgagagcttcctcatcatcggcgtccttggaagctctaaatccgagcacactggcaataccaccgagcacgcttttccgcttggattccttggcttcttcatctgagccgtaggtatcagtctcgctaccggataactcgtcttgacggttgaaagagtttcgccctcgtcggcctcctgtccctccgtaggttgaacctgcctcagaggaatgaccacgtctaccatcataaccttgcccacgagatatagatgtcctagagtgtgagcgatggagagaaaacgagtttcttggggtggaattcatatgatggtgcatcgttgtgactgaagaagggacagagaaggagccgggtccggaaaagatagcggtctgttggtctaacgaatagagtaaaagacgaagaaaaaagtcagcctgtggcacttcatagtcatggtgatagcaaatagacctggctcttctatctctgtgtccacgctattttctgcccggagagaaggagagaacgaaagataaagagaaaaaagacacaccctcaccctccccgttccaaccgctcatgctatctctcctaccgtctgatctacctctaatctcgattgcttctgccagatcttgctcgcctgctccttcggtgtaatcatgctcaaatgggttgacatcctgagcgtttggctctgggaaggatctctttcccggcatccttggaaggaaaggatagaggaagaatgttggacgtgagtgtgcaagaagagacaaagtagattgaagaacatgacatcaggatcaagccgtgtaaccaactagtacagcattacgtgtttccatagatcacgtgagttgcaaaatcaattacgccacaccgagcaaccctagcgaatatcctccctccgaaatcattctctcggttgctgataataacagccacaccagcgtagatcgcaaaccgtctttctttttcttccctatatatcatctctttacttcgagatggcaatcaacgcaaaactctctcctccaggtaagcaagatgagtctacagagatgcgtctttgatgaaacttttgccagctcttacctctctggttcactccattcgagattgatcttcccgcacgttccatccctttctctcttgactgattctcgttcgatatttcttctcttttattctctctaaacttcgtactcaaaaacgaaccattcagatatgtctctgtacggaggagcagagcttactatgccatccgcttctgagttctcctcctcagcttcgtcggcatcgtccgactctgaactcgatactaactcatcagggctaaagcaacgtaggtcggcatcagccccacaacgcactacctcccaggatgatgacgagcaccagaggatctatggtctcgaacgagcagacttcctttggaccatgaccgaggagcctcaccggtcaagaagactacaaattctcaaagcccacccagaagtttgtctgtcgtttatacctttgcgttcttgtgtactccaattctacgatggctgattctttttctggctctagattaaatctctcatgggctacactccggtgacaaagtatctcgtgcttctcgtggttgctctccagctctcggtctcggtttatcttagagagacccacccgttctctctcaagttcatctcgatcgcctattgtattggaggcaccgccaaccagaacctcttcctcgccattcacgagattgtccacaacctcgccttcaaagggctttggtcaaacaggctgctcgctatgattgctaacctcggaatcggtgtgccttacagcgtagtcttcaaggtgtgtcctcttctctccatctctatcaaaccccctctcgggagctgatcgtcggtttaatgttcgacatgatagaaatatcacctcgagcaccacaagcgaatgggagaggacggagtggacaccgatattccgtgcaaacttgaagcaatgtgcttgaataacgtcgctggaaagacattcttcgcgtaggttcattcttgctgttgttttctccgaacaagacctgctgacaatgtctttcttttttccatagtattttccaaatcctcttctatgcgctccgaccagggttcatccgatctcagggaaagttcaccagagttcacgccttgaacttcgcgatcgttctcaccgtcgatgctctccttgtctggggtacaggaagtttcaaccccatgtattacctgcttatgagtagctttttcgcgggtagtctccatccgttggccggtcactttattggtaggcttctcactcgtcttctccaatgttgcacaccgcgcatgctaaattgctaaagtgatcctgcctgtttgcatgtttcatcacggtagccgaacattatgtatgggaagaagggaacgaacaagagacatactcttactacggatggctcaactggtttgcttacaacgttggttatcacaacgagcatcacgatttccctaacgtcccttggacgaggttagcggacatcaaacggattgccccagagttctacacggacgatgtactcaagtcacatgcttcttggccatatgtgacttatagattcatcaccgatcctaaagttggcatgttttcaaggatcaagagggagaacagaggtgattgagcatgcttctgttcgtcctctatctcagaagagaagacgaaacagaacaaaacataaatagagcggggctctgcagatatcttcctttctcattcactttccgtttctttgctttctttctttcttcttaacttcggcttcatgttcattcttcttgtccgttgggttgtacgcgtttctttctcttgtcgtttctagtttctagtttctagttcaatcttctcttcttggggttctctatctgtccatcttttgctttgcctcgcgtagttcatctggatccaccaacaaaatcaaaaaaaccaaaatcacgaccactactacgttcttttccttcttgcatgtcctctacaaatctctcattctttctctccttccgttcatcggacacataaacggcacgcccggtatatacgttctttacaatccgccccactccttctttgttcttgttcgttccttgccttcccgtctggtcggatatttgaagatacagatgttcagacgttcagacgatcgacgaggttcctaagctgaagattctagaattcaggttcgctctatcgttgatcacatctgagaacaacgccatgagacagcatggtatgtcaaaaggagaagaagggcttatagagatggaagcagatgagtgagcataagtaaagtttatggatacaacattattaaacgaaaattggtttggaatagtgttcttggagatagcgaaccgaatggacagagaaatagattaggggcaaagataagacgaaagaaagaagattctatggctcagataaagatctatcgaatgtaaactgcaacgaaacaaatcatgccgaaaagaacgtcagttgaactggttatcttaatacgagatatcgaagaaagagaaaaaggaaacaaacaggagtgatgaagccagctggatgaagaacgtctgtactctggacgacctgtccttcgccggcgccagcgccgtcccagcctacgaccgagccaagccttgtccttcctaaccaggtcttgatgcgctgtcgtttgttgctatcgccctggtccccgagctgagcctccatccgtccggcctcggccttggcctcaggggttcgagacgttgagattggtggtaacaaacctgacggaaggcaaggccgtcgtcgagattgagtgatcatcgataaaaacctggcatgttcgccttctgtccataatctccatggcgggattctcgccggtcgggtgccggagctcgactggttaaattctccccatggttctaccagacctatcagatgatccactaagccggtgaggtcctcgatctcggcctgtgagcttggaagaggaatcaacgtgctctttactgatgacctgtcggaagggaggaaaccgggaagctgaaagacgagtcgagctgaggattctatcgatcgagaaggaattggcaggagcggactagaaatcgacgaagtcgacaagggcaaaggcgaaggtaaagaaggcgagacagcagaggacgaagatggcgagggcgacatgaacgaaggagaagaggttaaaggcgaagaagacggctgatctattcttgaacgccgggggatgatcagacgcttcctttgtcgagtctttggagatgcgaaagtcaaagactgatctgtcggaatcggcctagtttttcgttcaccgggtttcgccttgtcctggatccacaggacgatggccgaatctggttcgtcctcgatctctgtttcctcaaggccacctttgccgccatcgtcgtcgtcgttgctaccacccccaccacactggatggacactatttgaagtgcgaacgcccaatcagttgagccttcaagtgcaacatacccgatcgaaaacagctcttctactaggtcggcgtatgttcgggcgatgatgtagagcgcacctgtctggaccgggggaatgggtatgactggaatttgagggaaagcgtggagcggagagagagtgggcggtgaggttgtcgttttcccgtaaactacggatgtgtgtgtgtgtgtgtgtgtgtgtgtgtgtgtgtgtgnnnnnnnnnnagagagagagagagaatgtaagaagaataagaagaagaaagagggaaaacatgatatgagcatagacagacaagattaaaacaggaaagaaatgcaataaacccactcaatcggccgagctcttcgtcttgactgttctcaatcgcgtcgacaccttcgaccaatcgacccggaaaaagccttgtactgtcattatcaataacatctgcatcaatttccaggatcggacgggcaggtttcatccgaagcactctttcggagggcccatccagatctaaggaccggtcgtcctcagtagttgggggagatgatgtgagaccaggtgtttctacccgcgctttgtctgagcgcaacgatctagagatgattgttcttgcccaaccaagggtgggtgttcgggcgagggcaccggttgactgaatgggaggaccgactggtcgaacagggggtgtatccttggccggagtgagagataacggggcgtgagcttgtgagacgggagtctgttgagtttcgagccgggaggggcctgagtgagatggaggaaggccagggcgaatgggcaatggcggtggtcgatgacgacgatgatggagcgaagaagacaagggcgctatagcaggatgcttggtggattgtctaggagaagctgtcggacgttgtgcttgatctggttgaaattgaagccttttgtattcctcggccagcggtgagacctgagactttttaccgtctttggtgaggaacgaagcttgaagatcctcaaactttcgaacaggaggagagactttccaggatagcgtcaagctatgcttcagcgctcgtgcaatatccgaattgttctcattgtcctcgttatcggcggtctgatcgaacggtctgggacgatccggttggatcgacaaagaatcatgtatgggatgagaggcggagggcgattctgcagtgggtctggagagtgagaccggaaccggatccgagaccgatggaactaacggtccggatgggataatgggaagagcgcgagtttgaggtcgatgagttatcgacggtaggctctgctgctggcttggccaagtattggcatggtgtgtccggccccgtatgaacggaggcgttggcgggggcggtggaagggcgggaagcggcgggagcggaggtgatggtaatggagggagcggaggagtgatacatatcggtggtctagtcggagggacgtgagtgtaggacagtgagag

SEQ ID NO: 1022 - DNA, 16473 bp, Xanthophyllomyces dendrorhous
gtgtagatagtgctggtggatgaatctgtgagggattgtgaacgtccatgctgcacgagcgcgtatgtgcatgcgtgcgtgagtgagtgcaaagagaacgaaagacaccgacgacgacaccgacaacgacgacgacgacaactttgttgatgatgatgagattgacgagattgacgaaggccaagcgaaagttagagatacggtgactaacggtcgaggccggcgaaaatggtgtgtgctgacaaagcagccgaggcacgccgaagagtaaccaggtaacacacacaggcgatggaaagaagatcagtacgggcccaggtacacaagaaagatatcacgctgcgaacgctgcgcaataggcaccgggtgacacacgtaagccctgtccgcagggttgcgcagcagattactgggttttgtatggagaaagggcctaagatccggtgtggcggcccggcggtgtatgctcttcacgtgtaaattgaccgcgcattcaggtcgcaagatcacgtgcatccgtcctccctgcacccgccgtctgacgcgtgtatcttttttgctattgttgttcgttgctcaagtggaattctccttctgctctctccccccgtctgctttgcttggcctccctcgtttgcttttcctccttcatccagcctgggacacgacagaacatttgttagtgttctccttcttctttctatgtgttgtgtgtgtctgttggaatcaatctgctcctatcagaaaggaaggaagacgaggaaagaaaggaaagaaaaaaaaagggccagctctcccctcgcttactgtgccaagcggggtattaatcccacatcggtagagccctcataacaccgcccgccagctagcctgcctcctcttttcgttcttgccttctctttctttccctccctccttctcctcaaccctgcatttgacagaccctcattgtcaaccctgcagcccgttcatacgtgtttactgtgtgttttctcttgccctcctgctcatcggtccatctcttgtcctgcttttgaacggtacgtctgcgtggtggacgatcggctatctcgctctctctttcacccactcgcatatatatacacacacgcacacaagcacacacacacacacactttttgcctggtcagtatcggtcggtcaccaggttgagtgtatccccttcgaatttccttggcccttttgttgtcgttcgtgcaccaggccatctctctctcgacttatcagaagagaaagaggagaaaaaaacacattcgaaaaaaaacaacaaccacttctcattaccccaaaacgcatctgtacgattacggtcgatgtactgaagcacatcccgcttgcaccctccaacactctcttcttctctcgtcttcacacacacagatactgacttgtgtttgtctctgaattctatttctcttgtcattttcttttcgcttccggtcatccctgcttttccatctctgcatcgtccattcagttcggtcttttgccttctttttgtgtaaaccggtttcccgcagcctagggccccttccttggcctccctttctctcccctctcccttctttcccctatttctttactcgacactccatctccatccctcgagatgtccggctttgaaccacccccgaatgttcagtaccaacagtacccggatccgtccaacccctacggtggaagccatcatcagcagcaacaacaggatgcgtcctacgatgcgtacaggccatccccctcatccgtctcctcagaccactactccagctaccagccaggaggatacagcaactcatctggaccggctcctcctctgaccggaagctacatcccctcccggtcaagcacaccgacatataccgagagtggagctggtcacgccggcatgaggaccactgagccttatgtgggtgttccttgtttactctgcttgtcaatacatatcctaatatagaagtctttctcacccttcttctttccacttgtttactcacatctttcgatctttgtgtgcacctctctgcctctcctctcgtgcctttatgtccacatcatcatctttctctacatctcgatcattcttccgttcgatagccggcctggacgtctgacgccgctattcctctatcaaaagaagaaatcgaggatgtgctgatcgatcttgccaacaagttcggtttccaaaaaggtacgtcttcctggaccttttgctcatgatcatgatcttgctcgtacctgttcaccaattgaccatgcccgtttctcgatctcctttccaatctctctcttattctagactcgtctcgaaacatctttgactttctgatgatccagcttgattcccgagcatcccggatgacaccaaaccaggcgttgcttactctgcacgctgactatatcggtggtcagcacgcaaactaccgaaagtggtacttcgccgctcaactcgacctcgacgacgccattggcaccactcaaaacggtggcactaagaagaagggaacaccttcggaaaagtcactcgattcagctgtcaaccggtggagacaggccatgcacaacatgagccagtacgacaggctccgacagatcgctctcttcctcctctgttggggagaggccgcccaggtcagattcgttccggagtgcctctgcttcattttcaagtgcgcagacgattattaccgttcgccagagtgtcagaacaggatggaacccgtaccggagggactctacctccgagcggttgtcaagccgctctatcgatacatccgagatcaggcttacgaggtcgtcgaaggaaagttcctcaaacgggagaaggaccacgaggacatcgtcggttatgacgacgtcaaccagttattctggtacccggagggtattgcccgtatcgttctcgccgacaaggttcgtttggtagttttcttcaattcccttgtctgttgatgctcttgcctgactcgagcttttcccttccttctgtcccttctaatcttttttccttattcacagacccggctggtggatatccctccggcccagcggttcatgaagtttgacaaaatcgattggaatcgtgcgttcttcaagacgtattttgaaaagcgatcgtttggtcatcttctcgtaaacttcaaccgagtatgggtcacccatatctccatgttctggtattacaccgcctacaactccccgatcatctactcgccctcaaattcgctcagcccggaacgagcgatgacctggtcggtcaccgctctcggtggagcggtctccacgtttatcgagattctcgccactctttacgagttttcatacattcctaccacctggaacaacacctctcatcttagtagaagacttgtcttccttctcatcgttctcggtctgaccgccggcccgacagtctacatcgccgggttcgacgacacctctaaactcgccgtcattcttggtatcgttcagttcggtatctccgtcgtcgctaccgtgctcttttccgtcgtgccgaccgccaggttgttcggtgaccgagtctcgtcaaagtctagaaaatatctcgccaaccaaacgttcactgctgcctacccaaagctcgacaaagggtctagaatggcgagcatcatgctctgggtcctcgtctttggttgcaagctcacagagagttatttcttcctcaccctcagtttcagagattctattcagatcatgacgcctatgcgaatccaaaattgttcggacaagtatcttggtaaccacctgtgcaggtatcacactaccttcaccttgaccatcatgtttgtcatggatctcgtcctcttcttcttggacaccttcctttggtatgcatcttttctcttcctagcccgttcacgagatctcctcccctcatccttgttgagttttacttcattccacaaacaggtttgtcatctggaacacggtgttctccatcggtcgatccttcgctctcggtatgtctgtctggactccttggaaggatatcttcactcgattgcctaagcgaatctatgccaagatcctcgctactggtgatatggaagtgaaatacaagcccaaggttctcgtttcccaagtttggaacgcgattgtgatttcgatgtacagagagcatcttctgtcgatcgatcatgttcaaaagttgctctatcaccaaatcaattcagagaccgagggcaagcgtaccctccgagcccccgcctttttcatctctcagggcgacaagggtctcaaaactgagtttttccccaaaggatccgaggccgaacgacgaattagcttcttctcccaatctctgacaactgcgatacctgaaccgctcccagtggacgcgatgccgacattcactgtgcttgtgccccattattccgagaaaatcctgctctctctccgagagatcatccgagaggaagatcaaaacactagggtgacattgttagaatacttgaagcaactccaccccgttgaatgggataactttgtaaaggacacaaagatcctcgccgaggagtctgccttcagcgcgcctggtggctctccgttcgccgacagtgatgaaaaagcagaatccaaacgggcggatgacatccctttctacaccgttggattcaaatcggccgctccagaatacaccctccgaacgaggatctgggcgtcgctgcgtgcacagacgctctaccgaacggtttccggtatgatgaattacggtaaagcaatcaagttactctaccgggtcgaaaacccggaggtcgttcagctatttggaggaaataccgacaagcttgaacgagagcttgagcgaatgtctcgaagaaagtttaagttctgtatctccatgcagcgatactccaagttcaacaaagaagaaatggaaaatgcggagtttttgttgagagcctacccggatcttcagattgcttatttggacgaggagccccccagaaaggagggtggcgagaccaggttgttctccgccctcattgacggtcactctgagattcttcctggcggacgaagacgacccaagttcagaatcgagttgccaggtaacccgattttgggtgacggaaagtctgataaccagtgagtgtccggtggacctgattggtctgatcctttttcttttctgaccataagttctttttgccaaatttgtttttcctttgcgaaagaaaccacgccatgatcttttacagaggagagtacctccagcttatcgatgccaaccaagataactatctcgaagagtgtcttaagattaggaacgtcctcggagaattcgaagagttcaattcgtcctctcaatcaccttacacccagtggggctcggccgagttcaacaaggccccggtcgctattgttggtgcgagagaatacatcttttcggaaaacattggaatcctcggagacgtcgctgccggaaaggaacagacattcggaacgttggcggccagagcaatggcttggacaggtggaaaacttcattacggtcatcccgatttcttgaacgccatcttcatgaacactcgaggaggagtctccaaagctcagaaaggtctgcatctcaacgaggatatctatgctggaatgaacgcgttcggtcgaggtggtcgaatcaagcactcggagtactaccaggtaagtccttttttttcaagttctcgtgaatgcacactctaaaaatttccccttgcttcctcattactaaaccccccccctttaaataaatagtgcggaaaaggaagagatatgggtttcggaacgatcctcaatttccagacaaaaattggaacgggtatgggagaacagatgctgtccagagagtactactaccttggaactcaacttccgatggatcgattcctcacattctactacggccatcccggtttccatatgaacaatattctcgtcatctttgctgttcagatcttcgtcaccacattggtctacatcgggtccctcaactcttcagtcttggtctgcaggtacaactcgctcggtaacttgatcgctggccaggagggttgccataaccttgaccccgtctaccaatggaccactagatgtattatcagtatcttcttggtcttcctcatcgctttcttgccgttgttccttcagggtgagaggtctttcatttcaaaactgttgggtttctaccaaatatactaacgtacccgacccttattgcttcactgccattagaactttccgagcgtggagctggacgggcgctcatccgtcttggtaaacatttcggatccctgtcgcccgtattcgaggtattttctacccagatttacacccagtcaattctatcaaacttgacgtttggtggagccaggtatatcgctaccggtcgaggttttgctaccacccgaatcaacttctcgatcctctactcccgatttgccggtccttcgatctacatgggtctccgactggccctaatgatgctttacgtgacaacaagtttctggatcgactggttcatctacttctggatcactacctttgcgctctgcgtgtctccgttcttgttcaatccccaccagttctctttctcggactttatcatcgattaccgagaattccttcgatggatgtccaggggtaactctcgaagccataagaactcttgggtcggttactgtcgactctccagaacgagagttaccggtttcaagcgaaagaagcttggacacccgacagaaaaactcgctgcggacgtccctagggcaggctggagaacggtggtctataacgaggttctcggcccgctatgcatggcgatcatcatgacgctgccctatctatttgtcaagtctttcaccgtcaccggtgagaaacaggtctctggtctggttcgaattgcggtgatctcttgtggaccgctggtttggaacatggtcttcctcctcctccttttcctcatctcgctcttcctcggaccgatgcttaacaactgttgtgcaaagttcggagctgtcatggcttctgtcgcccacggagcctccgtaatcggttacatcgctttcttcgagctcttgtggttcctcgaggtgtggaatgcatctcatgcaatcctcggtctggtttcctcgctcttcattcaaaggttcatctacaagttcttcattgccgtcttcctcagcagagagttcaagcacgatgagatcaatcgagcttggtggaccggagtttggtacaaccgaggactcggcacccatgttctcagtcagcccgccagagagtttattgtcaagctggtcgagatgggtctcttcgccacagactttattgcctgtcacgtgcttctcatcttgttgaccgttccgttcttaattcccttcattgaccgacttcactcggtcttgctcttctggcttgctccgtccaagcagatccgaccgccgatctactcgttcaagcagcgaagtcagcgaaggaaaatcgtggcaaagtacacgttgctctacatggtcgtcgtcctgttctttgccgccttgattgctttgcctttggtgttcaaaaacatctttgactttagcagtggcgcgtacacgtggatctaaagtccttttcttgccctattcttttcatatgtgtgtttactctatgtgtttctcttttttcactctgcacattatgtggcaaccctcccgcatttccctctcttctttccttgtcattcgtcatgcataagcaagcatctaggttggcgacatttccttttctctatccaacttttttcttctcctgttttataccctatcccattacagtttttttcttttcttttcttttttttttaaatttcaagtactctctcatcctcggacgctggcttccttttttgccgttttctaccaattttccttcattccataaatctcgaatcatctgtttttcctcttcttttcttctcgcttttttgagaacacgattttcgattatccattcgtccgaccctccccttctgctcctctgcttatccaaggtcacaaaaaccgaaatcggaactggagatcgaaactgaaactgttcaccgcctcgtagaagtcgtacacgaacgtccattctttttgccttcctctctctcctctcctctcctcttttctctctttccccttttccttctcttcttttcttctttgctctgcttccttcttcttttctttcacctatcccctatgtgcccgctccagactgtttttatatcttattcatgtctcccctctcaaacctttcatgccacctatgaattgactcgcttacacagtcacctgtgtctacatatacgtcccataaagatttctcctttttccccccttcgtcaggaacgaagatgagagtggaaataccggcacgaaccggacacgacggacgcggtctcgtagaacatcttctatcttgcgctttgcatctcgcgttttccgactcgcaacaggggtttgtgtttgtctttttacttgtgtgataacgaaagaaggaagaggtaatgtcgagcgaacagattgataaagggaatgcatggtatcgaacaagggtatgtactttaggaaagaaggatacttgaaaaaaacaaaagagagagagaggaggaaggcagagtatgggtggtcgttaagaatgcccagaaatctaaaatcatgcagagacaaaagaaaagaagcaggaccagcctatgcataatggatcgatcgacccggttgttccttgaaatattcaagaaagacaacagagaggagaagaggcaaatggtgatggtgaaggctacagaacgaatgatttgatgaacagacgacgaaaggggtcctgaaacaagaagaagagacaagagagaggaaaagagaagaatgtgcgccctcaaaaggggaaggttaagtaaagaacgaatccgtcaacctgttttcctccggatcagctgctttctgtcttgttttcccatttaattctctcgcgagctgttcagccagaagaaagtcgttcaggattggaaacagtcagctcaaaaacaaatctttgggggccacaaagcaaaggacaaaatatacgaggcaggatcgggaaggaatacgaacctcagccgctatcaatgaaacaaacgtaagcatcgtggaagcaatcggtgattgaggaaacgacgaaatagatctagtcaggttttcttttctatagagcacagtaaggataggatgatcagaatcgacgaccacatacgggtatagatcttcggtgccgccgctgagtagaggagaaacagaggatagcgcgagaaaagcatcatcagcctatttgtttaggaatatttgagaagaagtacgaagtatttctaaccttctctagccggaccgtcgtctaccggtacagcgtctctgtcagcatgcttctttctgatggtcaagcctctcttgaccttcccccatcctctccctcctgcttcagcggccggcgcatgctgttcactaattgcccgatcaacggcagatgaatcttcttgcaagggacccctgacatcaaccgagagaggatccgatggatcctgagccaattgatcatgcgtccacagaggtaattgatgtgatcggtgctcagacttattatggcggtggcttacttgtggattcgaagagcttggaacggagaccgaggcgtacgacccatctcgaaggcgaaccatgttagcggaaggcatagggggtgacgacatcgggggctgggacgacgacgatagagacgtctgaccgtgagaatgggcagaagtttcggtttgcgacctagagtgagaaacttttctagggacctgtacaggttttgtgtgaacatgaagatatggataggttggacgacaatgatccgggtggaatgaacagatagagaaaacttcgaaacgtatcagagtcattcaggaacgcttgtgtacgattcgcctcgactagatcaacaatcttctcccgcgtgattcttttgttctttcaaagaaactatcactgcgagctatttttcacgcgaggaaacgggagatgaagaaaaaagatctaatcagacgaaccttttgatcttctagtgcaggcggtaagacttctccagacggcccaatagccgagaacggggccactcctgccttggccacaggttcactgcccatgtgagctctcgcccgttctctcaacgtgcccgctctagagactttcggaacgttctccatcccacccgtccatggatcagctatggtcggtggatctttagagggggcatctcgtttggacttctttgaggtgagtgaccgaaggagacctttgctttcgagcatggaacagaacgctcaaggagaatttcgtttgaaatatagaaagagggaacgaaaggaattgtcgaactggtggccgcgtcgatatggttccaacccaaatggaaaggttaatggagtggttgcaagaatgaggaaacaacgaaggaaggaagaacagaggaggtgagttttgtttgaatcaaagagactctgaaacgaggtgcttctcccgagacggggctccacgatttagcacgcgcgcataaccatctcgtcatcatactatcagacaccatcgatggtgacaacgagcgaaactcgaactcgagagaaagttcaaagaaacaggaagcaaggagaaggagggagagcaaaagtgattattttttgggggagggagatagagagataaagtagaaaagagattgacagaaaggcaagcagacaagcaagagatcaagacaaagctcggtagagaaaagacaacgcagctcacacttgaaaatatggttggtacaatatggaggatctcacagagtagatcaagaacagacaagcgagaagaaaatccagagagaatacggatgcaaacgaaatatagactgcagatagaccggataaatacttgaagaaagaataaacaaaatataaagaaaatgatatggagaaagaggcggaaacggatgaaagaaaggattatgccagctaccagatcccactctgtccctggggggaagaagaattagcagacattggtctctggctattatcgtcaaatatccatgtagaatacggagcaataggtcgaccctgctgaggggcgtggattgaatcacagagaccttgaccaactggaagcgatgatgtctggattctgtgtccactgctcaaaactgagtgacctggtgctccttcgttggaagaacttgatgagcttggtcgaggctgctgcagactgtttcctggataagtacgtgggccccagctgtcgataggcgaggtccggccttggtcgatgatgccattcatatgtcgggaaccagggggcgtcgatatcaattctggaatagggtacgagttcacggtcagcgagtccgatcgatcacgctgtctcatcataccggaccgataatcaacaggactgagagcaacattcaatcctgagggaccacgagtgttcgcgcttgaactgatcgtcgtaggataagtcgaggctcgatggtgctggtagcccaacgggctatgtcttccaagtgcagaaaccgggctaaggtcctgcgtgacatcttttgtcgacggctgaaagtatggttgggctctgctagaagcaatttcaggggtgttgattctagacaaaaaaaaagacgggtaaccagaggaatacaattagaacacatggaagaaaaactgagaaacaaggcgtctttgttcacttacccagagactatactctcattcccatttagggccatacgagctcgcaggatgtctcgcaaggccgctggagtgcccaattcgcctaattgtaagtcaagccacaaagagaaagaaacgatcggggatcagtcgtggtcaaaacaatggccctagacatttgccatgagatttaccaagttctgggattcctccaaccggtatatcgttgtgaaggaaacagcatctgacaaaacaaacgttttgggcgagatcagcgttacatcctcacatataaattgcgaataaaatgaaacagccaaacgtagacacatctcaccttcgaccgtaggcacatcgtccgaacaaccagaaaacagtgcatatctgcgttttgtactaaaaccacatggacaaggatgggagcggaaaaaggggaagagtaatggggatgcagcagatcgctgatgtcagaaatgtgcgttcataaatatccgggaaattcatgcggcccgaccccgcatatgaaacaaaagaggggcaaactttaggatgtcgatctacgggccggatttcctcagtcccatgtgcgtactgtacacaaaatatatagaggccgaactcagaattcattctagctcaaaagaaggccaaatctattgaccgaaggaacaagaagagcttcgctaacctggcatttatttccatattgacacctctcctcggccgttctagcattggtgttacgctcccaagtacctaggcattatgagcacacacgagcggaggagaccgagatgtatcggaaatgtgaaatcagaataacgaaaaagtaagctccgatacgcggtaaatgatacggaggaaatgtgcgaacaagccacgacgtacgacatagctcagtcttgtataatttagcctttttgttggtaggactgggaccatcaaggggaagaccatggtccaaaagatatctttgcagagcaggatccatgacgatggggttgatcccatgtcctagacctgttgtgccaattaaactcgcaagtggtgtaagaggtccctcgatagctaagccacggccgctaggaacccgctggccattcaaccccaaaattgaagtttctagactgggaaggtaattgtcttctaaactattgtttgcaccatcgtccttgtgtatcccaaaaaccccagggtgaagatgttggattgcctgaaagcgagtgaggagttccgatttattcgtcgcaacagaactagggggggaggggccagatgagaagccatgcgatgggcgcccatcggggtcgtaggccagcatggaggttgtggtgtgagtaagattggagaaaaaggtggaagttgaaggagaaacaacaaaatcgccgtcgcctccgacttcttccttagaatttccgggatcagagacgaaagtcttacccagcttctggttcaaagcaaacatggaaccggagggaaagggggccggatttgtttcattagatccgtaatcaggctgacgagtttgatcttgtttatctgagtcaagaaaggtgggtacagcaagactattcggagaattttctgtatggatcgagcgcagctgataagcactcggttgaaataaccgaagattggattggagatttttttgttgttgttgccgccgagatatctgttgttgaagcagtaccgcttgtcgctgaatgtctctaaggcttttaggctcctcatcggaagcaatctcaaacttattgatatcatgattgaacggaactgtcggacaatgagatggctgagacgaccaccggtcatcgctaaaatagggatccgatgtgatagagcgggaacctagatcgatgatagagcttatatcccttcccgaggattcccagatcatggcagaaccaatctgtcgatattgttgagacaaatgagcatctccgagtgaccggagaaagtcgtaatctgtagaaataggagtcgtctgatattggccactcaaaactgattcttcaacccatccagggacgctagacggggtcgggaaatttgagatatcatgatccgttgcttgctgtatggcggtcgatctagttgtggatgcagtggtcgaatactgatgcccagcagctatctcgtaagcgttcctctgtggggaagggacaacagttatccttcgaacttgagaagcattgatggtagagggagagttgcctggagcccaccgtgagctggaaagtcctcgtgttcgtcgagcagagacatccctgcgaccgcagcaaataagcaaagattgcaatactctttttgagggtgataaaacacactagaattgaaacttactcatgatcagatttcgtcttcgttgcaagactctcgggcgaccctccttccttttccgagcagtctttcagctgtatcttggtgtcaatctcagcggcagtgataaggcagggtgttcgacaagggaccaagggcgcacaaccttcaagtatctcgagtgaaggctggtctacgtgattcgagatatagtccatgtcgtcaaggcgaaattcaaggcaagtgatcgtttatcgaagaggttatcagacgtgctataatcttaggagaagaatagatgaagccgtctcaagcgacatcagctacgtgtcaagagcacttgataaagaaatgggtatatgcgctatggtctttttgaaaagatgaatggacctggtgatgacttcgaaacttggttcatcagagaatcatcactcacactctgccggagtagattttacagaactcgaaagtgatggttgtcaaagaaagggtgttgacgtccttatcaaatcttgacacacaaaacaccacagcggaagtcgcaccaaattaacggacaaagacagatagtggacgaaggaaaggatcaccttactcaggtattctccaagttgattacaaccttatgtaaacgtttgcgtctggattgacagcgctttatgttgagctgtgatcaatgctgacgacagtctgaggagtgcaggggactgtgcaaaggagagagtatcccaacaaggagtgaaaaccccgtcagaaacatcagattgacaggcagagctatgatgcaaacgttgagctttgtcgttaccaggttaataatcttaatgatagacgtctgaatcagggggtgatgaactatccgtcaaagaaaataaaatcagagaaagagaagaaaggcggttgagaacaagaagagaacagatgagatgggaaaggttaacgagagaacagaggacaagaaagaaggaagagagtgctggactgagggtcgttccttttaaggacgcctagaggtaagagtgacagaaccttgatgatgacaggaattgtcgttgcgcgccattctttctcgtgcctggcctgatttgtgcatttccatggaacgatcggatgagatcacataccgacagaactcggtcgaccggagcgaaggatagacggatagtcagatcatttgtcgtcctactcaaacggtgcttgagtcgtcagcgttcgatgcaggtgtttcatcaggttaggtttgagacaaaaaaccagacgaaagtggttcatcggtcgaccgttagtgaggacaagtcgacagatgtttttctttgtgcaggtggacaaaagaagaaagttattgcacgtgcacactgtctgtaaccaaactttgaggctagtattgccacgcttttcgaagacgcaagtgaatgttcatacaggccagcctctctgtttaaatatcttctttaatgtcctaaaccagcccagccgccatcactctcaacacccttcactttgtgatcagccaggttcgggtttgcctcgtaaaccactcctttcggaacgtcccgtctgagtttgagggcttcacctgagaaggacatgtaggtcacccggattgggctatcttcttcgtatgaaattgaagtcggtgtaggaaaatgtagagtaaggtgtgttattgatgagaacttggccacgctggtcaggacggtcaaataattcatgagagaaaacagtcagtcagccatacatattaaagactatactgaggatagattcgccacatggcccagcaaaacgaagcgtgtgatggaaaaagggaacataccggacatcatacgggacagcctcggacgtatctaccaagtcgaatgattgcgtcggtctcaacccctccaaatcggaaaagtcaggtgaagcgttggcgtactgaaatatacatatcagtacaaagcgtgacagctcggtgaagtctcagtgcatcatatcgaacagaaagaaagaggttcaagcagattgcacatacaatgtgaatcttttccgggccgctgataccttctcctccaattctaagcgtgatagatcgtagtttgacagtatcgacgaacggtactgttctcgccatatcaacccttctcagccgaagttcgaacgacaatgcaaaggataaaggaacaattcacctactgcgaatcatcatctcgccgtcttcctcactttgacaatataaagtgtcgtcatctatcatatccctaggtctagcagtcagagcaaaagttcagtcgatatacctatgggtgagaagcaaacatatgcataccaacttgatgatttctctgcccatctcttctctctctgtgttgagagcaatgatgttctctcctgaatatgatacaccgaga

SEQ ID NO: 1023 - DNA, 80287 bp, Xanthophyllomyces dendrorhous
tacaccgagatacagtctcagcagctaccgttgcacattgagagtcgctcgattcactcacggtcgattaccgagtaaagactttgctgctctccatcgttaggcaaatgatgatcatgatcgtgttcatctccacagccgccgctgttgctaccactaccctcaccggtatgagagtggccagcatgatcgtgcgaattattgtgagacatgccgacaagagagagaaaagaaaggatcagacgtatacgtgtgtgtttgattaatagaacagattcactgacatcacctttgaatatcgagtcgagaccgatgaagcccgcctggtatattctaaacgggcatatctgggtacactttgggcaactccgggggtagatcacctttaccatatacgctcgttctctttgatctcattctctctctacaattccttccctcaggacctcattctacacctgactacttgactaactctcctcaagatggatattcgttgtgcaactgtgagagctctagttccttttgaatgtctcctttttttttgttaggggtcccgtcaaggctaactcaaagttctttcttttcattttggatttacactcaaaaaggtcgaagacctgttcgcacatattctctttcctcaccttgtggaatgatctactgatcgctatctatcatcggatcacacgttatctttacaggatagggatgcagaatgccaacatcttcaacctaccagagaactacacgatgaaatactgttcgccccaacctactttctcctacctctctacttcccctatatttcggctcaaatatataccttcaatgctgattacttctctctcttgttttgtctcacccaatgatgttctgaaacatagacctttatcatgccctctcatggcctcagatttcttacgtagcagaggacaaagcgacaggcaagatcgtcgggtatattctcgccaaaatgtaagcccgctcgcttttcttaacctcactcttcattctttttccttcttttttctacaccctttggataatgaattgctcaatcgttctccgacttgaattcttcaactgattcgactgtatgatgaacatttggatactcgttcccatagggatgaagatgccgaagctgatgatccccacggacatgtcacctcaatatcggtccttcgaacgcatcgacggctgggtatagccaacaagcttatgaaacaatcccgttagtcttcttggctttctttagcctatctatttactcctacccttcttgtaccaactatctactcctcgtaagatgtcaacagctgtactcaaagagcatgtaggctgattgtccggtctcaattcattcttctattgacataatctgattacagaggaagcaatggccgcgatatacaaagccaaatacgtttctctccatgttcgacaaacaaacagggcggctatcagtctttacagggattcgttaggcttcaaggttgttgatgttgagaaaggatactgtaggcaaacttctttttattcttctttaggggacggaggggtctgaattaaaaatgaagtatcttgaactgactgttatcgtgtctctcatttcctctgattttgattctacgtgtgagtagatgctgacggcgagaatgcgttttctatgaagctcttcttttgaatgatatgttccaagaatcaagaatcaagaatcgctccggaccacatggtctacgtactcttccgactgggacaatataagaattttgagtaagctcatacatagatacaacttaacagacggcttaaaaatgagaaggctatgaacatatagtagaatagattgtcggttgaagaaaataagcaagaggaagcgagtagggacaacgtctttgataagacggttcaagttgatcaccaaggaagttgaagaggagctagattcgtgatataaaaaaaacactaggtcaagataaagaacgctcgtatatttgcccccatcatcttgccctattggatcgggagagggcatggcgtgaacggactaagaaggagaaggacgaactaggaagatcctttccaagaacctcctcagcattcccaattcccttcggacccatcggcgcccagaactggcctgtgtgtttgagcgtgacggtgtctacaaaatcaaggaaaattggcgctgcaacttcaggcttgaccgcttatttcgttcgatgaatttgagaaggaagagaacgatatgtattccaatcagtaaccttaattccaatacaggtctatcgagacagatacaattcatgatgcttacctccacccttcttgtaatggtctttcatacctccggtcatatcggtgatgaggaacccaggctacatacccaacgtagattgaccgataagttcaattgtatcagtttgcagatcttaagatgctagtagcaaaccacttttctcacatgaatcatcacaacggtgactcctttaggtttgagatcataggacaataaatgtccaaccatattcgccgcagctttgctgccatggtgaccaaacatgccccctccttcctctgttcgtccagagcatcgataaaaacaaaagggttcatgtttagccaatcgtgctcaatggatggcaagaagaagagtgcctactgcagatagactgactttcggttcggagcgtgatcgaccctccttcggaagtgagcaggatcaacttggcgttggatgcgaaagatgatttagagctgatacacatatccaaatatgtggagtcaatagagcggttcgttgataggagttaatcatcggtgaaacccacagcgcagaagtgatgaatactggcccaacagcgcagatcttgtacctgaatacggcagaaatcccagatagatatgccgaattagtattggtatcaagatcgagcctttgacagaggaaatatacaactatcttacatatccatctctgcttgaaaatcaggctctttgaacgtctaataatatcatacgttaagggcatggatgagtgaaaaggatgccatgatccttgattaatcggctgatccatgtccttacctcttctttgagcaaaccagctacgatgaccgtgagatccaacttggcgccttcaagtttctcaaccagtgttttgcccgcaccgggctcacccacatcgatcccttcgattacgtgaactccgtcaggaaaggttccctctttagctggagacctggtggtcgcatacctgttacagcccaggaaagcaacagatccgatcagtcaaggtcagggtagatgaaagcgtgtcgagggagattgacagatgcaacacgtacacggtggtccctcgcttgtgtaactcttttgttagggcaagaccaagacctctgttggcgcctacaatgagcgctttgagcggagcgtatgccatttctttgagatgcgaaccgttgtatataacagattcagatgagggtgatgatgtggtggaaagatcgaattgcaagaatctcacggtcgatcgaatcatgtaatctaatcacataaaaaagagcagttaagtttccttcttcccatccgttcttcggccgttcttcagccttcgctccttctcaaccctcttggttcctttgccttctctccttatacatttatctcacatacccatccttcgttgtaatctttaacctgtctcacgctgagtcagaaatgaaagacttgatcggacctctatgtgtgttgtgagtcaacgatcgattgtgttctgacagtgagagaaacaaccatgcgctagttcattctgatctctggccatgactcgaccacatctgaggatagttgcggctcatccaacggaaaagatgaagcatatagatctgcagccagatgtatgtgtatgaaagctttccgtgcgtataactccctaaactcactcatatctatctcttcttttttggtacagctgttggcaaggccttagccgaagcaaacatccctttgatctacggagggggaacatctggactgatggggctgaccgcggcttctgcggtcgaagcgggaggtgaagttcatgggatcattcctagagcttttctgggcccgggtgagcagggcgtgccaaccttgtcggacaaggatgagtcaacaggtcgaacaggtcagctgaagggcggaaaaacctcggttgtcggtggaatgcacgaggtgaaatacatctttgctactcgttattgtaaagttcttgttgattgacctttttcccgagatgtcttttctcatctttgttgagagcagaggaagacgctgatggcaaagttggcgacgggtggattcgtcgtgttgcctggaggatttggaacttttgaagaagtgagctactatgttacttctctctttctttttctatacactggcctttttggactgacttgagtcttgcaaatttattcacgatcgataggcgatggaaatgacgacgtggtctcaactcggaattcatttcaaccgaccggtattgattctttccgttcgaggtttctatgctccattgaaggaacaaatcttgttggcttgcagggaaggatttatacatgtacgttcgcacgtccacttgacgaatcgtctttatgaatttagtttctcatgtctttgggtgctcaacggcgattcaactttcatcaaacaaggaaaagaatctgggtttgatcaagtttgtcgaggcagaagatgtacgtcctgaagtacatgtgcctttcttttgtctgtacacgatatactaactacgttcctgattcgatttgactgacggaccataggaagcggattggggtgcactcacagtcaagacgttcagggaatgggaatgggatgcggatgctggctacaaggggttggactgggcttcttcgtagatgtacaggactagatgggtgattctacacggataaatgtactgatgcaatatccagactcttgaacgtggagcgtcggagagaagcgatcaactaatcgtagcgagaaacacaatttgatcacatagaatatagacgcgcctgctttttcccacttcgccatctcttcactcccgatctcgatgaactaacagatgaaaaccattcatcgagtaatctctggccatctactcttccttttcaatgtgaccgatcgatcctgcctgatcgtcttttgtttgatatcgtgtgacctaacttacatcacctcttttgttatcgatcatcctcactgacagattagaccaaccccgatcacactagcagttctcatgcatgcagatgataatcattccactccatcatatcacgtcacatcgaacacgacttccgatctcgagagccctgtttgttattcatgatgttgacgacaggtctgatccttcgcttcaaggtcttgtcaaaagtctatataaacgatgtgtggatggtctggtcttgtgcacttatcaccatcacatatcctctctaactgaatccaaatcgatccaaccaaactcttatacgtttcaaccttacacaccaacatgtctgaagcacaagttcttggaggatacaaggccaccttgtccaaccctaacacctccgatgaggccaaggttcgtatgcttcttctcttgctcctgcccagacatgatctctttgaattcgttcactatttcccattcttccaggagcacgcccagcaagttcttgacggatcggctgagcctacttcccactccactggttcttccgaggaagccaaccagggcaacgtccttgggtcagtctttgtctgacatctacgtctagttcatctttctcataaccactccgttcctaacggttcaatctcttctttctccttgtctgttcaatctttagtggtcacaaagccaacctcgcgaaccccaacacgtcggaggagtccaaggagaactcccgaaagattctggaggatgctcgtgcttaaatatcgagcccactgtacactcgactcgctcaatcactgtattttgtgctttgcctatgtatgaagtaatagcctttgctttcgttccctcgttctttgtttctttctaacattcaaatcaattcttcaggagatttatcaggatcaaagtcgatacatcgcgatatgctacataaaaaaagtactataatgatacagtggataaacagaacgttaaatatcgtgtccagcacgaattcgacaagaaacgatcgaactaaacaaatcgaatatacgtattaagaagaaggaaatgaagttgaggggggaaaactatctagagccctcggtagagtccaacctgggcatccattcgaacagcctggccaagcgtaaaccccgtcatgcatgagtcgtaactgtaatccatgaactacataaaatccacgatacattgatcagttcttctctgtccaattatgtctttgcgcaaagaacaggattagggtgacaagaggaaacaaacgttactgatcaaatcatcttggcttccagggcaagttctctttcctacagggcatccctgggtgggaacaccctctgagggagtgtctgacacgaagtctccatcgccggagcagccgccttgaaaggtactttgggagataagagagaaacccgacaaagatgtatgagttcggaagtttagtaaagagtagaacagttgagaagaactgaagagaaagcgtactggtataatcctaaccagtgtccaatctaagcgagatgcgcgatagcttgttgtcaggatatattggaccgatcatagggaatagaagagaagcgaatggcaagatcaaacctcatgcacggctgttcttcccagattgtaattcgtagtagactatatgaagaagaacatggaggtagacgcaaaggctcagaagatccacccgtataagagcaaaagtcaagtgaaaggaagatcgagatagaaaacttacccctcctggcagagagctgaagagaacaacaacgccatcgtctttaggtgcactcgcgtacgtcgagggaaatgttgcatatcccaatagacccttgccgctgcctgatttgaatccagaggtgtacagattcaacgaagcagatccgcctttacgaagagcggctttcatctctgcctgttgagtgctagatataaacaaccagagtggttaggaaggcctaaatcataaaagttgaatggaaaacctggagcaggactcacgtttcaggaccaacgttgttgaaccagtcagagttcaccgtccagtctgtagagactggtttggtgagaacgttgcaagaataagagggggagagaatcatggtcaactttgattacagtagtcaagaagatcaggaacgatgcatacttaaagagaacccaaaattggatgacgcgtagtcgtcgttgaggacgccgatttgatcgttgaccatctcggaggtaaggtaaccaccggataaatctggtacaggaaagatattacccaagagactcaacagctttgagtatatcagatcacggtagattccattgaatagttataaataacaaaccggtggattcagaaatcacatgaaagtacacgtcgatagtcgttgttgatcgtggtaggaccggcctggagatagtgcggaagcgctcaatctcttttaccctcgcttctcttcagataccacagaatcaaatacatacgcttgtcagtcgatattgacaagaagtgtgacatattaggtgcttacacggcctgatcgatatcggccgcattggagtgagttgtaccgcatcgagtaacagcgggagtcatatgggagcttggagcggcccaaacgcctagttgagccatcatgcccaaagagatggaagagacaaagagtgctgagtttcccatagcaaggatttgacgtgatagaacagggatggggattaaatataaacgagtgtggggatgatgtatctagatggaaccagccgaagaagagaagaaagcctgttgaaaagaaaagaaagttaagtaaggaagtgttagtaggtaaagaacgatggatataaaataaaagagacttcctttttctttcccaaggaagcaatctcttttatacagttcatccataggcgggtagagtaagaagggagcgaatttcaaaagcggatagactaattcgtcatagctacccgccgaattggtggtgttgagaacgggagacgccttttcgtgaattcggaggcgggaataagcggaatatatatgtgtatagagtgagcatagcagggtatctcgagttgattagatgaaagcgaacaaaatcgacaattgagtaggtgtgccgacgaagatgttgagcgaaaaacaaatcgaatcaagcatttttaggcaatgacaatcagattagatagtagctgttcatcatgttacatataattaatggttacagttcgatcgcttgccattgtccgatcatacgcgagaatgcgcggtctgagcaacacacccgaagaacccgatgtttagatttcctccttcagacggcgaggtcgaataactaacttcgtgataaacacaggcatctatgctgttctctctattctgatattaattaatatcgccgaggacgcgtactacagaaacagaacccccaaggtggaaatattaccttctgtgttctgaacgccttgcctctttgatccacgaccacgaccacgattataatctggaagcttgttctttccatctcctgttcattgctgtcgagactctcttccgctcataatcttacgaaaattttcgtccacagatctttatctcaaagtgtgaacagctcgaagtcgaaacctattgacggcaaggtccacttcaaaatatttcttcctttaggacaatgggtcagtttatctcggtatggttccactttgagagaggatcagaggctcatactacttaatatagatctctctggatttcttatagatccttcttcaggtgaacccttgtcaggcaagtcccgaaggtttttaattatacaacatttcgcatgtgctcgttctgtctcgggacaagttctaactcgatcttgtctcgactcatccttcgtacccagacctctcactctctctgtccgagattcctcctatacctcgtcaacctcgcgagcgtcctgtttttcgtcgattcgcttcagactcatctgccacttccttctcctccaccttgacccaatcgtcttcggtgtcacccgtctcgtccacctcgaggtcctctgcttcgtcacctaccggtctaaatacattgccatcaccaaaagcaacaacaccgacagcaacgtcttccttatccgccctaccccgtccaactcgaccaggcggtcgctctacgacaagaacatcctttgtcggctcagccagtgaatttctccgggcagccccagcacaggcaccggtgcctgaacgattaaaaaactcggtgttgattacgtgggatcaatctcctttccatcatcgagccaccggttcctccggcaggtcggtccatcctaatcactcgagttatcagggtaatttatctggtggttctcgatttagtggtccgccaatttctcctaattcacctccaagtccgtcgacaccgtccagctcggcatcctgttacttttcctctgccaattctggtagtcaaaattggatgccttacggtcaggacaccatccctttggcaggcgctaagtctaatcgggtagaaaaggagcaggctagacggaagcttgactgcgaggcatactcagcctgggttgggccgtctgctggaccggacgaacgagtgagtagcgggatggggagtcaggcatggggagatatggggttgaatctagatagtctcgatgaattgatgagcggaggaccaaagggtcgcgtgaggagcagaagccgataaatcttccttgttgaagaaaggactaaacctcatttgttttcttctatgatttctctcccatgttatcttatccttatattccgatcgctgtttcgtgttcgttttcgttcggatccgtatgttgttgtatatatatatgtgtgtactttcctccatatagatggctgtcctttttctggatttcttttacggataagaaggagccagtcgtaagcgaatcgtcttctcttcatcttgataaaacatttctaaatgccagcgaattccaatctgtttcccgcaaaatccctgatgaagaacctgtcccccttccgacttccaaacaccacttgttctctcgactctccttcaggggtggccaacataggtgattgatcgcgagtgacagcggagcaggcggcaggatgacctgatgtagcaaactcgtccagtcgatcagccagaacagcaagatcggtgtatggaaggacgaagcagggatgttgtcggccggaagatcgaatttcgaatgtatccttagatgatacgtattccaaagagatatgaatctggattggccatgcgccacagcgggaacaaagatgatgcccatacgagagacgagaataaagaaagagttagcaaagttgaatcttggttcttgcaaaacatgattcgaattcctacttgttgaccggatattcccagtgcgaaccaacgaagtttgccgatcatatcagaaggaacgtcgtcttgttctttagtgttgtcatccaaccacccgggtccccaagtccgaatttggtcagtcactagtggacaccagaatgacattcagaagagatcctactcagtccaataacttcgccgtaaagtttatcagccaactccaacggatcttgatccttccaatccgaacgaccgctatagacatttggttgaccaatcagtaattgctatcaaggtagttttattatgaatctgaatgaaaccagggtgatagagaaaaagagaaagacgtacacagtgagattaacgtgttgaaggcctgtaatcaaggttcccatacgatttttagttgggtgacagagattcgaatcagaccattcgttgtcaaaaatcaacgccagaaccatctggaaaaatataaaactatcagacgaaggaagggagaaaatcactgaccagtgagcatattgtattcggttgtatgagactgatggagtgtgggtgtgattgttgaagtggagaactccatcgattgaaaatcgaaactagatgaaccggacatcggcccggttctctcgttctcttcatccagaaccgcgttctgtttcgttgtctctgtcgcagatacatctagacatgtacattttctgatcgaatcacattctatgagatagaatcgcatatatacacaacaatttatatattattagttcattgagcttgcctcaatcagcataaagacgtcaattatagataaagagcaaggatgacacgcgagataagataagaagaggtagattaaaaacgagaaagaatgtatcaagggacatgaacaacaatcttcccgcaagccttattggttttcattcggtcgaaagcagcaaacagaccagcttgatcgaagccgtaagtagaatctacgtccacgcgaagtttttctgaagaacgatcagcagagaacagaagaatctgtgagctttgaaacttcgtactcgtctatgaatgaagggacatgaagtaagaataaaagaggggaagaaaaagagggatgaaccttcggaagcaagctttgctaacgtattcaactgggttttgttcgattttgtggttacaaacttccactttctgttgacccctcctagccatgtcggacggaccgcgacgttgaataagaggaacaaaaacctcatctttgagcccaatcctttagggaggtctatcgagatggtcaagaacaaccctttcggattcagtaccggagccgatcgcgggaaaaagttgagaatgttcccgacaacgtcgtatattgcgtcgaacggatttgacgtgtagttcttgacgaggtacgaaggtaggtcaactcttttgtagtcaatgatctgtcaagccaaagatcaatgcatcaaggagcagaagtgaacaagaagaagatatttctcactccaaagtagagaagtttaggatcgtacctcgtctgctccaaaagatttcactttgagagcattttctccggagcatgaggtcacaacgtatgctccgagattttttgcgatctgaatggcgaatcttccgacagtggaattccctccgttgatgaacagacgctgaccagcggtgattttgcattggtcgaccaaacctatgtaacaatcaaaaatcggtgtcagtatgtttaatctgtttcggaagttgagtcaagaatcgataacaggatggaccttgatatgcagtaagtccggccagggtgattcctgcagcctcgtcagcagtgatgttttttggcttatgggctaaattctcggtctgtaagaggcatggaagagagtaagtatcatgttgtatgatgaaagatcgaaaatagaatcggcaccaactttgacgaggatgtattgaccaagcgcgcctctgcctttcttgaggcagtcctcaaacgtggacactaagcagaattggacgcgtgcatcccatagtgttcagtcattcgacgcgcctctgtatgatgagtaactagagaccgccttacttccaaagacttcgtctccaatttgaaattcagaatcattcgggttaaggatctctccgcagagatcgttctcaagcatagctgatgagaaaacagaagtccgagtcagtttggagtgaagcatgtgctgcatattgattaggcgtgggtttacttgggaactttctggcgaacgatgggatggtagacatggtcttgacacccaaaggattcaacgcaactgcgcgaactctaacgagaacatggcctggttcaagagctgggataggggcctgagtgttgagttcgatggactttgtgtggtcaccgcgccttttttgcaaccagacttgttggacaggaggaagagatgccatgaataaatcggagagtacaggtgactttagggatgaagagtgcaggagatatgagaaaacagatgaagtattttctcagagtatgctctcgctccatccatcgttgcttttatcttgtgggattgcttcactctgtcgatgtctaatatgatgtctttcaatacatttcttactaccctgttgattctcaacaattgttggagtcgagtaggttttttcggcgatgtctgcccggctggccgatctagggttaccagagttacatccataggggttgaatggccaaatttggcgcagcattccagctgcatatcgaacgtcatcggccttccccgaacagatcaatttctcggcgttctcaacgctttcagaccgaacttttgttcggattcttcggtgacacacctttctccttactggggtaacctctttctcggagtgatctcgatgtgcatgcccgaggatcgaagaaagcgatgcagggaaagccaaggaggaacccgatggaaacatgcataaaagatacagctcagatactgggatgaatcctgtttatcgtcttgacaaacccaatacctctgttatattcatcaagcgtaaagtaattttcataacgaaacagcatcgacatgtctttctctctcgataacgatacacttgctgggatcattaatccgaacatcaactcgcccaacctaatcagcggacagatcgagtgtgagtctgagcactttcactcttttttcttatcctactcttttcctgtggtatcttgattcaaaactgagcagcatcgtgtcttacaacaaaagatgcgaattacaactacaatatacacatttcgtcggcggtcgtgtttaccgtcctatttggactcctcagttgtaagacagactttttagacctttttactgacaacacctgtgtatctgggctaagattcgcgcgccgtcttgttcctatagccatccatctataccaagcaattcgatcacgatactggttcttgctctatactgtctctctgggtggattcatagagatgggtggttgggctggcagacttgcctcagccacaagcaccaaatgggatcctactttcggtggctactgggctagtacagatggcgctttccttgcacagtaggtctctttctgataccttccgtgggtgtattttcgggcatttaatcaaccgttgaacttcttcactttaacatctctcaggatctgtatgctcatcttcgcgccagccttcatcgtcgctgggtgctatgtaattcttggagtggtcatctcgagatgtggatatcagtactgcagactacacccaaagacgtacacaatcatgttccgtgtgtcctctttgcctactctagctgtgcttcctacacatctgactgatctttcggatcattttatcaactttgacagttgctggagatctcacctctgttagtagctgcttatattcttcatattactctaatcataccttatattgctggtattaaccgttctgttgtctcttgtatcggctcgctcaagcttgtgattcaagccattggaggaggtgtcgccgcttcagcagacacccactcccaggccgatcaaggagttcgtttcatcttcaccttttcttttcaatctggatcgaatgtgactgattcattcttcaccggtattatcaggctcgaatcatggttggcggtgtcatcttccagatgggtgagtctgcttacacatatccactcacgtctagatgaatcgcactctaaccgtagcattactctcatcgactccttcatactagtcgtgatggttgcctacacatacctcctcctcgagttctcctaccgatacatctacaaccagccgacgacccagctctcgccgtttgcatggatgacaaagaagacaagagagaacgcgcggcgacaggccgaggagaacaggctggcgacggcgtcttcttgcgccgcccgtggcagcgtggaagacaagcggacgcgatatcagctgatgggagtaggcggggtaacactgtttatcttcattcggtatgtctccttgttatgtctctgtgtctcctggccctgtgttcgtccggctactgaccggtcgatctcgttcctattcaatcttcttcctctgcaactgttcaaatagatcaatctatcgaagtacgtcgcgtaacaccatcacgcggcccattctgttctgtccaagtattcacaagtttgtctcttcttcctcttcctctatagctatcgaactccttgatggatggaacgggccgatcatcaacaaccagtcactctttgacgccctcgacggggctatgattgtacgttttcgcaacatctctaacctggtcctcgataatggctgatcggactttatatgtaaaacctcatctgtctcacagaccttggcgctcgcttgtttgaacgtagctcacccagtattcttgcttagccaacctcgatcttcgttcgatgacgagaagaccagtttatccgcagacggagtgagggtttgagcgatgaccgatgtagtttggatttcggttttgatatttcctagagctttgtactacaaatctctcactggacaacatctctactctatacactgtattttccatcatgcccttttcagactagacgtgttcaatgacactccgtatcaagtcttgacccccttgcgtatatgatcagcaagtcaccgtagttttcttcaactcacatgaacttagaccgtctcattcgaaacaagcgggaaactgctcgattgcgcaaaataaatgaacattgaatataggtctgaacatattcctctttcgttctacctgcctgaatattaattctaaacgaactcggtgattaagtcaaccttgtcactttgttatatcaaactttgtttcggattcaaaatctttcttcatatcagattgggtgacatcccgaagtttgtttttttactcattctctctggttgcccctcacttttatgtgaatcttgaggattgggtgacctactttggttgagaaaaccacagccacctatcaagtctacgactacctaatattcatatcaatgatgggctttaccagattagatgctcatgggcaagaaaaaatctacataaaacgcgatagctcgctcagctgaacatgaaacctctcttcatcctctgcaacatcacaaaactcaaagcaagcttttgattctggagacctgacagcatgaacaactcaactatctccaaccaaactttgaactacattattggctcgcccaacctgtactctggcaagatcgagtgtcagtccacatcattctctcacttctctctactcttcctccctacgtgctcatattcgggttacgcccgtttttctagacacccactataactacaatgttcacaagtcgtccgccatcatcttgaccaccttgttcgctctcgtcagcagtaagacattaaaccttttctctctatgataatctcatgcctgcgcttatcgtcgagttctctttttctcgcgcgatgtctttcttagccatacatctctaccaagctatacgatcgaaatattggtttttgctctggacaattactttcggagggttcatcgagatggggggttgggccgctagactcgtttcggccacttcactattctgggacccggccgacggaggttattgggatagtaacatcaacgcgttctttgcacagtatgtctttcatctatctttctttcttactcctttctgtgtctttgctctctttgcgattttacctaccgcgctgcttgagatatatgatgttgatattcactttctcttgattcgttcatccgttccctctccgttcgttagaatttgcatgcttatcttcgcaccaacattcattatcgcggcatgctatgttatcctcggtcgtctcgttacagcctgcggctttcggtactgtcgcttacacccaagaacatacaccatcatctttcgtatgtctcgtcggttctgtgtcgtggttaatgcttcctttaggctgatctgattcctgttttgccatagtttttggagacatcgcatctgttcgcaatccacctctctacttcttcatctgacacctcaagcttcacagactcactcgcgcccaacctgatcttctatcctgcaaaagcttctgattcaggtgatcggtggtgcaactgccgctggtgcagacacaattgaggagtctgatcacggagaacgttccattcctatctctttaactctgcctagtgcaataatattctaacaatccagacttacccaacttgtcctttgttggtatcatcaggctcgaatcatggttggcggtatcgtcttccaaatgggtaagtactcgtccgtctcacatataccgcgccgtatacgcctgattcaccctgcttgactgtccttcatcgccatttgcgttctcctgtctaacttctcgcaataactacccttgcatctgttagtcgtgatggttgcctacacatacctcctcctcgagttctcctaccgatacatctacaaccagccgacgacccagctctcgccgtttgcatggatgacaaagaagacaagagagaacgcgcggcgacaggccgaggagaacaggctggcgacggcgtcttcttgcgccgcccgtggcagcgtggaagacaagcggacgcgatatcagctgatgggagtaggcggggtaacactgtttatcttcattcggtgagtttaatctaatctagtcggattcatgcctgctttgttcccagactcgatttgctgatgcgctacttctgaacattctgtttcggaaccatcctagatccgtctaccgaagtacgtcgttcccttgtagcgcttttgtatatttgcagaaacttacaagccttgcatttcgttctatcaccctcttctttgcccgatctagctatcgaactcgtaggtctcattttctctaattctgcgctccctctgtctcatcggacttctcgagttgacatgtaccgtttttttttaaatcttcactgtcatcagcttgatggatggtcgggaccgatcatcagtaaccaatccttattcgacggtctggatggcgctatgatcgtacgttctcattgcacttgaacctcatcttctttattttattattgaatatgacaaagactgacttgttttctcttcggtttctgttattctcagatcttgtcgctcatttgtctgaacgtagcccacccagtttttctcatgggtcgaactgacaacatggaagcatatccattggtttctgtctggaagtgactaattaacgaacttggatccttcagccgctcgggctgatcctcgggtctcttggttatcttgtcagcttgagcaccgcattctcttcacttctctatatcttcatcccatggacataagcttctcgttaccatctatagacatcatacccattatctttttttttgcttctggtttgtttcttctcttcttctcacttgatgcatcccctctttaggacttagaatcgtcttcagatggaatatgttggacctggacacttcactttctctctttcttctgtttttccctccttactcccttctccctctatatttcctctttgtcatcttcgtgttgcttgaaagtgaggtaaagaaaacacgtctggtagcgttgacatctcgtactatacactataccctctctgcagcgtagcttgaaacgatcggaatgaaatcgtgtcttcctcttcctgtccttctctcgatcagcctagcctattctgatggcgccggcaatgacgtcgctggcgcgtacacataagaatgatctgatcaactcaggagccgtatataattaagatgaacatgaatagaataagcagacaaaaggggaaggaagagaaaggttatcaaacgtaagtttctgtgccaaacggaaaatcaaatgttcaagattttcaagaataaaagacgagaaaagagaaaaggaagaaaaataaaataagagagcagagcagaatattcaagaaactaatgaaaaggaaaggaaaacaaacgaagatgaatcgtcgaagggtatcattactggtgatggcgttttttcgaggctaaaagaaagtgtatgagctacggatgaaggtttggataggctgaaatgatcagctgtgaatgagaaggatcagaaaggtttggttcaaagaagtgagatgacagaagagggaaaaaagacaatacgaggaaatgagagaaagaggggtaatgatgagggtatatgcactgatccacacacgcacgaggtacgagggtagaaataatatgtttatctacgtattacacgagacgaaacaagacaaggtgtagaattgaaaaatagaaggggcaaatattgctcaagccagagtgaaggatgcgacgatggcagctagcgctccgaccgaccaagcaccgacaacagacctgctagccccgctgagcgagctggaagacccagaatcagtggaactgctgtctacgttagcagcgttcgtgatccccgccacccaagtcgaaccgcacgtgtcgatcgccgcctgccataaggctccctgtccaccgaggatagcagacgaagagaggccaagggcgtagggcatcctagattcataagctgcgtaggcagtaaatacacccttggcacatgacgagcagagaatggaggcaggatcggtgggttggatgaacaagtacgggaggtcggtgttcttgtaagtggtcgcattgggatagatagcggaggatgcgtcaatcgccttagtgatggaggctctcttagaagctcgagtagagagtgcagatccagaagaggaagaggtcgagagagtgttcacagagaggtaggcagcgttgtacgcaacttccggctgaatgacagcggtgtttaagacggtgccgttggtaacgacgatagtagcgttctggctgactgtagaagcggtcgtcgtgtttgcacccaatgccgtcacacaatactcatttgtgttgtcatccttggtgcaaaccacggtcctcaatggctcaactacgtacaacagatcgtacaagtttcggattgtgtcgtcggcgccagcggtgagctcagcagaacaatttccgtagaagtaggagagcttggtccgaataaatgtctcggagcatccattagcggagcaaagtttcgtcaaagaagaggtgagggtagtcgagttggtcgacattgccgcagcgttcgtggtcgtcaacagaggggtcacacagttcgagagcacggtatcagagtcgaggtcggtcaagaaagccttgcagttggcagaggttgaggaagggaccgagacggaatcggtggcagaggcagaagcagaagcagaagcggaagcttgagcggaagagacctgagaagatgtgaatgagaggcagtcatgttagttcaggccaattgattcttttgcgacgaagaaagcgacagcaacaaagaggtatttcgcaatgaccaggacgaaccgaggaagactgagccgaaacgacggtagacaaagcggcaagagcgagggtaaatctgggaatcatcatgagtgactaggtaggtgggtgattagtcggttgggtgtcaggtaagttttaagtttatcaagctggacggcgctaaagaaattataagttgacaagaaatgcgagtcagcatcagaaggagagatagaaagagagaggacagaaaggagaacgggaacaaggaaaggagaacgggaacaaggaaagtgaggcgtaaagttaaggagagttgttgacgatgacgacggtgggtgggcttgaaagaatgttgagtgattgaagcagcttgcttttttccccaaatccttctcagctatcaactgaaaaaaaaatcatccattctcgattgagaaagggcgttggaagcagacggttcttcaaaggattctgttatgattctgattgagtctcatgtaagaaacccagcagaccagtcgagatggatagtcttgggaggttgaaactctgttgttgttttttccaaccccgactcgctgattttctccttcctctaaagttgccttaatcctccacttcctgcctatcttccttctctggtgttctgcatgtttgttctctatcataagttatgtgcgagatagaatggaatgtaccatgtctcctacaacgatgcatacaaaaacaaaagtcaaggaagaaggaaaactcacaataagaggcggggaaagcgagacctgtagaaaccgaacgaagggaggtccgatgcagcgggaaaaagtcagagaaaagactgtcgaacgagtgagtgactgctggcggatagagctgagcgaggagaaagagagagaggaaaagaaagagaggagagagaggtaaggatgagtcgaggtgagggtatggttgaactgatggccttaggaaaaagcaggcatgaggaggcgagatgaagaggaagcttaggtaagcgagtaaacaacacgatgaaccgcgactgatttttacgaggagcttaggtaagcataacgtcatgttgggtgtctaggtatgtgagtgcatgtaagaccgcatggaacaaagattgagcaagcttcgagaagatagcagtctgtgagggtggcagcaacggcatggtcacgtagagagcaagatgtagacgagaagagactctacataggattgtgtggtcatagttgtgcgctgtggtcagaggatttagaacataaggacccatacaagcaacaccgactcgtctcacgatttctgtgtaccctgcatgcgctcgacctacatgttactgctcaagatacgtgtgtcatacatgctcatcaccgcccaatccaaacgtaagaacatgcacccacttggccgtctgctatgatggcatgaagcgcttaggatgtgcgcagtcgagatcgattcagccgcggcgaccgacagtctctttatcagtcttctacttgcgctcaccttccttgtctcttgatcacctacatttctgccatggcatacggaaatattgagatacctcaaagattggacacagccgaaccgctgcctatcctttcctatggtcttccttcacaaaaggctctttttaccttcccattgacgctaaagcagacgccggaggagctccgccaggtgatgtggcagatctttgctgtagagattgagcgtgcgtatatctttttcgttccgcccttattctcttgtaagatctcttcatgagtattcatccttgaacatgtatgcgctcaggagggtcaacttaccctcatcgaggagaacaaagcctcaaagacttcctgaattattactattccgcaggagtcgtaattgtcggcattgtcgtcggagcggacgaagcgccagggaagggtgaggatggagcagaagtcaaaggcgacggatgggagggactctccatcgatgaagtaagggccggtagaagctgggaaggctgtctaggaggattttattacgtgcgtctttagtcgtccttgtttcttgatacccgatcggatcgtttgatgcgcccatcctgaattcgataacatatggcgtcacagatcaaacctaactatcctggcagatcttcacacgtccgtccgtcaatctgctctcgtgtttctgtctttcttgtctttcttgtcttttgacatgagaacatgtacaattctgtatatccgaccactcctttgtcagaactgcaatgcaggttttatggtcaaccagacccaacgagggctccgagttggattatctctcggtcgatcctacttgatttacgctcctaaacttggtacgcctcctgctctcaatctctatcaagctttctcgaacattaagtgccagttcattgactgtattttcttcatatctctgcgcgcgtgttcattcggaaggttatcgagcttctgtcttcaatcttgtgtatacaagtgagcttcttatgtccgataattttatatatcatgccattcaagtcaatttactgatatccatcgtactcttagacaactctgcctccgtcaggatatgggacagtctaggattcactcgagcaggtctaagtacgcgttctctcctgtctgtctcctctcgtctgcattcttagtcatgaagaaatgaggctgacggcctgtaagcgacttacaatagttccggaagcgggtttgcttaaaaaagcagacggatcaggagaagaattcgtagatgctattgtcttgtgcgtcgtcccttccaaatcctaacaatagacaaagttcatctgactcttgtctgtcatttctccttttggattgtacagttataaaaagttcgaatgaagtcgcatcgcgacgaggtgtatgcctctatctctcattctgtcatcacaatctctccattccttgttctcttttgttgtatatatggagttgaagtggaaaagggaaggcaagcccagtcaaagcaaaactaacaaaaaaccagcttttgtcgcgaaaacaactacatttcaaacaacccagttctctcagggattcatttgcaaagtccgatggaggtcccggtacaaagacctcatcgacttgtcttccacccttcctcttctgatattataccttccctcgtccattgttccaaactcttccactctcctcctacccccttccctgtaccttgcctcgtcgtttccttcttccgtatgcctgcttccaggccaatcggatctactgaaagcgacggaagatctgtaagaactagctcgactgctgtcgctaactacgcttgttctccgttcgagacccatatttgatctgtacggaactcttttcaacctcggtaagaacggggttgagagtatctgaggcgtaaaatcgatgtccgatgaccgagacgacctgtcgtcaaacgatcggtcggaccgagggcgggaaacgggagaagaatgaaaatgcgatggataagatagctcggaaataggtcgaggatgggcctggtataccgctggagggatttctggggtttgagcgggactctcatccacggtgtgatacgaagggatcgctcggttcaactgtgaccgaggttcatccttgtagtattgttgatgatattgctccggtgtggagcgcgcggatgagaaggaagtgatcgggcggagattcttccttggtccagatttagatctttgactctggaaagggtaatatcgagctccttcaaatgcttctggatggacgtaatcttttgcttgtcgagtctgatctcttgaggcactggaatttcgtgcgagaacaggaacggtataaccgtataggtggttgtcaaggaaagaggatgaatcaaatttgtccgaatattgatatggatcttcgtaatctgatttgaggaacagttctttcctccctgtcggttttgtgggtacatccgaccccttctccacatcactcgttccagccgccatacccggtcctgttggtgtggtggtggccgtagtggttggttgaccggtgtaagctatagccgaagaagtactccgcccatctctccttcgtttcctcaagaggaatatcaaaacacccatacagaaagctgcaagcagcaacaaggatgctgctaaagccggtccatttatcccctgtttcgaaaccgctttcgaagtgttccccgctggagtccgaagtccgccgttgccaaggtacgtccctgtggattgaggggctaaggcggttgcttgtcgagcttcggaaaggacggatatcatactaggaccgggaccttggtgtaactccgggttcgatctgtcagtcgattgagaagaggtacctttcgtgtcgacaaggggttcatgcacattagaaggctcggttttggatgcgtccggttcgagagggtcatcgaccgaagatgaatccgacagagcggtttgggcctccggatcggaatttccgtcagaagaagagagagagctggtggaacttctggccaaaggtgaatctgaaccaccttttagaatgcgtgcacaatgcagaatatgtgtcagacaagcaggtactatcgaaacttcagatcgaaacctgttgtggacttactgagaagagtgaatgcgggggattgatgattcgccatatcgtcccctctcatgacaagatagaagggtgtatccagacccatcgtgggtggcgtcctactctcatcgaggcaacccattcggtgagctttctatgcatttcaattgcgacacactcgctccgtcgatatagatagaaagacatacagagttacagagtatgttccgtcagcatcatttgtgatctcaggccagataggggaaccacaagaatctgcagagacgcaaagtttgaaacaaggattcgcgactggcgtagccgacgacctgtcatgacgtagaaggaaaggagatgagaaaccgaaaacaaaatatggccgtacaacagtcaagacttctcgtttgagaaacctgatgattttcaagtgtaaaagttgtctcaccatgagacttcgattttatcacccgtgatgattgagcttcctacagttggacttatccagttgattgttgtatccgctgccgttgctgcaggagcagcggcaacagcaggaacagcggcagcaacaggagcagcagcaggtacgcccgaaacaggtgcaagtggagtggcaggagcagcagctgggactggtgcgactgggacggctggagcagcaacggctacgggacctgccgcaggggctgctacaggagctgggtttgcccatgtcgtggcagcggtagcagcaggggcgacagcagcaactgcaggagcaactgcagcaacaggagcgatggcggcagcagcagcagcgactggaataactggagcagctgaagtgatgacaggtgccggaagggccggatcaacccaagctgaggcgcctgcagccggcacagcggcttgacctgcaagaggggatgctgttacaagggcggccatagaaatggaaaagaacgtaggggtttgcttcagaggacagtaagtggaggagaaggggcacgtccagcgtttacccgacgagataatggaggatgatataagggggatggggtggaggaggagaaaaggaggaggacaggaggaagagaaagatgatggctgggtcaaaaaggacggttagctcagacggataactttatcagacggaaaggacgagacctcgaatcggttagaaatgattcaacaatgacaacaataacaaaaacattagccgttagtagggttgagttaggctcttgacgcggcagatggtgcctgattttgtagacttcccgtgtgggatgatgctagccctaaaggcgagtagacgaaacgaacatgcttttggataaccgagcaacgagcagatagatcaagaatggaagaaaacgggagtgaaagagcaagacaccacgcctcccgctaaatgcacaaagaagatctacatgctagccatcaaggcttttttgatacctctcagcgactgttttctctcgtccgactcgtcaagggaagagaacagaggaagtaacgagttggtgacaaactcttccactaagagtacaggaaatcgagaggaaggtcgttgactgtatggtgattgagatcgctgccagtcggccaacctacgagcatcattgacagattagaagagcaaatatcagaatctaatagtgaatcattctcaactgatggagaacacgaaccagtcggtaagaagcgccgtgatatcagtcgagaggaacagaatggcatcctcgctattccatggagccaactgtcgagatatcgaacgagacaaagagagaagatttatcagaagagtccacaatggaggttgttgcagatcaaaactcactttttcctcaaacattgcgtagaacacttcgaagattcgctcccaatctacacccgcctcccgaagcataccatgtacccacccagaagcgttacctttctcaaagctcaaggtctccagacggcgacacaagaattctatctcggatttagataacaggttactttagaatgagaacccataatcgtctctgaagtgatataagaaggtgacagatagacgaaccgagcgggtaggcggtttccgaagggtaaaaacgtcgtccaagctgagtgactacgctggcaacggcgttcatcttattttccgcctcttcagcaactgttaagaacagaagccaagactttggtcaacagatgtatttatcaaagacgtatgcatttgaaacaaaagacagtactttgatcgaaaattccttcccacgtctgaacgataagtgctggatcccgatggtccgaggtgtggagaatgagaaggatgcattcaagcaaccggtaaggttcagcgaagttaaggtagagctgtggttgagatgtacgcatgttaaacagattagccaacactctacttgaataatatgaacactacatatgaacatacttccgaaatggtgagtaaactagagttcagttcgttagtcaattcgaccttcagactttcgttgatgtcctggtgagccatgattgcccttagaacctcaatctggacctgagcgacctccatcttctcttcaaggtcgtttacaaactccacagagacagaagccgagctacctgacgacttggcattggccacagccagggtaaggtattccaatcgctgaggtaacggcaactgaagcctgttccacaaccatccgcagcacaaatacgaagcctctgttagtctcttcatgaacgtgacttcaaccatcgatagaatacacatactcagtagactgggcgaggttggcctggacaaccgatgcacgggcgtagtgtccgtttcgggcgtaatattgccagagcaactccgatcgagcgtgggtcataggctctcgcgcaagatattgctcaatgtaaggcgttcgaatcttcataacagaatttgatatattaattgatgttgaatttgaaagaattgcagatgtagccattgatcgactaacctctaaaagctgatccgtcaattgtcggcctactagccaatcatataaggtcacatggaacaaaggatccaaagaagaaagcgactggttgtacgcgctagctctgagcgactcgatactcatctctgaacctacggagagcgtagcgagaacacatagaagtaagcttctctatagacagcagacaaaactttctttgcaagcttcgagtctcaccattcttggcagccaaggcttcgtctagcatctcgtcgaaagcgagaagagtgtcaaatacacaattgtagcaatgcatcctgttctcgtaagcgactcgtcgaggatcagtggatatacatccatcctcccaataagccaggccttgtccgctagcatcccaatcctgagcacatttaagaggaagctcgatagcacctgtccaaaaaaggcagtaaaatagtcagagcgtgtgaatattgctgaagtagaaaaggaaaagaggcataccagtagggaatgacaaagatcggaactcgagacaagtctcttgcagcttctggagcggcaaattcgtagttcctttttcgaacaatctgatcgaccgaaaagataagagatggcagatcagaggatttggatgtcggatacgtatgaaagacatgtgacgaaggagttcttaccgaagtgagtcctccaggcattcgcgtcttcgctgcggatctctagtctctttagcttgccgcaatccctcgagcgcctgaacggagtgaagacacacattacaggagttagcacatcttcacaaaatacagatttcaagtgtgggaagggatagatggtattaccttgaacaacagcacatcatctgctcggcaaaaagaaccacatcgctgctgcagaatttcactgatggtctcgacctatcaacacgagaacacgagagcaaatcaattctgattcagcagtcaaccgatttcttaaagaaagctatagattcactcacgctaactcgttggctgatctgctgatgaaccactgcgttgacgatgtttcgggcgacatctcgacctttcaccgtagtcaacagatcctgataagtgaggtccaaaaacgattgttgtagctctaatgcacatctagatatcaaagtgccatcaataacaaccaagacgatgtgagtttgaaagcagtccaatgatagccttgtgcgatgccaagaatagacttacgaggagatagtctccggaagcttgtaatcaatcaggagcaaaacaaaggagatcgcctcaattgcttgagtaatcatagcgaccaacgcgttcacagacgactgttcagttcgccacgaatcgagatcgctcgatcgtgtttgagaatactcagaggcgggaccagtagtgaacagttgaaaattcctgacaagaccagatgcgagggattgaacaattttaagcaaccgaatttacagaaaaggagttgaacaaagagaaaactcgctaaccgatcgatgaaagccttaagagcagacatgttcctttgaacggagacgagcgtagactcggccacattagagatctgtcggttaggagacgttggcgatggactgcaaatgttggatgagtgaacgtttgccacagtagttgtttagtttcacttttgcgcagaaacctttcgtatgttgcgtagagcgagagaagagcgcttacctgagtcgagtgactttgtccctccaaagaggtcggatcaatcttgagaagtagattgccaacccctcgtgtctaccagagaagaacacctgactgctgacttcaccagcagctgtacccgggtggccgtatcctctgtcgactcgaacgggcttgccgccaagctcatagaagagtcgcttagctccagttacgacatccggagagacagggcccggggaggtgtccgtgtcggtagaagccgactctgcggaggacgctagagccaaacacatggcgcacgattggtctcgaccgtagctgaattaaaatgattcatgacatggaacataatcagaatgaagtaaggattagccaggtaaaagaagaaaagacgtacttgctgaagaacgcagcgatttctccctctcgtcctacactcgctccggcctccaagatacccttcaacacatcaacgggtctttgttttccaatcacgtgcattccctcgcttgttagtacgagcaagcttctctgctgaactcccgtctgggcagctagctcgttgagccttagttcacctcttccagatactttgagtgcagacgaacaaggtagatctgaaagagggtgaggcacttcggcaatagcccaagtacgaccctctataggaagcgcctgagcctgctcgatcagagccggtcgagaaggcgcgggaagtcctgctggttgtgaggagacaagctggttgttggggtataagccattctgacctccggtttgtccattcgagggaatattagtagatgattgagaaagtcgaccgatgtcagggcacgtcaagagcaggacatccatattatcttgtgcagtctgctgaggcgcgacgagaatgcctccgagacaagcagctgagccagagatagaagtaaacttgataggaggctgaggcggaactgatgttacaagctgttgatttgggaaaccagggaaagaggatactccctggggttgagactgactagcagaagaaccgtccagagtcaagtttgatggagggagtcggacatggatgagctctaagccggtaggtgggccagtagttgttcggacaccaccatagcctcttcggtagtacgaaaaatacaatcggacacctatgtatgtgtatgcacggaaaaaactattagcgaagcttcgatacgaccaaaatcccaaggcatgattgattcaaaacgtacctttgctggtaatggccaccatctgaacgccactatcagcctctcccctctgaatgggacagacgctcatgatgacgaatcctctgggctcaagtacaccttgtgcaccaggcgcgagcataagcgctgtcctaccaacatcgcccgctctgccaactttcgtcaaaccaacgcctgcttcagctccagaaacgacaaataactctatggccgaactcttcgtcaaagcccagataacattcctcgtcggatcgacagacagcctcacgatcggatcctcctgtttgctcttcaaaaactcaggaatcaagcctccgaggacacctaatcctccaccagaaccggtccaattgatgagtccagatcgtttagtgaaccagccttcgtctgctcgatagaccatctcgtaaaggtttccatcggaaccacacataaatgtccgtccgttcgggaacgagacgacgtccgacattgagattccatcagtcggtatcgtgagatcagtcgcgtagagggtaagctctgacgagggtgaccgacttaatccgaggaggagtagattgttcgaagtgcagatgaccagcagatgggtgatggaatcaatgaacactcccggcttggcttttactagaccgacatgaacaataatttcagattgttcgtcgtatcgactgaagtcagcgctgttgtagattaagaaaatggatttaagacgaaaaagaagacaatgagcggctcgcgtcgaaggtattgactgatcaaggaaaaaattgaagcgaacctctccccaaaatcccaaaggaacagcttattgtcgatcgtcatccaggcccgatcaatctcgggaaagatacccatgaagcatttatgagtgagagctaaggttttgtccagcaaacgccagatctcatcctttagttagccattcaaacagacatgtatctgggaacgagaaaagttgggtcaactcaccttcgtactcggcaaacagaccatctggaatgctaaacgtcttctgcttgacgaatggtgagaagagcgagctcagagagtatgtgtatgaagcggaggatgtacctgcagagtgtagtatatggttagcaatccactcggcttctcttctttctgtatttaaacgtgtttcggatacgaccctgttgcctcattttcctattttccatttctttgcagaaataaagaaagaaagccttcatataacggagagaagaaacgactgaccctgcagaccttcacccaaatctccgactagtccagcatccttcaccaactgctcattgactacctttctcgctctctctaaaggcccatacgttgggtcttctacaacaggttctctctgggaaggctgaacgatgacatcagtagaagatgaggtcgtctgaggtgctgttgagatggtcactgatgttgatggtgctgccgaggatccaattgaagatgtttgttccggaagtcggggatacatctgattttgctgagtttgaggagagtaagtcggatgaatagacgacggtgggcccggaagtcggcggactgccggagaagagagcatagatgtaaaatcaagaagatatgactttgcacaggacaaatacacctaaaaccagacaagtcaaagataggagggtgagagttggatggaatgaatgatgatggagagggtcggtggttgttgaaggaaaaatctgaaaactcctatttcaacattatcttatgttctattcattctttaatttctcttctcgttcaatcacgactgacaggagtgagacagtgaatcaaacatctttcttctcattgatttatgcatacttagcatccaaaagggtcatggcttctctatgtatctatgacttttttttactctgaaagacagcgcatagagacgtcagaaggtttgaaggaaaggaaatcgacatcttaaacggtcctttttcgtatttctttttatcatttcttcctctcttccaaacaaaattactctaccaccctctttgtcggccccgatatccttgttccgtcgctgaaaaaacacaaccaagagacgtctttcagattgagtcaaatatacatagaaaaagaaaacgatagatggaaacttacgcggcatgtttcgttggtgaggcggtccgttacctggcggtccagaaggcatgatcgcagtgattgcgtccgaggccaatagtcccattagatcgtccgttcggaattgaggtccttgttttacagatgaaatgaaataaaatctcaacgcctagaacgaagataaggacgtttcgcaaggtttcaagatttcaactcaccggcaaacgaggtcggagggggcaaaacacccaagaaccaatgcaatgaaacctccttatgatggaccggcgctcttgctccggtaggtgctgcgggttcaggtgatcttcctctctttacaggtacagtctgcccaccttgaggaccaatcggttttcggccccatccattgtctcctccctgttgctgaggaggaggcacatgtctaccgactgatggaacgccttgttgaacaggctgaacatggataggctgcacgaccgctggaccgacagcaggagaagaagtagtcaaacttggatgaacgggcgaaggaacattcatcggagagtcacctctaggccgtttcgacagaggttcattcctcatagacattcgttcactctcatccgttggtcgaggtctaccaccaacggacgacggtaaaggaagtgaaatggatccagtaacacctggaacagcattgagtggtagggaggaaagagcttggggtggtggttgaccagccatcataggaccattcacgttcgatggtaacaccctctgctgaccaccttgagggagaagaacaccgccgagattaccgggtggaccgagaggacgaggaggaattactgatccttggcccaaggtggtgactggaggcgggtgcgggcctaactgattggcaataggaagagaaggatgggacaaagaattggaaggacccagtgcagacgcggactgcatcggttgctgcactgtaagcgcaggtggaaccggggggaagattccgaaaccgaggtcgactctggcaatctcgtcgatgtcattatatatgtgtcgtctggcgaaatgttttgtcacagagtctatgagcgtacaagatgtaagtgacgacaaatttatctttccctcgcaagagcattaaggactcacctttagggaacatttccaagaacctagcatccagtcgttgagcagaagcaagatcgccaaacaggtattcgtattttgcccatcgctcccacaacggtcgaacaatctctgcagtgaacttggtagctgacttctcgaacaacaccctagcatctgtccacaccagcaggagaagatgacaaatggaagtgtgtttagaaacgttcggccgcatcaagtctttctctttgtgcgcttgtaagatttagcttcgagaacgtactctggtcgtcattgatggtgattaggaatgaaagatatcgatctacaaactcgatcttgcccccaaacactttaagacctagctcgaagatcctggtagccacactgggatctttactgcagtgatattccatgagagctgtgaacaattagagaaaagggaggtttcagagagtggaatatatcggtagaggagattgagagaaaaggaaccgtaccggaagcttcgtagacctgccaggtgatagagtttgattttctggctttggcgaacacagttcggcaatatttgatgccctgttttcattcgatggttcgacgaattaaacatgtttccctacgcaagtagttgcgcttccttgaaggaggacacaaaagagggagagaagcttacctcagaccttcggacggtccgcatatacataatccaaaccaggcccagtcctttttcggcatcctccacctctttggccctcctcattctaacgctggcctcctttgcttttctatcttcttctttctttctcatgatgtctgcctgatccagatccttgttctcgtcatttcctccacctgctcctccgccggcggtagatgaagctgaaggtttatcaggtgcggcaagaacaaaagcgacttcatcggcgatagattggtggagcttatcaatctcggtttgaaggttggtaatcaatgagtcgaaagtcgagtgaaccaaaatcatattttttcgagattcttctagttccgcgtaagagaatgagagtaagcagctagcgggcaacaagaaaaaggacaccaaaaagaagcagaagagtcaatattggcctcgcgatcaatttatcgaaagaaggtcaacaagatgttctaacctggtaggatttgcctgaattccgagcttcagataccctgcgccctcttcaaggcgtccgaccgactgatgatatttcgaagccgcgtacctaacatcaaagaacgtgactctcaaattagcaaggaagaggcacaaggaaggagagatgatagaaagccacaaggaaagagacgaaccaaagttcagggtaaaaccttccttcaccgccgacagctttcctaaatgcataaccaactctagcttggacttcatcgacagcttccagctccaacgggtttccaatttcccactccacatatgtcttccaggactgaataagaactcgatcttgctctgtccatttcggtcgttgaggtaatggggcgggaaagaggaaggcagaatgaggaagtttagtccgaagctctttaagcgtcgatctggcggtcatgtaagctggcgagcgctcggctaggaatttcttggcctgtatcaaccgaagacgaggaggatgaggtgagcatgtgttggagatggagataaaaaataggaagaacaagaaaaggcaagtacgaacagtgactttgttgaccatgccttcaaacaggtcatactctctccagattccttcgacatcctccaccggaatcttaatcacttttgagaaaacccttctcagctctacaacctttgcctgctcctcccatgtcgatctcgtctcgccttctctgatgaactggatgaattccttccagataggggtcgaaagagggtcggttccaatatgggacaaagcgtactcgtaagctttggagatgatgatgcgagcgttcaagtagtcggacggtaaggtcgacacgtttgaagggacagggggcaacgggtttcgcctacgaatataatggagataggaagctgataaggggtcgaaagaagagcacaaaggggagacaaaaaaggtcatcaaatgaaactcaagagaggtcataacaaaagaagtaggcggggcttactccataaaggcgggtaagcaagaggaaacacaggcccactgctggaagacttggcgaatgctctggagaacagagcctcaacttctggtgtatgatcgtgtgataactctagctcaatgtatgtcaagtattgaggagcctattaagggttgccagtcaccaattcaacaaaagaaacggacgcgtccgatcgatataaggaagaggaagagaacggatgagctcatattaatcgaagcagcatataaatccatcccccaagagaaaaacacgagtgaaaagaacgaagagaggagaaagagacacgtacagccgtagggtagagcttaaggaagatttcataccatttcctcgcgttctctaagtcgttctccgcggtcgacctggcaataagcgcgaggagcgcatccgggttggactcttcagtttcctccgggatctgatcggcttttggagtcgtcggggcgggagtcgatgcctgaccagtaccggtcgaggcgagagcagttggggtggcgacggaaggtgtaggaatcaccgactccggaacaggtgtagagacttcaagagtggccgtgtctgaaggggtagacactgatgaggaaacggctgctggtggtgccgctgccagcgacgcctcggctggttgagatacaacctgtttatctatctcgggtaacgttgtctctgtctctgtcttcgagagctcagtaggtgcagacacgagatcatcaatctcacggttctgatctgaagacgattgagccaccaactcgatatgctcggtgggcttggttggcgatgtctcgattggaggtacactggttgcaattggctcaaccgcgtccgtctgaatatccaagttcgcccgagcagaaacatcgagatcagacttagctgtagaagtcatggaatcttcaggctgtatggcagtggatgtatttgtctctttgtcactctccgagacaaggatgggaacggaaacaggaaggaggagaggatcctccacagcaaccaaggcagagggatcctgtgaatctgcctgtttcggggaagacggctgagataaaggttggttgacagcctcgcttgtcgaatccgacgaggagggctcggtgtgtatctccatggatggtgagaatgtcctgaaggtgttcgagagatgatggaaagaagagaaggaggagaatgaagaattcatacgcgaccgggggatacccaccatggttacggtgcgcatggttacgctcccttccttcctcaaccgccatcaagactccccactttgcgcgctgtcgtatcaaagaatgatttgaagtggccgaggaggtcaagagaaggggcagaggcaaaatcaaggaaggttcaatggtggagagggcgccaagaatgagagtatcgctgatggagaagaacaatccttcgtagtctctgttcgttctaccgtcaaccatgatatgattccctaaccctcctttcgcaaactctacctgttggggtgcaagacacagaatagatctagctgtatctgttagagagttatgagcactctcaaggtctttccaagattgtgcgagaagagaaagcaaatgattccaaggtcgttcccgctcggtccggataaattcgtcatgttatttttgtttccttttttgatctctccccgtttcccttccctctacaatcaaccaccgttgtcaccacccctctcttccttcattgcactcatccttgtgtccgtcctctgataccgatgaacggttcctcgccgtcacatctttcgctgtctccggcatacggctcgccagagtcatacacagacctctctcttcggccaagagcatcgccgacaagtacaacagttctgaattctgtccatcggtcctctgttgacgcctactacaacgactcgcactcgctcagtccaacagaatctgaatattcacaactgcttgaccagaatccaccagacgagacatttaataggccactctgtagggaatcagttggggagaacaatacagtcggaaatctcgccgcgctcgatgctagcctgagaaaggaccggttggcagaaattaaggagagaaacaataaggtgtgtgaaaccgtcgacctatcttatgatttttcgacaagagggttctccattgaacaagcccgagctgtattctttgtttctcccacttagattctcaacagggtatcctctcattcaatgctcgtccgagatcgagatcttcggtcccaaccgggcacacccgagcctacacagagagcctcatcatccagaccagacggtcattctccctccggcgccgcctggtcaaaaccaacgaatgttgcctcctcctcttctgcttccttctcttcgcatctttatccagcagactcgcttccacagaacacctcggctggcgaagaaaccgaacaggaagactcatccccagcccttcacactcgttccgatcatttcacgcgtcgttcttctttcgacactcagtcggacgaacaggattccgaatctgattctgattctgaatccgagcccgaacgtgttctaggtgctcgtgtacacgctcgggctgcctctgccccgtatagatcgcgaaagagcccacagagcgagctcagtcagagaacacggccgtcaggcgagggtattcccgttggtcaggattcgtctttgccttctgtgtctgatgagcctaagagaatagggggtcgagagcgaagagaagagatactaaacagaagcagaagtagagcttctctaggttatggtactagagctgaggtcagtcttcggcttccccttctgttctgttgccttatgaccgctcaaccccaaacaaacggctttccattttttttgctccgacacatcccaaagactccttcactcacatcaccccgcgttccccgatcagtcacagtcgacgatctcggctctcctttccctcccgcatcgtcgtctaccgccagacacaggacgacttctagctcgctcgacttatattcgaggttggctcgatcacccaccagatcgcctagagaactcaatggatcccctgtcccccgacatccttcactttctgtctcaaatcgtcccgctcgtcgactgtcatcaagttcgaacggtaacccaacactaaactcatacacaagcgcagagttgaactcaagccgattcagaaatcgagtcagcatgcatgaacctcggagcgcgtctcgattagccgatcgagcggcatctagcatcggattctattctaagcatcctctcctcaacactgataaaatggaggccgattttttcagtcacgacgactacggccatgatcgtgatcgcagctcagcccaaccaaaagtagcgaataagacgagagatttactggagaggattgagagggagaacgaagcgagcgatcggaaaagacaggcattggttgagagtcaagctatgaaacgtgccgagagctccctgtccatgctttcgacatcaaaagggttcggttttcgaaggtcgaactcgagttccccgagttcgaccatagatttgaatagggtcggggaaaggacttatccgaatactacaggagggattatcagatcttccacttcactctcgcattttccagaacggttgtctggtgctagttctgctgctgccgtagacattctgaggtcgaggccgaagtctcatcgatctgtctttagcttaacctcacccgattcaccaacactcaccaacacttctaccgtcacccccaccgccaccgtcgctgccacaggacagaggagattttcaggctcgctatcggccaatgtgataaccaaccctagggtaagatcgccgctctctcgtgggaaaagatcatccatccttgccaactctcccctgctcccttcatccacatccactccttctcagactccgactgaaactcaatctggggatcagattcaaccggaacatatccgaaacctactagatgcgttatctcacctagagatgtcttttgcccaaatcaaaggccctgcagatccatcgtcagcggagaccatccgttcggcctcagcattcgtcaagtctgctactatccttcatcagaccatctaccaaggatctctgacaaatcgagagctcgtgatcgattcccaggtgaactgcgggtctaaccaagaacaagagcaagggcagagggatgtgagtgtggggttggtagccttaggtatgatatggaaggaggtaggaaaagtgcatgacgaacagatcagaactttgacgggtctgctgattgggttaccgaggtggatgagagaagtgatggagtcgagatcgagtgagagtgctcgtctagagaaacaggagcaagtcgagaacggtacatgctctttttctcctctcgcgcgctcgtgtatgagacaaattggttaacgttttttcttgggtggtccctcttttctttatagttccccatgcttcggccaaatcaccaacattcctacctccagactctgccagcatccatatttcttcttgcagagaccatattcaggctccgctaatcagttcacaaacagcaacttttgcccgagcatcactctcacctgctccatcatcagaatcagaatcacaagattcggcaacttcttctttatcttcatctctgagcaggcagttgtcgtctctcacaatcgaatcaaacgctgacgttgagattgaggctgaggctggacctcaaccaagatctcatgaggaagccaaggccagtcctgagcagaaagttgacaacgcaaaagagaaaccttacacggatacgcttgccgaatcattcgaatcacccttaccgactccaccaacaccaatattaacaccaacaattttacaccaaatatcctctccctcgttgcctccccccccctcgacaccgccgctgccaaccaaacctctctccggagccatagaagaaacctctgggcaaccaaccatcaaagcatacactccttctatctcttcttcctctggaccaagcaccggttcaaaccgaaggagctcactgttcccttcggctcctaaggtttcaccggcagctacgacagctgctactgccattcaagcttttaacttcaatcaatctccctccggaaggacatccgctgaagacccatctgatctgtccgacaactctactaacaattctctgcctcctctcgcggcgccgttgcctgcatcaggccagactatgaggttgaatatgcctttcctaggtcggtctaacacattaggtcggatccccgcttcgtcaagcgtcggtctaggtgcaggtgcagcctctgcttctaccagtggagggttagtagtgagagtatcaggcgggtcaagtcgacgcttgaatgtggggcagagtccgaatggccagtcggccgaatcgggatcagagaacggaaatgggaatggaaacggagtgaatggaaagaccgaaaggcccggtcccgtaagtagcgcgtttagaaagctgagcttctttggaggcaattaagatcatgaaccctatagatggataccacacatatatgcctttctctttctttggattcagactcgcagttgcacattctgttgtttttctagtacatgtacataatagtaatgattttgtaatcaacacggcaatcagacaggttactaacgttagtcatcacctccccttgatcttcctacatcttctttttctctccacataatcactaacaaacaacttctcatacacacggacaagcaaaccaaagaaatagaggaatcaaaagctatgccaatccttcagttctcgcccttgctttcttcgccatcacccgcattcttccagtcgctctcgaaacataaattagagatcgctaaattggatgacagggttgtcgccgtacaagcggagtacaccgagagtcggttcgttagggatagagagaaggaggagggcgaagagggagattgggtcgggttacctgggacggtcgatctaggagctggagcgcttgatccgttagtgacgtctctcttctttccatagactactctcctcgttaagtgatcatcatgtgtttatgttttggactaagattgggctgactgtgagctctcgtgtttctcctgttgttgccattttccttcaacagatctatgccttcatccacacaacattcagttcctatcagcgggatactcaagaactataatacgatcgaagagttcaagtcggctgacaagcaagccatatttcaggatgtcgttgatttagtacgttccttcgttgatctctccctgccctatagtgaaatgcagtggcttattccgtctttgagtcttcactacagatcaaaaagacatccgatgacggacttccctcactctcgcctttcctccttctaacattctcagatctcaagaagtataagttttactattggtttgcctttcctgggattgtccaaaagccagcttggcatgtgacagatgacggttggaagtctgttccatccgcgctcgtacgtccattcgtctacgtgtctctcttgatatggacctctttcctcacaatccatgttatctcattggatgaatgatattaggtcatgtccattaggagccaacttcctgagttcaaggcgctacatccgacagctccgaggggtagctacttgatgcgaaaggtctctaatgagttccacttgttggcacctcttacgtcttatcaagctttcttccaagggactattcctgaagaggtcagttctgtttttctttcatgaagtttcttttggatatgtgttgtttaaaccaaatgtcctgatctgctttgtcgcgctctacatgaatgtctaatcaagaggtacctcgtgttttctgacccctcggctctacctcaaaatcccggttggccactccgaaatgatttgttctatttatcatctgttcacggttgtcggtctatcaacgtcatcggtcttcgaggaggagaaggagcttcgatccaagggactgtgttcgtgcctgagcagaaccaggctgagcaggagtcggaagtagggctgaagggagagcaggaagttctcaaagcggttggatgggagaagaacgagaaggggaaacttggtcctagagtagtcgacctgggagccagtatggatcctactcggtgagtttccgatcaaactttcttcttgtcgaagctcaacaacaggagcttatcctatgtttggtggacttctttccatatgagacaggctggcagcgcaggccgtcgatttaaacctaaaactgatgaggtggaggattctgccagagttagatctggagaagatttctgggacaaaatgtcttcttcttggggcaggcacgctcggatgctatgtttctcgagtactaatggtccgttcatttactcgcttgtcattcatcattcctttgcttgctcacgttatctcttgcataaacaaacagggatggggcgtccggactatcactttcgcagattctgccaccgtctcgttctctaaccctgttcgacagcccctatttgagttcgaagattctctcaatggaggaaaggacaaagcaccggctgctgctgatgctctcaaacgaatatttcctggagtggttcgtttctttcattccatctcaaaccgttcctcgagttttgatcaacttcctgatggttatatttcacaacatacgcagaatgcaaccggccataccctctcaattccaatgcccggccaccctatttctccctcgtcacttatcagcactcaagaatctgtttcgaagcttgaagacctgatcgactcacacgacgtcatctttcttctgatggattctagggagagtagatggctcccaactctcttaggagcggctagaggaaagattgttatcaatgctgcgttaggatttgacagttatctcgtgatgaggtcagtttctgtgtattaacttgattttctcgagaggatatcactaacatatggagttttctcaatcggtttgtcttgtaggcatggagaaggacctagttcagagattggtaagggagatgagaagaggtctcgattggcatgctatttctgtcaggacagtaacgctttgggaaatgtaggtttctatctcagcctacctctttttatatccgattcttattcgacgtttgtcctctgatgctattttgtttcttgtggggatgttgaaagtccttgaacgatcgaacactggatcagatgtgtacagtctcgagacctggactagcgccgatcgcttcagccactgccgttgaacttttagtcgctctactttgccatcccgaagggtacattctcattgacctctgtcattttcctttgaatatatcattgcgtataagattctctaataaaaaaatctacatattttctctcatgctcagaatcgctgcgccagccgacaagcttccttcgaaaacaacggaggatctatcagataagatgtacaaatcaccactagggatggtccctcatcaactgcgaggtggtctttcaacgtatcagactctgaacctgagtggagaggctttcgaactatgtaccgcttgttcctctcacgttcgtccccttgctctctttttttttgctctcacttatcttctcttttcctctttgagtatgtactcacatttacgttgagatgatttctcctttgcgatgtaacaggtcatcgatgattatagatccaaagggttctcgatgctccttgaatcgttcaatgatcccacatatctccctcgattgacaggactagacaagttgaatgaagagacagagggtgtaatgaagagtcttgattgggaggatgacgaaggagatttgtaaatgcgcatattcagagacaggtttcattggctactgacagttcttcttccttgtcgactttcatgctttttcagcttctcctatctttctctctgtatgtgaatgtggattaggattgtctctttgaaatctttaaggttccccgatcgtatatacatgtcaaagatcgagagcgagtgttttgtttgtacatagtcattgctttacatgacgccaacgaagatcgaacgcgggaaagttgacagttgagatgaaagataacggggaacgaatgaaggaatgaatgagagagagagaatgaaggaatgaagggaaagggcccagatcaggtaaagctgcgtgacattggggcatgaatttgactaaagaagtcatgtcgtcgaaagaactggagagaataagaatagatgagatgagatgagaccgaaaggacacacatacaaaagcaaggggggaaaaaaacaacatgaggaaagccaaaaacggaataggtgcaagagaccaagcctccctagatcaagaacaaaagatgaagagagaagggagtataaagaaacacggtgtgaaaaataggagaggccgaacggcagctcctttatttctatctgtttatctggagactaggtctataattcataaacgtggccagcacaatctccacagaccgtgttcctgaaatcgatcgcgctcaatggagctgcgaaaggtttgggttgattctttggatcgacataggccaacggccgtttctttttcgtcgacaactctcttttcaaccctgacccgctcccaacggatatattcgacctgacggacgaattcaaaccagttgttgccgccacagacgacgaggttgattgatcgagcctcagttgagattgacttctggggattgaccatacctgcggctcgagcgagagcgagtctgaatgagggttgtgctgtttaagaacccattggccgctgaccgagccatcatcctcaaccggtggaacgattgagcatgtccctgcaacaggggcaattagacttccactggctgatcggttgagtgggaagacataggaaccaagtgcgcctgcaaatccagtgagagagaatcgagagggtgattcagaggatgtgtttaggttgcttccgaacgaagatgtggaggggaacgagttgtggtaagtggccgatcgagaaattggaggtgtcgctcgattgggagacgtgaaagagcggtagctctgcgatttttgattcttgtgcacgaactttggcggtcgggtcggcgtagaggtagcagcagacggagaggagatagatcctggtctcctaggagaagacgaaaacgatgctggggagagcatagcggaaggagggtcattgtatcctccagcagaggaaggagaggacatcgccgaagaaactattggtgggatgtaaagcgacgaagcaaagctcgaagaggagaattgacttatatcgccatctgggtatggggaatctgggacgacccaggtgccaaacggcttgatgtcctcatcgtcttccatatcctgctcaaacgaactttcagtaaggaaagaattctcatcgggaaggagcgtgttgataggtccattgggcatcttccaagtgcggacaagcgagtgatgtcgaatatgggggataggagccggagaaactacaggcggcggcggagatgagactacaggagacgatggaggcatagacgtaagctcaacaggattggcggccatcttgacaggtaagggagggtcgaacggagtaagcatcgatgggggagagtacgttgatgcataaccgataggcggaacaggtgtcggtacctcctcttcgtcctcctcctcaatgccttccgaatggtagtggaagttggcaggcgcatcgttatcataccctcccatgctgtccaggttatcgtccagatcgaaaccgagtgctacattgtcgtcactttcatcgaaactgctcgagaatgtctgatgttgttgagtctcgacatcttcttcttcctcttcttctaccaaactctccaatggccgaggcaaaggaataactccgaagtccactaagtcaaccatctctcctttgggagctccccacacggatgtcttccatgggtcaagcgtgtcctctgctggctcggcaacatcaggagtcgtgctcgctgatgaaatcacggagcctactcgggaagacgctcccccattgaaggaaaaccgggagaacgaactggagctgcgatcagacgacccagaactggaagaaggagtcggcggggtcgaacttgtcttttcatatcgacctatgaggtagtctggatgcatcactgactgccggtttcgtcggtcttcatcaattccttcagccactctgcgttcttgaagattgcgttcttctataagagcctcctcagctgattttcgagcttcttcagatcgagcaagagaggaagccaaagcaaacacttgatctcgcctacgttgtgaagcaagatgaaaacgaaacacagactattagtttaagacgagaaagaggttcaggaacagttcagagaaggcagtcgtacatttcgttaatcagtcgggtctgagcagccaggtgttcttcgatcgtggtgttcttgttggcacacggagctgaagacgacgcgccatccagggcagccaatctatctccgactgttgagaagaaacgccaacagagttgagtatatgcgagtgaaccagataattgttaagaatatgagaacaagacagactcacgttttcggattcgttctctagctaagtctctttcgacaccagcgattcttttctcgtcctttaacttctcctccaaaactctgcaccgctctttccaaccctcaacatcctccttcaacgagtctctctcgctctcaactatgtccaacagtgatggctcttcatccgccttctcttcttcttcctctccttcctcttctcggtcttgttctctcttggcctccaatagttgacggccgtcctcttcgcatcgatcgtctccaggttgttcttcaataagcgagaagaagaatgggtccgagtcggccgttggtatcctcgggcctatctttctacctgcgcccgattcattaggcgattctgtttcttctgcaacaagggaggaagaagacccgttgctctcgaaccgagcagcataagagagagatcctttacgcttattatccgatcctcttgttcccgaataaggcggcgaagagaaattagactggaaggacagagacccattgactgagctgggcgaaccgattaggtgggaccgatcggacgtcgtgctggaggagagagacatgctgaggggctttgaccttccccacccaaggccgacgtgctttgagtgagattcgctcggcgacatagaagatccgcccgatgaaacggaagatactgagccacctagatgtcggggagagtctctcaggctcgcaaatccaccaggcacagaaggtgaagcggccaggcttaggctgagaggtctcaagttggaccctttgagggagatggaagaggacgatgttggaagaggcagatttgtcggtggcgatgtgagggtgaggggtcgaagcgcccgtttagtttgtcgaggaggagtgtcaatcgattcaggaaccgaaggcgtagagaatgacctcgtcatagatggaaccggagcaggttgaaacttgttcgtagaggggttgggagtcttttcctcttcctcactatctggcaggcaaacctcgaactcttcaatcagctcggcaactggtgatcggggaggtttagtcgatgctgatgatacgacaggtcctttggggaaagagaaccctctaaaccgcgcgttctcggacagaggagtaggcgccggcccagttaaaggaaggataggcaccagcggagccgattgagacggagaaggaggagcagcaatgatgacagcgggcggagtttgagatggctgagagaatgaggagactgtcgcctcacttcttggctttgcgaaggtaaatccctggaatcgtttcttttcgtcctcgatcttgttgctttgatcgccaaaagtctgattagaagagaatctgccgccaccgaacgacccagtggaagagaatcgagggctgcttccgttcagccttccaccaagccttggcggtaagaccgactggggctgagacaaagcctgaggtgagggctgagactgttgaacagtcttcttttccttcgccatagcatcttcgtcctcttcgtcttcttcttcctccatgatctcaccaagtgcaccggcctcggctcctgcaaaccaaggagagactgaaccggctgggctgtcaaagtttgaggacgagaacgcgggggaagacggtgagagaagagaggaagctggcgaaaactgaagagatagcgatgaagatgagctagatggaagcgagagatgaactgaggcgggcaagagctttccaaatgagtctctcttggtgagacctgatcgagtgctagaattggaagacgggttggaggatccggaagatgatcccccgattagtggtgagcctgaaccggccgaaaacgatggaaaacataaggtgcctgtattggagacagagaagtactgctggtcagattgtttttattgctacaattagatatctcagtatgaggcacgagggtggggtgcatgctgccaccctctctgatagcgcccctgtcactccgattgtgatgtcccgccttttttgacagagcgatcctccagattctaagaagaaaacacttaccatcttgctcgatgtctatcgaatcatcactgagatcagggatcatcaccttttcaccccatccggtcgggccattgctaaggacaggacttcgttttctgccttcgagtgcttcaagtgctcgcttcctgccctcttgagaagagatttccttttccttttcttccttgacgaattgcttttcggctgctgccggaagaagcatgacatccaaggattctcttctcgtagacacacttagtgagcgacggtgagagtgacgtttggatgacgaagcttttgattgatgattggctcgattggctggtggtggtggtggttgttgttgttgttgttgttgtgtttgttgtgtttgcgggaaactaaagttggaaggaatgtatggcgagttggacatgttgctggtcatgagcatgactggcgagaaaaaggaaaccaggtacagagagggagagagggaaggagaaaaaaaagcagaacgaagaaggagaagaaagctaccggagcaaggcgaggtgttttgggtaagggtgaaaggagacgagaaggaaggttaccaccaacaggaacagggctggatggaagcgccatttaactgcggatctgtttattacccttctcaaaatatttatgcatgcccatccacttttttactcttccttgcatctctactctgcatttttacatgtatatggttgtgagatatcgctgctttataaatcagatctcttcctcgaaagtctacaagtttgttggcaagttgctgcttctcagacacacgacgccattaacgcgtacgcgcgtacgctcacgaaaaacaaacgcgtcgatacacgaggtgccgccctcctagctgcgcaagagcaaccctaaccgatggtgaacgatgcatgcccttctggatttgggtgttctaagaccacaaaccaccgagatcccatcggtcagaggatgcgcgatcgatacagagacgagcgcagaagtagaacttcaggctctcagattggaactggggtgaacagaggcacaagggaacagagttgatagatctcgatgatggattacactggtgtatggcgagtacacgaactgggaacaagagcagcacggaggaatgacaagtggacgaacaaagggtccaggcttcggaggctatgctatgggtggcaaaggaagcgtgtttcatatctggttcccagactacggaggtactgcatggaggtagtatgacaggcagatacacagacaaacgtatcgcacgaaaggatagaacgacagggttgcacgcaagcagagatcataggatgtggccctggcacattcggtgtacgtctacatagttagcagttgatgcatcacccaaggagtaggagctctggcattggatctatggtactcaggctacagacggctaacactcagctcacatccttgacgattgtgcgggttgtggtctgagaggatccaagtccaaaagggccatttatcgaccatcatcggttgagatcactctcaccgtgcctaaggcatttacctttaaattgtaaggagagagccgtccgttggacggcagatatggccatgcgatggaaggcaattgcaatcgcacggaagagggcagctcatccgacacgcgcatacaaagatatcacacgtaaatgtcatctgtgactgctgaaagtatttctcactccacctcagcgacggctgtcttactcttcctcttaaaagaatgacgatatggaaacaagatcaagttacattctctcgttgatttctctttctccaacgtgttgacgcatacgatatcccaagcaagaatcatcaaagctcaaagttcggactagctagaaattgttacagaaatactagccagggatacttaagttacgaattacgaataattcgcggtgtagggtcggtttctgggaagtggttagcggcggcaggtaattttattttttttcacaggctccttctcgtcctaagaatccagcaaagcaagccgctcgttaggttcgtcgatttggtatacgccatgtcttgacacaagctgtggttggatgctcagtaaaacatcgaagaactaacatattttttctttttctcgatctgtatgattttttactttttttgtgctctttgttgttctcccgctggtgtacgctaggtctcaacttctagatctacctttgaacttctaagcaaagagtgagtttccttttcgcacaatggctcaaaaattccgttaagaacgtctagaaagctcatttggctggattatcagtgtcccacgagtctgtttggttctcccgaccccgaaagtacggaaagggctctcgacaatggtaggcttttccctcctgtagattcaatcagaaggaaaaccctcggttgaccaagattatggacctggttttcgcctcgttggttcctttgtatctttcagccgagtctgctccaacccctctggtcttatccgaaagtacggtattgacacctgccgacagtgcttccgggagcgatccgctgccattggattcgagaaggtacgttggcaaagcagtcattctcttagtcgatatctactttccctccgacttgaaatttagaacataagaatgcggagcatgtgtgatgaaagcggtgaagcaggacgaagtagtgggggagtgggggtatttgagacaatctgcaagcgagatgatcagtgttgagagaaatgtaggcgttgagtatgttggtctgaccgggactgggattcttgatcctaaatccgagaggtttgcattcaaaatcgaagcatcaggaggggcaggttgacgaccatggcctttttgatcttattctgcttccttctttctgagcaccaaccgcttctactctgcttccatcgaaccgattcttacatcataatgcgtctcttctgctttcttgtcttgcaacagaaccgataatctattctcggtcacatcgatcctttgatgtttatgctgctttcttaacaccttcgaactctttttttctgtcaaccacgctcgtgtttcttgttatcttcatccgtctcgatatcttatcatccaggaaagaacttgattttcaaaaggagaactgaggagaagagctggaaacgacaaaaagaacgaaaaaataagcactaaagagatcaggaagcgctaactcgagaggtgtattctgaactgacgacgcaagagatctctagaaaagtggatctgtgttagcttgttcagcacatattcagagctaaccaacgtctgtgatgtgattcggctgagcttactgaggcgtttgctagagatggactagctaattctgatgtcaacgaactgcttggcagatgaggcgcatgtcgtattctggtgaagttggcaagacgataggtgaaggagtctgatcgggtccctggtggttctttagtatatatctgcgctcctcgcctcaaatgtgcaggtgggacatactcatatacactgtatatgtagcctactttggatgtcacagatcttttggttttggcatatataacacgagatgtataggaaagaaagagatagcgagcgcagaaaacaaactgcatcctcagtgattatctgtaatctcaccattcgatattaagtacatccttgatagaacgaaacggacggatggacgagaaacaaccgcctgatgcatcctctcgttgctaaagttcttttaactattttcatgtctgcattcatgtcatatctgtgttttctatataaatatatatgtcatcgtaatatatcccgtgtctagataaactatggcaagacctcggtcctaatacaacttttgcagttcaactgatggaaagtttgatctcctctcttcattggctcatctgacttttgagtgaagcgaaaggtcagaaggacaggcgggaatatttgctgcgcaggtacatcgagaagaaatgcgcagcagttccagtccctcgttgggaaagcctggtgggtgggtacggacagacgttgtgagaaccgactttggaaaaaaacttctcccttcaccgactttcctcaagatggctgaacaaatcgagaaggcttaccagaagcagcacttgttccagaacaccaaggctaagggtgcgtccatatagttgtcgtctttgatggttggattaatagagataaattgctgatagtttatcttttattttcttcccttttttcttgttctttcggactggctcctttgcttcctacgggggggttgggtatatgctgctggtttggggattggacgggggttaccaaaaacttatccacactatgtcaacactgtcaacaacactcttcactcgtaatttgaaacaacccgaaaatatggatgtcgaaatgtgatttgggtgaattccgtgttggatttggtctggtttcgaaaacgggcattatttggaccgtgtgaatgtatcatttgggatgattcgataaacgcaactgtctgcaggtgggaagaaggtcgccaccaagaacaagaggtggtacaaggatgtcggacttggcttcaagacccctgctgaggccatcaacggaacctacatcggtgcgtttcctttaggattccctcgttctaccaactggaaaaccgagtttgggcaaaatgaggagaactagagaaagaacagatgaaaagttccagtctttggacttctgtctttcttcggttgactcaatgtccagctcggtttcttcagagccaaaacatcgaaacgccttcctgggaggaaacttctagtctgacaggtttttcttgttttttttttcttgctcccgccttggctccgattttgcgtttcctacccttccctatcgaccttcattctcggtattcgacgttcctccgactcccaaaatctagacaagaagtgccccttcaccggtgatgtctccatccgaggacgaatccttactggtaaggtcgtttccgctggaaagatgacccgaaccattgtcatccgacgagattacctcgtatgtgtccatttttttctctgtcagtcttttttgtttgaagaacagccaacccactttcttgtgtcttgtgtattttgattgtttctggtacttgattagcactacattcccaagtactcgcgatacgagaagaggcaccgaaacgtctctgctcattgctcccctgctttccgagtcgagaatggagataacgtcaccgttggacagtgccgacctctttccaagaccgttcgattcaacgttgtcaaggtccaggccaacaaggccgccgccaaggctttcgccaagttctaaacctagggactgtctggatgaaatgtcgaggtttttctgatttagggtttcatcccttgttgcacgtctcggttcctactctgctgtctctgtcctgctgcatcaatccggtagctggttggatattgctggatttgaattagcaaaggattgagaaacagtgacaacatttagacacatggaaccacacaacttccgaattagtatctctgaactcagacgtttaagaacattttaagctcatcaaatcgacagtaaaactgaacagagaagacgaccgaaggcaacaccaaagaaacgaacatcatacatgctcaattccctgctccttttcccgatgatgtctctggatatcgtgttcatcttaaatgaagggggggaaagcgaggaaatggcgagacagttgaggctagagaagagagaagagagaatctttaagaatagaaccagctggtatatcggtaaattcggcacgctttaaatacaagaatgaacacagagatatagagaacatcatttgcttgtcttccttccttctggccctttagtgcattgtcaagtgtgtaggactaagatagtcttctaagaagggcgatccttaccgtggttagggttatcgtcggaaaatggaagatactctgattacaacgttgtcttttttgatgtctttgttgttgtagttatttctataattttcctctcatttcgcaaactccagattgatgtacttcgcaagttttaaaacagaggaaagggcaatttcaatttttcttccataaagaggcatgacatatgacccaaacaagtcttttccaagatgttggatagatgacccgccagaccacaagacaaacactttttatcggtaagacttctggactcgggctcgggctccgggtcctccgaactctgtttaaccacaaccacaatgtgacgcgaagaaaaaacgcaaacacacacgaaaagcaagcaaccaaaacagaggaagcaggcaggtcggggccgattgaaattggaagcaggaggattagtcaaccgatcctcgcctgggaaagcgaaacctgcaaagaggtggatcacatgggtgttcaaattgaataaaaacgagaacatactcttgggctccattcgtcggggatcggcgatgaggagggttcggtcgtaggcgacgagagccttcttgatctcgagggcagaggcggcatcgacgttcttagcgtagtactgatagacgcaacaaattaggtagcaagtgagcgacagtgtttttcgtcaagaaaactccagaaagatagataggaaacttacagcgacgatggccttaccgatggcctgtcggacggcgtacacctgggagacgtgtcctccacccttgaccttgagtcggatgtcgatctggttgatcttctcagctccgatgacgaggataggctcgtagtacttgtatcggaggagagcaggctcggcaagtgagataggctgtccgttaagtcggatgagacctcggccaggggtggcgtgggccacagcggtggcagtctatagagaagtgaataaacagagtcaggattggatgtgaaaaattggcagctcggccaaggtcgttcgacacaagctagctctgcccatgctctcttccttttccttccaaactttctcaaaaacgcccctcaaagatagaagagagaggagatacacaccttcttcttaccgaaagtctggacagcgacggacatcttgatgtatagcgacttgtgaggaggtgaagaagggacaagaggagagaaaagcaaagagaatgagaaaaagaaaaaaaatgggacagggcggggatggaaatttcagcttccgaacgtgggtttgcctccgaatcaaggttacaaaagattacataagcgacttcctgttttgtgacctggtttcatctgtactctccgtctcgttcatgcttcgagtgcatgtatatgcatgtttgttctgtctcctttgcctccagcaagattcaaacttataagtatgcatgtctatcgttcagtccttcctgctaccaaatctagagagcgcgcccgtgtcctcagccttaacggcatttccagtcttggctgcttttgcctgctgtcggacctcgtagtcctttgccatctttgccttcatagcaatctattgtagattcaacaattatcttcgtcagattctgtggatcatttcaaagcgagagataagcgagaactaaaagaaaaagaagcaagactcacagtcgaaggatcaatcacgttcttcttctttttcctcatcaatcgagcgaccgtcttatttcttcctctcatcctctttttctcctttgcctccctcttactcgcgttcgactgtccatccgggccttcttcgccagatgatgcggacggatcatctgagtcttccagcccaccgttcgctcgtaaacgctcagttcgagaaagatgagagaagggtgtaggctttgttggtctgggaagatgtgtgaacttggtgggtgcggcgagagaaccaatatgtgattcgtccatagtgatgagctctggttgaatctattttttattgttatcgtcgtcgtcgtcatcatcgtttgtatgcgccagaagaaagtcaagaagaagtcagtttgtagaagagaccaatgaaagaagagaacaatgacgaaccttctccataacggcccggacctctcgttcctttcttctagccgtgctctcgaacatatctccctcgtaactatcgaagttgggctctccagctcctggaatgagcaaggtagagaaacctttttcgtgtccaactcccaacacatcttcgaacggacagaacctaacatcgttcactttcacgccgcccccaccaatcaagttcgacaaataaggtggcggcccgaacacaccaggtcccgaaccagatcgggcggtcgagcctctagaaacttcgggcgaatatacagagacggttgttccggcggcaacggccaaaagacctcgttgggagtaagaggtcgaggtgatctctctcttagaggtccattggttgacgggttgagcccagtttcgggaatcccagatcttgagggaaccatcaaggccagtggtagtgatatatcgaccaagagagctggacgatggatcaactgagactgaagagattgggccaagatgggctaatagtcggacgtgaggagtagacatattcggtgaccagagcgtcatagtacctgtagagaagttttatgagtacgaattagtagtctgtcgattgcaaggagtgaacagaatggaagaaaaacaaggaaaaaagagcaaaagaggaaaacgcaccattttggtgaccaagatgaacgataccgttgtgttggttgatctccatcacattacatcctcccaactttgttcggtgttcctgaacgacagatccagtcgaggtatcgtggtactttaggtaccctgattgagagattgaggtaaggaggaaatggtaaggtaggaatccgagcttggttggttcaacgtgatccttcaatttgctgcaaagaagaagagaaagtatttttgaaccaaaaaaaaaaagattactcataatcaggaaaaaaaaacaattgtcaggatctatgaaacagaaccaagcaaactgactgaagctccgttccatcctgatcatagatgaacacatatttcttttgggcgaccgcatggaatgcggatgtgtgcaagtatctatttccaaaaggagaaggagaaagatgggaatggaagcgttaatgaacgaacagactcggaaccagacgcgcgcgcaagacaaggacaaggtgactgacacaatatctctgcaggtctcattcacataaatttcggattccaacttagcagcctggaagttcatagtagagatatgtcctcttcgcgttgcgagtgccaagtgtctttccgacgaaaagagcacaaaggatcgagatatttggatgtcagctaaaggaatttatgcacaaaatcgagacaagaggtataagaaatcaggactgaccgtccatccctggtccaccgaccgacaactccgccgttccctccatctaactttaggtcgaaccctttggctgcactggctgtaccagccgcgtccttgatatctacctgtgacaccttgaaagtgcgttccataggagccgtagtttggatcattcccgcttggttctcgagaagctatccaaagataagcagggacaagagaaaaattcagtagtcgaacgatatggaaggaaaaatcgatgagtacaacgactacaaaatctaggaagtacgaaacaagtaatgagctggagattacgaaccatggctgcatcctctcgggccttctctgctcgcttctccgccaacgcgaccgctgcaaccttggaccgaagtttgaggtccttaatgttgctctttggggggcgaagctcgtcttttgtctgaagcgaggatggtgttcgagtctgataggtcaaaggtcgacacacagaaccgattcagaaagatagaaagaagtcgagagacaagcattatcagcaatcattcgcagaagagtgagaggctcgaagagggaaaaaaagcagagcaggaagagaaggaggacccattcatatctagaaaaaggaagagaaacaagggagcaatggttggactcacgcctggtcggagcgagtgtagcgttgggtcgatcatccctttagaccccgcatcgacagtcttgtgagggaacctctttggaggcttacccgatcctgttcctttggccttgttcccgcttggaacctggtttttgttcttccctcgataggactcgatcggtgtcgatgtagccaggaggttatccatctgaagtatgggtgagtcgtcggtgaagttgggagtgcggatgatttgaaggaatggtacaggtaaactgggatgaagacggttggacgatttttggatattggtctaacatggcggtgcttctatccacgtgacctggtaagctacacaatcacctggcttaggttcaagaaactccaactagacgatgtatgcccaacatcagcactctttattgatcatcttacgtgatagaattgatgtatgtcgttaattgtgtcgctgatctagacatcaatatactcagagtatttgatcaagggatctagaaagaagcaattctcttttgtcatgaaatttgcgcatagaaaaacttctgaatccgggagaatatcgataaccataaatgatggaagtaagtagctatgtgtccaagtcatctcgtattcaatgctctgtactgtgtgttcgcgcgcaactaagaggtggattgtatgatgtcgaatgagagggtgtgtcatgagtatctacaacggcgcatatcatcgtgcgcgtgcatccaagagaagacggaaggcaagaatggctgcacaacacaattaaagaaactcagactcgtctcggattctccctgattgcgatcaagttggtcttgccttcttttattgttccaaaggtccatctcttagacgcctcggatgggtggaaaatcaagatgatgaccagaggagttgaacatcaatataccttactacttctgtcattggtattcttaagttttcgtctagctgatcggacactctcttcttacgttcatataaaatatcatagatgtacggccactccctcgcgcaatctaaatgccaaagaatccctccgactccgtgtgtgtatgatgtgcgtgtgtatatgtgcgtgtttgttggctacggtttccgacggagtttcaatttagtcacgcagaaatttctcacctccgccttttctttctggcctttttacttgcctttttgcctgttcttttttctccttcgttgtcccttcaagaacatcgtttctcgcaatgtcgtgagtattcaagtctgtttgtcgtgcgaaaggccattgtgctgaccttggcttccgtcatccttctctcctccttcagccaccgaaaggttagtttttttgcagttgttcacgcctttcaaacggcgccatggccgggagactccaccccaaattagggaatattttcttcttcccttctccactttgggctcctggaccgggcacgagactgtcagcatatagactgactttctcctctgccgtccaaacaaccaaaaccacccacctatagtacgaagccccccgacacggatccttgggattcttgccccgaaagcgatgcgtcagaggacgaggaaaggtccgtatctataatttctcttcacagcgttcttttctggtctcagctattcacacaacttgtcccgtccattcaactacaacaggtgaagtccttccccaaggacgatcctaagaagcccgtccacctcaccgcctgcatgggatacaaggccggtatgacccacgtcgtccgagaccttgaccgacccggatccaagatgcacaagcgagaggttgttgaggccgtcaccgttgtcgagacccccccgatgatgatcgtcggagtcgttggttacgtcgagaccccccgaggtcttcgatcgctcaccaccgtctgggccgagcacttgtctgatgagctcaagaggcgattctacaagaactggtaccgatccaagaagaaggccttcaccaagtactccaagaagcacgccgagaacaacggcgcttccatcaaccgagagcttgagcgaatccgaaagtactgcaccgtcgtccgagtcttggctcacacccagatccgaaagaccggtcttaagcagaagaaggcccacctcatggagatccaggtaagcttgacccttgctctcgatttctcactcaactcgcttttgccttactcacacatcccctttcttaggtcaacggaggaaacgttgccgacaaggtcgccttcgctcagggtcacttcgagaagtccgtcgatgtcaagtctatcttcgagcaggatgaggtcatcgacgtcattgccatcaccaagggaggaggattcgagggagttaccgcccgatggggtaccaagaagcttccccgaaagacccacaagggtctccgaaaggtcgcctgtatcggagcttggcatccttccaaggtcatgttctcggttgcccgagctggtcagaacggtttccaccaccgaaccgagatgaacaagaagatctaccgagtcggttccggtgaggacgagaacaacgcctccaccgatttcgacatcaccaagaagaacatcaaccctatgggaggattcccccactacggactcgtcaagaacgatttccttatcctcaagggttgcgtcgccggtaccaagaagcgagtgcttaccctccgaaagtccctcatggttcacacctcgaggactcacttggagaaggtcaacctcaagttcatcgatacctcctccaagcacggacacggaaagttccagaccccggccgagaagcacgccttcatgggtcagctcaagatcaaggcttaaatgcgcttttttttctgcagatttcatgtcgtataaaattcagatcatttcataaaattaagaaagtgtacacaaagagatcatggcaagcgacacaaattttctcaacccggtgtggtaacgatgagatagggcaaagaatatgcttgtagaaattttagaaagtaaccctaactatatcatggagatatcctgattgaagttgttaaatatcatttatgcacccagatgtctcttctttttcactttctttgtcttcagaaacaagaatcagataaatttgagtaataagagcaagcatcgtagatagaaaggattccaggagaaatctttcaacaagaaaccacaagagaagaattcatcctaagcataatgataatgggtgaagaagcagaaaagtggagggagagatcttttctattactcgtacaatgttgtatgcaatcaaaacaagaataaggagaccgatacatagaacaataagcgtaaggatgagtgaaaacaggatagagaagccggtatatctgaaagagaacgatgtgtacgggaataaatagacaagaggaatagaaaacacaagataaatagagataccaagatgagaataatgaggaataacaagaccaaaagagaataatcagacgcattgtcgtcttcgagacccaaacaagagaagaattagaaaagttgggaaaggagtgcggtttgttgtaagtggattttacatagggcgagctagaccaatgcattagaagactgtttgcagcttttgaagtaattcgtcgatccgataaggttttacaaccacgtcgtccatacctgcgtccagagcggattgaatttgatcggcatgagcattaccggtcaaaccaaagatcctttgccgggaaccaatttctccattggactctttggaacggatgatcttaaccgccgaaattccatcaagaatcggcatgttgacatccattaggacggcatcgaatgtctgttttccattccccatggacgcaaataccatatcgacaccctcctggccgttgtttgcaacttcacacgttatcttggccttgttgagttgacgacgaaggaccttttgattaacctcgttgtcttccacaacgaggatatgaagtcgcttcaaagcgacgtcaatctgaagagggatcgcacgggccggtgagttgcctttcttgtcaactgcgatcgtaacctcgaagaagaaccggaacgctgatcatcataaaggaaagaagggagtcagacattttaagattggtcttgaggtatacggcaggagcgaaagcaaactaaggaggagcttactcgatccttcgcctggcacactttccacatctatgcgtcctcccatgatatcggtaagcatcctgcagacatagagtccaagaccactacctccgaaaacagtatgagttgttgagctagcctgagaaaacctccggaagagcttgagcagttcggcaggcgtcaagccgggtccagtatcactaacggcaccataaacaaaagctttggatccaggagcatactcctgattctcgaccaccggtggaggtcgacaggaagtatctagaggaggggctccccggatgtcaacagatatcgttatctctctcacaggcgcgtgcgcggtgaagcgaatagcctgtacaagtgcgattgagtagatgagcgatagacagccgaatagtataacaacatgaacaagacttacattggacaacaggttgatcacgatttggcccaatcgaacagggtcactcatgagtttcaatggctccagtgccaacaggctgtttcccaaatcaagtttgagctgaatatcctttgtgcgactatagatcacacacaattccagaaagagttagtaacacactagtgatagaaagaggtggaggaaatggctgaccattcattcgagaaggtgttaacactgaagaagtacagacagattggatgtatgagctcacgtccagacgaagcagaaatgaagaaaacaacgaacatcctccgacactcggctggcaggtcgacaagaaccgccgcaacttcaagagtatgaagctggatcttccccatagataagacatcattggcaatccgttcttgagagcactttttgcggccgagagtacttgaagtcagcaaaggcatggctaaacagagtacgaggacaacagacatacggccatttcatgtatggaattgagagcctaatttatcacaaatttttcttcagatcttgcatgacagatggtgcagacaagtttgaccacttacatccagatcttcatccatcaaattcagcagctgttcattgggctgataccggactttagtgtctatgcatgcttgcatttcatctcgcaaaactggaaaacaggcaagcagatcagagtttgtacaaagtaaacgcagttgtgagacaatatattcacagaatgtactcacattgtaagtttcctttgcacaaactagcacattgaactaaggatgcggcgaaggaacggcataatatgaactttctgacacaagcccaacaaacaagcgtagcacttacgaatagctgaaagagggtttctaagctcgtgagaaatcacagacaccaagaactcttgatgccgtctgtcatagtaggaagaatatgttcagcatgcctgaaactgatcatgtgttaattcagcgatgactgaacgaatcttacttctgttcgtcagctatacgtcgccgttcttcggcgtcttctgctcttgatcgctcggcctccatgttcaaccgtcgttcaagttctaatcgttttcgatcggttatatcggtctgagcgttgcaaagcgagacgcatctgtttagcacaacgtagcggttcgcgcgagaagctgaaagtcgaactaacgaaagagctcaggcaggtaaaggtttcgtcacttgagatcaccacagattgacagaaagtccagatacctgcgatcgaaattaaagtctcagctaggaatctagaattcagaatgcgagaggaagagctatggggcttgccattcttgaattttatctcggtggatcccgtttgaccacgcaaagaattattatgtatatgaacagccttctccacatagtcatctgcaacataatccaaccattcatccaaggacgcatcctaggaacataggtaatttaaaatacgtgtcagcaaccagaaccaaagcctcccagtttcaactgatgaacaaagattcgacatacaggaggaaatccgctttgccgatagaaggcctcgtttgcgtagaaaacaacaccttgcgcatcggttcttgtgattcctaccggcgacagatcggtcaataattcactattccaagaattaatttgttagccgatagaactaataaacgcagatgaatataagcagccttctagatataaggataaacactaactttgctctcagctgtgagaagaagaacccaaatcgagagtttagtctaccacagatagataagcaagcaaatggacacatctatcacatgcaaaactcacctgctccaggaactatgagaagaacagaagaaacctcaacgacatcagcctacgctcactatagttttctcataaaacttagaaaacctacctgatgttctagttgtatgcgccgtttgcccaactgcatttgaagatgtgacctcgcaataagctcatttctactgaaaggtttcgacatgtaatctgaattgcaaaaacttttcagtatgagaaggaacaaaaaattcaaagtaacagatgagactcaccctctgcaccgatgatcaagccattgattctgtcttcctcagaggtctttgctgttaacaggataacaggaataaggtttgtctctttattcgctctaagagctttcaacagctgatttccgtccatgattggcatcgaaactattccaaaaggcagtatattcaaaagtcaatgtcttgctctattcttgtacctgaaggcataggactaaggaagaacaacataccatctgaaatgattagatccggcttgtgtcgcaaagcttttgtgaaggcctcttgaccatccgaagctattataatcttgcagtacgggctcaatatactagataagtacgtctgcaataagatcataacgtttttgtcagctctataaacttctcgagctaccttgatacgcgaatatgcttaccgtcatgtctaagtaaccatcaaacagagtggcagattgtttcagcgacaaacgaattaacgagaattttatgcgaagcttaccgtgtgaatcgtcgacaaccaagattgagtctctgtgtttattccaatataacgcgttcacatctatcggacttgaagactgatgttgaaaacacagatgacaatggttagctacaatcaacaacagtcaaaagcacggtatggagatcgcaacctacatcggaagactggaagacaagacaaatacaatcaaacgttcattgagcacatgtatctttatatgagatcctgacacaacagcacacgtctacttaccaagccgccatccgagagattagcagaaccgttgttcgagtctgtattgctcccgctgccattcttgtaccatctagatgcctcgtcaatgattccctgaccgtaagtaatacccgtagctgatacattcaaccgagaacagacaaaacgagcgaaggtttagttcgataccagaaaccaccaccaccaccacgacgtgttctctgaaaacaggataggacgtacatagatctctagtatcttccacctgggcaacaggtaagtgagcccgaccatatggaatttggacggtgaacgttgacccatgtgcgcctgtctcgctctcctcagccgttgatgaggtaacggaaagagttgccgagtgaaggttgatcagctccagagttaaggaaagcccaatacctgtgcaaattaaacccatggattaaccgaacgattctctatcgaactatataactgacgagttcagcttaccagttccttcatgcgatcgagaggtagaagcaactcgatggaaacgctcaaaaatacgactctgctcgtcctctgtgttacagaaatacagacagttgagcttgcctccctcttgataggggttcgacagatatcatgggcactcactaggaattcctataccggtgtctgagaccgaaaagacgacatagtcatcctcgtaggtgagcttgacatcaacagatctacgaggcaaagagaaggttgtcagtctattgatttccgagaggatggagcttgaatgcagcattgtgatcacggaccccgaaagagtgtactaagagaaagtcaaagccgatgaatcgtcagtgtcggatatagatggaggaagatcaaatacatatgcaactcactttaaaagcgttcgataagaggttgaacacgatcttttcccaccactctcgatccactaagaaaaaatcacacatgaaagaaccaggttggtatctgccatacagggtcatgagaccagaacgagttcaccaaccatatactggaacttctgttgaagactcgcagctgacattgtactcaattttttccttcatatcggtggaaagagaaaaagttggggaagagaagagaaggtaagcgtcaccagatattcacagtcaaggatagtccaggacggaaggaaataaagagaggaaaattggacgcacgacctcgatcgcaggacggaaagaagctgccaagtcagctgtgagctctccgatattagccggccggaagtggcctgtgagtcgaccagcctccaattttgcaaaatccatgagtccatcaatctaaagggagaaaagagtccgcacaaatgctcagggaatcagcgtacgtgagaagagatcaagacattgagaagtgctggccttactaatctacctagccgagtagcgttcctcatggcgagcgtaaaaatcttcttccgacttggattactttctgtcgcacagaggttttccaacggccccgctatcagggtgagaggtgtcttaagctcatgacttatcgaagtgaaaaagaatgtttttgctttatccatgtcttctagacgcttggttcgcaggacttctgattcaaacagagagatacccctaagattcgagagcaattgtgcactgaagagaaaccgatgcacaggcatagaatcagtatatacttgatggtcaactatggtaagatagaaatcttaccgaagatcttctataaactcttgataatctgcgtcgtaaggccgacgagctatgagataagaataccccaacagcggttagtgaatcacaggcagtacgtaggttgatcacatatgagaacaacgactaactgtttaaaccgactgtgagagccagagaaacaattaagcagtattatcagtcaaccattcctgaacaagaacataaaccgatgtagagcttttcatactgataagaaaagcctagagacgagaaaaacatgtgaaagagaaggcgctcagcaacaatagataattgtctgatggaaaaaccaagacatacgagtcgccctccgttataatcgtccgatattggtatcaccacactacgatcagaaatccgccgcaggagatgcaataagcaatgatagaaacaggagatacacagatgcgaaccggactgaactgaacactcacgcagatgtaggtgactctccccaactcctaggttccaaaatctcggcaagttccggatccaaactttctacgtgaacaactcgctgagtcatgaatgcttctctgagcggccagggggaccgactctttccacttgggtccggcatctcttgtggatttgacttattgaactcatatatgttgagatcaatcgtcaagggtgccgaagcgtggtcttcattggctcagacggaccgatcgttgttagtgctgtagcttgtgaaatatgataacgacgagggaacacacgatctgaacaatcacctgaaggtactccaactaaaagaacaaaattggcattagctcaaccgacctcgaaacgcgctagaagagcattcacacatgggtagaaagagagggaagaaagcagtccgacgaacctgttccagccagatgaaggacgatatctctgttttcacttgtggatgaccctattttttgtcgaaaaacacacaaggtggtttcagagtcagatttgaagaactacttgaagtgatgcacgtcggtgctcaccaatatctttggcgtgatagagataagcaaatccaaagtcaatcgggtttgcttctacgcactacgagtaatagacaagggtcgaataaagaggttaacttctgagatactgtggtatgggtgatgaagacaatggaaaacaaattcacttttaacagcccggaagagaactctaggattgatcgggccgcggctacaaagtaatacaaaagacacagtatcagtatggcctcttttgtagaaacatatatccatagaacgcgagctcttgcacaaagacggcgatccgctgactaaattgattctaatcaccagtatgccttccaatatctcgaacagatttcagccaacgctctttgataactttccttgtggcttctaatgagttgattaagagaccacctagttataaacaaagaagaggaagatggcgtaaaggccgggtcagaagaaaacgtgtgttccgtaaaggtagtgtttgaacaaactaggtctttcacctctcgaaccatctcctctggtcaaaggcgtccacctccaactctgatacgattccagcccccctatgaacatgagatctagagagaagatacgaacgagaaatatgagaaagggaatagagctgatagattgtaagacaacaggaacatctaattaccatcgtccctcatgagagattggcctctgatcacgacgtcttcggccattgccgagtactcttcccaaatctgtttcaataaagatgtacatttccatcagatttcggtctactaagtgcatgattcaaaccatcaaacacagttcatcggaaattactaacaggagcccaagcttccgccgcaactaccaagaattaaaaacttatgtccgcttcagtcccaagagcttactgaacggcggagaatatatatgaaagaagagaccacgatgagaatgcaactgaagggaagaggactaacgtgctccgaaagaatcaggatgctgggcagccacagctcgagcatgagcatcattatagaaaatggtcatccctgttgcgggatgtccccaccctgagtaagagaaaaaggcccatccataagcataatcagtcaaagatgaatctcggctgtgtatctacagagacacagaaagggaatataacgttacgaacagataattgactcgtttggcgttcgcagcatgatcgatagcgctgctcttagcgagcctggccatttattctttggacccatgcgggtatcttcccacttgatcgtgtctagaagttcttgacaagagatgatactgtcagaatccgaggtatcagcctccatgaaaaagtcgttatcacgatcatccggtccaatactctcgttcaatccggcttcatctttttcatctagcttttccatcattcgggatctatttggctctccaagtccattgccatggtggaggtccgcatcatctccctcaatggcttgagttcctgctccaggagctccatttctcaagcgggtgtacgatccaagactgctaagcttgctactcaacgtcgagcgtgttcgacccatatcacttcccgtcaaaccggaccgaccgccaactgagccaccgctgtacgacccggatagactccctcctccgatccctcctcctagaccccagcctggacctttctttgtaccagttccacgaacggtaatatcctcacggcgggtactgctaggtgcgattgatgaattgatcatcggctgacgaataggtattttggcgtgagtacccgcactggcgaatttttttgtcggtctgagttgggcggctcggaccggctgtgggtgaagatggagaacaaggaaagatggatgggaggaagaggtgagaatagcattgtatgttttgccctgtatccaagagggaagaaaaaggttgatttcgatatacgtctgagactcgtctcggaaggaaagaacgctatcggtgttttcagacgcgtcatctcgggctagagcagcttcagaggtgatgtagtcggtggcctccaagtctctggttgtgattatttgtttgagagcctcaccctcggcttggtcgatacattgttcgaacgatccatccatcaataatcgtgccgcttggttgtaccatagcggggtaagacaagctgaagacgaggaggatctggtttgaacaggagacgaaagtaattttgatcaaaatcaagcagacgactacgcggattgcttgattcaactcctctttccttgacattccagaagggcggtcaatatgcgaaatagacggttttacaacagacttacaatctaggagaaggaagcactaatgctgggtgcggatgggaatctagatacggcaacaaagaaagattatcctggccatcgtcgaacatcgtcccgagagatagaaacaggataagcgagaagggtgagtcagcccgaaggatttcttaaacatatataacaaaaggagttcaagcagccccatcacactatccaatccttccatcaagtagtttgcagggtatggatgatctctgcaaccctctcgatccgcgacactcctctgcaagaggctgtctttcgagagcttcgaatatcgcccttcaagacttcggcggggtacgatggaaagatactcacaaccatctccttgaggatcgaattgttgtcctgttgggtttgagaggacaaggtcgattccttcctgttcaatgtgggtggcataggttgaagcttgccttgaggagagagcggagaggaaggcaacgacggctgaaaggcagttgcccctggctgctcgagttttgttgaccttggcatggctcaacaaaagtatgacaggccaggagagagagcctcctagattaaggagagggagaagaaagaaggtaaagtatgagtttctaccaaaaggatacgttctgttcaatgaaaagacagtgagagagaacgtggagggacagtgattgaaggagcgatgagggcaagaacgtacgggaagctcggttagctatcataaagatgtatacggcaaatggttacaggctttacattgaacgcccgaaggtctagacattctatatacagattaaaaagcggggaggaaacgagaaaatacacgtcgagaacacgtcatggttacagcataattacaatcgataaacctttgtttcttctgcgcttatttcagtcttgtgaaaacaacggtctttttcttttccagtccttgagtatgcaaaatccattgacggagacacttttttgaacaacatatgataaataaattgactagatgatacatatatgtgattcagcactagttgtgaggggagaattaaccaaacagtcataaacaggttccttttcacggaaacagtccgtccagattactatcgttatccataaagtcgttgattccaaagttggaaaggtagcctgggggaacacgagaacaacaaccattgttcagaactcgttcacatacagagcagaagacaactgaacaccgaaccggtaccgaggagagaactccagccttgacaagatgagctggtctccatccgtctatttggattggcattctggtttgatgctgagaggtcgaatggaatatgactttgttcaaaggacaaggggcattattagttcaaacatacaactaaaggatgtatcaacagtcaaatcggaacaaactcgactaacggaggctcatagtcttctggtagatacgactcctcccgaatctctggtttcatgactatttgtaaatacaacaagaaatgaataaatgaccagcacaaactcttattcatattcaaagtagaagaaaggaaagccaagttaaagagctgttcactcacgtcctatccagctggccacaaaagcctcatcatctgacttgggtaaccctcccgccagtcgcattggaggtatcgtaactatggttcataacataaagaaattcaaccacctaattctgttcaaacttgcaaagaaaagagactgaacctacgatctggattacgagcgtaacgacttggagcaacaccatccgatgtcgatgccgagtttgttagcgaatgtctatgcttctcttggtcatctttatccttgatagatccctcctttttccaaggatcttttatacaagcctcgatgttgcacagaatccggtagcacctcctagccgtctttatcacagcgttcggaggaaacacttcctgtcgtccgtttgtgttgaatccatctgaagaacgccagccaagctcttgaaggcaggtaaatacctgctgagcactcttgtacgatctatcactggatgccttgtcaggctcgatgccatgggagtattccacaatacgttctgataccctcaaggtagagaaaattgtataagcaaagaaggcacttgcatataaatgtatacacaaagaatgaacatagtactcacgtgcaaggacgatgagagcactgctgtacagatatccaacgttgagccaccagaagccgagtagctgggtcttccagttcgcagagatcaggtcaatcaactttatggcagaatcagcgcacacagccgcactatcaatcaagacgcaggataagagacatccatagttagtttagaatatgtcagaacggcatgtaaccatgatccgaacgaacctttttcgagccatcaggaacttaagagatgctggtacagggtacgatccttcaggtgtcgtgcaaaagtaaaacaagaaggggcgatagacgagaatctgaacgttaagatatctagaaggttgaaaataagaggagaaggtcagctagatcagttcgagcactttcagtgtgtaatcgaaaaggactaaccggcaggtcaggatgagcttctgcttttggtaaatcgcatcgaatggacacttgtctttgtccttgagaccttcaggaaggctctctcgccactttaacagttcctcctctaaatctaggacttgacttgtatccggaaaaaacggagggtgctccagattatacaacctgttcgcatcagtttccccaccagtttgtcaatgccgtcagttcgacgtcaaaacaccgatttctctatgcagtcacagatgaagacaatgtaagattgctgctttacctggtcaaaattttgttcttgaccgagaacagcttgatagtttcgaagaaaaactgtgtttttggaatttctaggcgatcaccctctggtggaacgagcatcgcatcatcatccaaaagatcaggagtcatcaaggaatcaaagtcgaccgcgctcgaagatgttggtcggtagagcatcaccgatcttattatatattcagaagatggaaaccaaatcacaaccatgatgacaatcaagagccattcccttttcaaagaggaatagatcgtcaaagttaatgacttacgaggtagcctccatttgaatctattgataattcgacgcatgagaattcacaccatagagaagagagcgggccagacgaacatgctcgtaacattaacacaggagtgaacatatttgaggtaaaacaatacttacacaacccgcccaaacccgttgacggatgcaccgttccatggtatcaaatgtcttattcactgctggatcattcagttggagtcctctagccatcaacaaggctagccctgaggcattggctgcaagatttctgtaaatgcgagcggataggaggtaagcaagagggacgtttgatcagttgatatgatcgaatatattgatattatggctgggcatgtttacccttttgagcaactacagtagtgattattgaataaagacaatatcaaataagcttctcgccagacagtattgaccagaatgtcgacattcagcaaacctttgagagtggaaacacagcaagaggagatacgtgatgacttccacattactcatcaataatacttttctccaaaatagaaagtgaacgaaagctattcagtcttttgaaccactgccatatcatataatgggtaccaaaaaagaggcgaaacaggaaaaattaacgaaccatgcgtagtactcatcagtgcctgactgttattgaagcaaactccagctctctccatatcacccgctcttgatcgaatagcacaggtcaagcaaaatatcaggttcaagctagccaaataaatgtgatctgcagctgtgctggcctcccgaagaggctgccttcgaagagtactatattttgaccggaatgttcggaagtggatgataggaaagagccaatgaactgaacagcgtaaaagtaagattaaatggcctggtaattgaatatagataagagttttcaaggcttactatgttcttcgtaaaagtctaacaagtcatcagctagtgctggctccggaagttcaaactgcagaaccgagggacataaaatgacagagaaccaacaagagatcgaaactgatgtaagctggactaaacgaaaaaaaggagggaaagatcaaaattattgagcagtggagaaatgacaaaccatttcatcataagccgggctcggggtttgcgctgcatttcagaagccggcattatatatcagtaatcagaggactattgatgaatctaatgtaatgtgctgtatgttgggttaagagagtcttgaattgaaaacacttgccctgggtcagaaatccatccgatggtctccctcgaattggttgccgagtaggctttgctctctgtccagtcaaccttgcagcagcagattctacaatctctgtggtatgcccgtcatctgccataaacaagagaaagaaaaaaagttgagcctcatcaccttatgatatgtgtcttctaactcctagtacgaacgcatacgcattgtaggagcaactcacttccagctctctcccatcgaagtctaggagggtgcaacgaaatcatctttctgatgcctgtttcactgcctgtgcccactttcccactctcagtctgattctcgtcctcactttcttcttccgtgtagtctgaggcttcttctacatcgaagatcacaggatgcccaggctcgtccaccacattgttcggattaggctggaagtcattcggatcaggttttattgttgattgagagtagctatgatagaacggggacgggtgcccaaagttgtatcggtgactactagaattgtcagagcgccgaaagggatccgaaggaacgtttgaggatgagttgtatattgaattattcgagggttgtatattcgaatgatatcgattttgtgattcatgctgctgctgctgttgctgttgtttctgttcataactctgaggcagatgtaattgactatttattccgaaggaactgtcattggaagactttctttgatctgtttcaaaggatgatcgagcacggtcaggctggtaggaagacatatcgggctggtcgtggattcctattccaaaactcgactgatctctttgttcgaagggatttattgactgtaatgatgctcctgtaggataagaggacggatggtatgcagccgaggctgaggggtgcattggagctgtcgatgaggatgatatccccgagcttggagtaccaatgctagagattcctgatagctgagcggcttgttgaggttcgtttgttgcctgagctagctgccgttctagttcttcgacatatcttatttccgagggacagcagatcgaggtcagcaaaagaacaaatgacgaagcacgaatgcttgatatcacatacttgactgttactcttctcgtgggaggaggctacaagatttccaaagtgtacacaatcaatcagtcataccgaaaacgagtaaactgcttgatggtcaacgctactcacatagaaacatgtttcgtcatgttgcagacagattgcacatctcggcttgccatcacacttcgctctcctctgtctacagcccacacaagctctctcgacccgttttctcttctgtttgcccacaggaccatccggtacaattgccgctgtcagtacagaagagtctgtcgtctgaacaggacctgtgttctcggtagacatatctggcgccgcaattggtcgaggtgaaggtatgacatttggtgttgctatggtcactaccgatggtgacgcagacaaagaatccgttcgctctgtctgctctgacatggaagatctgttttttcttcgaaagctagaggttggggaatcaaaagggacagaaaaaggaaatagaaagatagaagacaaacttcaagcgactagatgaatgagactttcgtcactacgatcaaatgcttatgtaattcccctttggtctagcggcttttttctcaagagatattccagacatacagctcttggttcaatgcaatataggatgatagacaaggttccacagaagttcacaacataatcaagttgaaatgtgagaaacaaatagagtaaaaacaaggataaatgtcatagatagaataaagagaaggacaaactcccatgatgcaactgacgaaagatcaacaaaggggataaaagaaaaatccagaggaaggtatagaagtagatgcaagagaagcagagaacagaaaatccatgttagacccaatctttcttctcgctagcactcatctaaccaggaattctacaacaattgcaagaagacagaagtgttagcagtcacactatcgtgatcaggagaaaaaacggagtagaaggcgttgatattacttactcccggccgaggagcgtcgtctgtcatctatatggcaaagttatggcaaatcagatacaaacgagaaacctaacgatcaaagggatgagttggttgagagagcataatcttacctgttcccaggtggtgatgttcggattagcgtatccttctggatataatgcaatatattctataatatgacagagcatataagaatttaaatcgctcgtcagtcttttagtgttcggatggagcgggattggagagacaaccgacctgccgtaggaaaatcgtctggatcacaacctgtcaaacacgaatagaagccaggcccgttgaatatcagtgtatgcaggagggtaggggcaactaatcgagcacataccgatgtttttcaagctcgggtcttgatacactcggatgtagtctacatactgtacacgaaaaagttgtactcttgctgtgagtaacggatcgagaaaccatcaagagcacaaacggctggcagcagcgacatgggactaaccatgtgaacaggccatagatcttccagcccatcataatcaatcgctccgaaggcagtcgatagcgctatcaccccagtcgccgacgtcaatatacttaatatcagttataagactcgataatatgcaccaacgatttatcgtatttcatgagaatgtatgggaatactaacccaagtttataatgatatacatcggttcttgcggcactggtcggtctgatacttccaatacagaatttgccgccatccctccttcttgatactgccaggaaggcgtgtcatcactaaaccaggtgatgtacctatcatgtttcaaatgaagtgatatatgcgcgtggattagtcaaccacccacatgaaagggaaagtttaagactaagagaagagaaggatgtaaaataacgcacccgtcactgccaggcaagtattcgaatgcataaaccgaataacaatcgtcgccatcggttaaaggatgttcatagcagttttgatttgtgtacgctactcaacccgaatgaggaaaacaacataatgtcagatacgattcttgtatccctatggtagtttcgggtacgtttaatcagactcactgagacaggatgtagattgctttggtagattggcaaaacaattcattatcagtaagaactgtacaccctcctcctgtcaaacacgaataagatgtgtaataaaaagaagtacaaacttgttcttgacctccctatgaagtcaaaatgacaaaaaggataccatgttaggacaagctatgttgctaccgtaaaagaaaacgtatcgacaatgaaagactgactgaataagagtttaacgctgtgattgatgtgttatatat

SEQ ID NO: 1024 - DNA, 356 bp, Xanthophyllomyces dendrorhous
gattgatgtgttatatatatccatattcgtctcgttcaaccactgacatcagaaagaaatcgaaggagtcaatccccacacattgggaaaacagacactgcgaacagaattaagagacgtacaaggtaataagggttgaacggcgcgaactgggtagcaaagaagaagaaataaaggtgcgtgaacatagaagaccatctatggtaggaagcagctgttcagacatacttggcacgactgagaaacttgtccttctaacactaattattcgattcaggtagtcaccaaagtaaattcaagctcgttagtcagattgccagctgcaagtctgaagatttagatgatcaggtataaaa

SEQ ID NO: 1025 - DNA, 7762 bp, Xanthophyllomyces dendrorhous
tcaccaacaagtattatcaacctgagccaaagaagaaaaaaatgaatgtattcagtcgatcattcccttcgttgcggcatacagactcagcgagaacagtacctgagcttcaaacaaatcaatctctggggcggatcgtcctacccatgtcccgtctgagtgcttcggtcccgggtgagctacattgtcaagaaggagcagattaagtacacatcatatcaaaccgacagacagtttttatggggaacgataaaactatgaatgtatacgtacttgtatcattcgcgcatgtgcacctcgacagccgttggccaggcaagtaagagaccggggtgccccctttgtcgagtaaacaaagaaaggtggcaaggaagaacgcataagtatggctgtatgatcgaggcggaaaccccaaaaacgatgcagaagagacttacattcctagtaaaatccagaaagaaggagaaagagttgtgcacgttacaaacaggtctgtaaatttcatactgtaaaaagtaaaccaaaaaagcctaatcaaacgaacgttaagattggaagccccttccggaacaccatttttggactggttcgccacagctacgaaggaagaaagggcaggcatgactatccatcagattcgaacttcgtttgctatgttctcatgtatagagagacttacttccgacatcgcatgaatcgtacgagtaaggccatagaccatccaacgttcctccatacccgactctgcccaagttccctagtgtccatacggcaggccatactacgagcagacattccattcgggcatgaatttcaaaacgataagcgcgttctacacatacatgtagacaaacggctgagaatacacatacatccatatacatctggtcgacccggaagcttgacagaagcttccagacgtccgccagtgaagcagaacttgttccaagaactaatctctgctccttgataataaaggtcgtgttgagtgatgtttgatagtgtgaggacgagcgagccattggctgtagtgactgcctctggagaataccactccagatcgctttagaagggaagattgtcccaaggagaggaggaacgacaaaatcagtctcctgttcttctcttcctcttttttctgccaatctattgaatctcagctttacgaactcagtggcccaggcatgtaaatcgttagcctcccagtaagggtcatctccggaatagaaggatcttccgtcgacgttaaactcgtcagaaaatacgagctcccactctacacccgtgttggaggtcattgtgtatgctgattcgggtgtgtcatcgtcaatcaatccgagacctgtttgttggcggtgattattgagacagaaacaaacggtcaatataagaacgatatgggtagattggtgaccgagatcaaacttaccagatatagtggctggcacttgacctgtaaagcaaagcgagaaggactaagtaagcaatattgtgaaagttgtgaatagtagaaacgagaaccgaccggatccattaacaccacccagactgcgagacaacaaagaataaacatcaagcttccttatgaaaatgtgttcagaaggtgtgtaaagagaagtatagaggaccgtacttaaaagcgccgcctgtggatggctctaagcttcggacgtaagtgatgatcggatatcccccactagaaaatgcatttgatgaattagttgaccatcccgcgtcagacgaatccattaactcaaaacatggaaaagacagcttacaagagcacaagaagcgctccctatggcaggttcagaagacaaagagcaaacacttgatcaactctgagaatcctttagagtatgtggcagtttttaaataagaagaaatccatacccctaggacaaacagacagccgaggttcatgaatgctctgacagagaacaatcccatacactagtagcgtgagaaagaaaacttagaagcaatgagtattctgctacggcacgattatcattattgaacatactaatgaatcatcatcatctggacttgggttatgaaggtagtcatctgcttccggttcccaatcttctggcccgtaactgatctaaaaaaaggcgtccagagaagaggaataagccagtgttctgaacgtatgaaccggaggacgagttgtatgactaaccttctccattctcaaggcgctgcctgcttcgagtgaactgctgtttcgttgatctaagatgttgtattggaattcggagaatgatgtagaggacgattctctggaaccgtcttcaggaagcaggccttgataggcctgcggagaagatgataagtacggtctggaacgcatctagtcaagttgaatatgacggcaatggcggcggcagtgatagaggaagacgaggagttgatagtgttgctggtgttgctggtgttgctgttgttggtgttggtgttggtgcaagtagtggtagtggtggttgctaaattgctttcaaaatctaagcaagagaagaagaaaaaaatagagaaaagagaacgggaggaaggtgatcggagagtaagcacacaatgtttgtgcagcaggctagatgtgacttgctaaagtaggacagatgaaaaccagtgctcgccctcttctctggcggcacagttaaggaaaggccgctaagtcccggctagaacataccaactatcaaccaacgatgacatcagctgaagcaaggcaatcagttgaatattcaggcgcgcaatcgttcgtatagtattgaaccaaggtgaaatctggtataaaaccgaagcaggctagtatgagtgtgtatgagtgtgagtgttgagaaggtgtagttgtttgccagaagagaaggagtctcaacgaaagaaatgatgatttaaaaaaatagaaaaaagaagaaacgagaccgataagcagtgtcaacgagaggaacttatcccacaacagctcctcgcccacggggtaagcactaacacactcgcagtcaacttgtttagaaattttgccggtcagttagcgaaaataacgagaaaagaaggtcaagatctatctttgtcaagtctctacgggccagatggagggaggaggtcgaataaaaaaaataaaaataaaaaggttgaggcggctagtcgtgccgcaagaggacaaggtccagaaaactcggagcgcagtcgatctttccaagtgtcctcatatccagtcggtcgggagatttacttatatgtccccactatacactctagctctatcaatgttctctcttgctaatatactcacgcccgcaagcatacccgtacgcattcgctacgggctggactctatgcagatacagtggaaatatctttagtcggacttagaatccgggaagtcagaagcacggcgatctatgtcgaaaaattggacggacatttgaccggcgaaatcgaaacgacgcgacgcgacgttcatttaataatgtcacgtcatgcgacatcgcatgcgtcacgcgtctgtcacacgacgcgtcttcttatatagtgtctctcccatttccatctcctttcgccacaaaccaacaatctttctctacttcatccatccgattccatccattcgtcaaactacatccaatatgtctgactccactactgctactaatatcgttcctgaagatacctcttcatctgtccagacgaaacggcccctttcctcttcgaccaaggacacggtctccaccacttctgcgactgcctccgaagagactatcgccccctccgaagattcattaacagaacctccttccaagaagactaaggtcgatgccgaaatgaataatgagaacagcaaaaaagttgatcctgctggccttccggcggatcatttgaatcaccaggtgaggttttttcctatagcatatacgcgtatctctctgacctgtcgtttgcatcaatgtacccatctggcattgacaggaaaactgggctacaggtgagttgcctacgaatatttctcttggtttctcgatataaatttcttcgagctcttattaatgtcagcaaactgtgtataactataaaccaattgaacaggcgaagacccagcaactggaccccaattgggtttcatcgacgctctcacttccaaagctggcttggttccattgtcagccgaagagaaagcagagttgggaaagagcgcggcgagtgtgatgatcgatgatctgaagcatggcaagacaggaaatttgaaggctgcttcttctgatggcgagtgtgacaggcctgctgttgcagagaagaagacagtcgaggagacgaaggaatccagagagacgccctcgaccaaagacgagactccttcgaataaaacggaccaaaagccggaaccagagacaacaaagccagaggcagagtcagaggcaaagccaactaagacggacgaaccagctcacaaactggagaacacgacggctgccgaacccgcgccgagtgatgttgatccagactctcatctcgctcatccagagtcttgggctaccggttcgtctttctctatattttctcttctccttctcgtctgtccttttctttgcgcatcgctaatctacttcacgatttttgcaatcgaaacatcccatgaaacgattgttctctttcttcaataaggcgaagatccagcgacagctaaacagctaggctacatagctgtgctcgccgagcaaaaaggtgtggaactgacggaggaagagaagaccaagatgggaaagagtgaggctagtgagaagattgacgagttgagacaccagtgatgctctttccactcttactttcgttctttctttatctgccgttcaccattcgttttttccttattgattcatctcaagaagagtaaagtcaaccaatccaaatactatcctacatttcccccattcttatttctgtgtttttgtctttctctctcgttttgtttatttccccaaggcttatattgtcggaacaagaaccttacatgtacaagtgtatctgtctcttctgtactgtttctgtacttggtataaaacgatcacactacatcttatactccgtaatatgtatactgtatgggtattatgctcgtgatctttgggttttcgatcttcagtttgaggaatcgatcagcctgtcaggcatcgccctacgaaaccagacaaaccagaatcagggaacagctgggtacaggctggacgctgagatgtatatgggaacctcaacaacagctttaaagagactattcaagaccaaaatgagctgaattgtttgtttgttggttgcttgcttactcgcttacatttctcgtcccaagggagatttttaggtgttgaaccatatatatatatgaaaaacgcttgcaaagcaggaccagaccgagggatgagggaacgcaatctaaaaacacaatacaagcatcgaaaaggaagagagggagggggcgacgtgaagaagtggggaaacatggtatgaggagggaaatgcagaatgagaagaggaaaaggattaaaaaaatctaaaggacacatatgatcgacaaggcgagagataaaagaacactaatgcgaggatgagctcgcttttctaaacgggttcccacttgggaaccacacaaaaagggagtgtagagagaattataccgaatgagaccccaaaaggaaaggaaactagaaaacagagagccgaccaagacggactttgatcatgaagaggagaccggaaagaacagaaagagaaaagagaaagaagcttagaacttaagctctcggggctgctcccaagtgaactcgagtcggccgaagtgtccaccagaggcagtagctcggtagatgggcttctggaggtcgagctccttaacaatgactccgggcttgaggttgaagttgtttcggatgacctcgacaagctcctcgtcagtcttgctggaggttccgtaagagtcaacaaagatggacaacggctcggcgacaccgatagcgtaggagagctggacgagcactcgtcgagcgaggccggcgttgaccaaagacttggcgatccatcgggcagtgtaggcagcagatcgatcgaccttggaccaatcttttccagagaaagctcctcctccgtgggcaccccatcctccgtaggtgtcaacgatgatctttcgaccagtcacaccggcatctccctgaggacctccaatgacgaatcgaccggagggctggatgtggtagacagtcttgtcgtccaacatgttggcagggatgacggacttgacgatcttctcgataagctcggttcggaggtcctcggtggtgatctcctcagcgtgctgggtggagatgacaatggtgtcaactcggacggggatggtagctccaccctccttcttgtactcgacggtgacctgggtcttggagtcaggtcgaagccatccaagggatccgtctcgtcgggcagccgacatagcagagttgagcttgtgagcgagggtgaccgagagaggcatgagctcaggggtctcgtcagtggcgtatccgaacatgattccctggtctctggaagacggagaatcaagagaaaagataagtatttgtacaaagaaacaagttgaaaaagaacaagcgaacgaacccggctccgtggttctcgaggtttccgtggtcgagaccctgggcgatatcaggggactgctgctcgatggcgacgaggacgttgcaagtcttgtagtcgaatcccttgtcagagtgatcgtaaccaatgtgcttgatggcttctcgaacgacggcctggtagtcgatctgagccttggtggtgatctctccgaagaccatgatcatactgttaagaaaaggtatcgaagaaaatcagtaaagcggggaaagaaagaggagatggccgaagaacgaacccagtcttggcggcggtctcaacggcgaccttggaccagggatcctgggcgaggcaggcatcgagctgtgtagagaagagaaaatatcagtaagattcatgataaaggcggaacttggaaagccattgagacaaaggatcgaaaaaaagactaacgatagcatcggaaacctgatcacaaatcttgtcagggtgaccctctccgacggcctcagaggtgaaaaggaagctaaaggacaaggaatcaacgagtaagaatcatggaccacggatgtgtgcggttgacaaagaggctcaaagaatcctttgcggttcagcccacatgcaggcgagaaggctcgaattttctttcggtattcccgtatctcttctccttatcctatgagatcgaacagaagagataaatcgataaaaacacatagaacttactgtccgacgggaagagcggatcgggaaggaccagaagacatttttgacagagaaagtacgaaggagaagagaagaagtgtggaagaagagaaaagaggatgatgtgggtggaagttagaagggaaagaacggaaaagagaagaaaaaaaaaatctcggacgatggcggcaagcaggtgcgatttttttttttgaatttctttcgtcctgatggcgtctttttttattttggttcttatttatattttatttaatattttctttcttccaccccagctagagacggccggtcggacatgtccacgtacttatcttgtcttacgtaactcacgtgtgctctggcagcgtggcgtccccttttttttctttttttttctttttttttcctttttccttttttttttttctttttt

SEQ ID NO: 1026 - DNA, 14669 bp, Xanthophyllomyces dendrorhous
ttttttttttcttttttcttttttcttttttcttccttgctccttctcccgcagtgcccatcgggtgacagagcgtgttccttttttctatactttgtctcttcaagtgacttctccatagtctttctcttgtttctattgtcttgtgtgaaatccccttacatatttctcgcatcttgaaaggctactacttaggtaattaacgtcacgtgattaactagccacatctgtcagggatgtgacctgtgtcaggaatacgggttaagtatcacgtgttctcttacgtgggttacccctacaggctattcgttccctccatcccttatgcctcttcgcccattttccatcatgctctagtttgcatggttcatgcttcatctttttagttctcgtgatctcgagcctctctaggctcgtcatatgtatatctttagtggcagaccaaatgagcgagggcgtccccgttttatatcaggacccctcgcgcatttggataagagttttcctcaagctgagattcttgttgaaacctcttatccaaagtatattgttaatagtttggtctgcttcagatatattaatcgccagagcctaagtgtcaccccgcgaaccaagtgattacacttggttaccttcttaacaaccgagccttacatcagggatgtgacctgagtgttacacctcagtaatcttcttttggttctgttgtttctcctgcctcggtattccttatgctctctcattacatcaacatgcaggtatatgaccttccagcgcaggtgcttctagcaccttctatgacctgttctcttatgcataatcgttggagtctaaggatgatatataagacgggtccccctttgccacccatagcatagtctaccaagtctgaatcctttgtcattccttggttccctagtactcttgttccattgttgtatcaaccttattcatacgatttccctgccttgcgctctcgtcacagtcaccaagctagagagcctgaacttccttcttgccagccctattccctgcctggttacattcttgtaaacttcccgctaccctctgaacccggaccctgacaacatcataccctacagcccgtacactcactcatccttctgccagtggctcatcagatccttctaggcatgcgctctttggagcctgtgcacgtctcgtcttctctctttccttcgttcatagcagactgtactctgtgctgttcagactcttcgttcctaaccgtttctcatctggcctctctctatcttgatccctatctagggttgtttctctgttacgtatcactcaacccattcgctccttcaccccttcgttctcaggcactcgacgtctcgctctttctctcttgcccgggccttgtcgtcaacgatttatgacggcccaagactaagttgacgctcgttccgtgttggatgattgcatgcatgcagatatcagacaatattcttctgtctctctccctctttctctccactccccttctatcccgctcactcgctctctcatatgaacaaaagatccatccatccattcctacgcgacaatacatccggcacaaaaaaaagaaacaagagaggggaagtaaacgaaagggaacagaaggtcaaaaaaggacattcggtttatttgtgaattgtgtgttgttgtgtgctgttgatgtctttttttacttcttgacctcctgagcctctccagggccggaatagtatcggcctcggtgttgggttccgtaaagctcctgcttggtgggaatacctatagtgttgcgaatgtgaccgtttgttttgatgacaagcccaaaaggaagaggcgcagagatgagaagggagaggatggataaatccaaccgtttggtcagtgttaggctcttcttctacttctgttcttaaattctctcttctccctacactcttgccttgccaccttatctcctccttaccgcaagcacaaaaaaggatactaaccgagctcctccatcaaaggtgccagctccttcaagtaaagctcaaactgagcgggcctctcaactttctgcctcaaaccctcgagagctcgaacggcagtagcgaaatcgttgcaccttctggcggctcggagggcggcctccatgacctcgacagtgggaacaagatcgtacgcaaagcagttgttcaatcctcgctgttcagccagtcaaaaagatttcatggccagttatgcaagtttaacagtgtaaatttgggtaggtgtaggtgtaggggtatgtgttttatttgtttatttcgaaaaagaacattcgtcagctcatcgtcgttcaatacctctccgataatcagaggttttttcaacctctctctctccagccttcactttgatctcagaagataatgaagatagaagtaaggaagaaccgacctgaacctcgaaaagatcaggagcctgctcgaagaagctctggtatcggtcattgaagtcatcgtaactctcagcctcatgggaagcgaatcgaagacctagatccgtgtttcgtcatccagaattagaaacagatgaaagttgattgatgcgatcagattgaaaacaattcgaccaataggtccgggagagagggacaagcatgaagggtgaaagaagaaaagaaaagaaagacacgtaattggtgagtaaaaggcatcagtgactaaaagcggaaaaattgtgatgcgagacaaaaccaagtctcatagggagcaaatagagagctagtggacgagctgaacctcatccattctcagtgaaagggggagaagaaaaaagaaaggaagagaccctcagaagaggagataggtggaaacaaagatataaacaaagcaaagaaaagaaaagaaaaaagagcagatagcaggagagagaagggagaggaaaaaaaatgggtatgaagaaaactagacataccgagagttcggggaagggcagcggccacaggagcgggtcgagcagcagcgagcaagactcgagcagaggtggaagccggtcgggtgaaagatcgaagcatcttgaagatttattggactgacaacagaaaggagggaaggtgggatcaagaggttagaggagcgaagggagaagagaaagaagaaagaggaagaaggcggattcagacacggctcgattggctccccatatttgcccatatctctgggctttttttctcctcttattttcgcttaccactcgcgtttaaaacacttcacaaaccgtgtctggaaaagcatgacatcttgttatccggaaaatgaacagaatatacgggattaaattttgaaatgtatactcgaacgatctgatacagatcagacgaaagaagagaaccaagcaacataaaacacagaggaagggaacagcaagttcacaataggaaaggaagataggaaaaagataattccatccatcaagatcaagccatctcgacatcctcatctttatccccgtcctgcctcaactctccctcttccagctctccatcctccatcccgttcaagttgtcatcgacattggcactcactcccgtgctcacactcgcatctgcgcctattatactcgtcttcgcactctcttcaacaccagtcatcgtctcatccaacgtcggcacgcgctcaggcagaatagggtttgatccgtctccgttcgatacaacagaactctcagggaatactacaggttctggttcgaccctgggctcgctttcactctgagcttcaggtttaggctccggctcagccacagactcagctgtgattggctgaatgggaatcgcaacaggtgcagaagcggtaacagcggtagcagagggagtagaaaggggatgctcaacgccgatactagcagggacggccgcagaaggctcgtgctgactttcagcagctggcgggtctgcagactcctctgtgatggaggtcgtgataggcgcaggtttcgaggtaggtacttgatcgggaatgaaagcgggggtaggagctagagcagaaacggcagcaggggtatcgatagcgatggaggtcgtagtagtagttggactaagtacagggttaacattctctacaacaggagtaggtaatggctctgtcggatcctgtggcaacgtctctgcagaagacatcggttcatccggtttagttgtagtcgagattagctccgccggttccaataccgggagagggattaccgaggatgtataagagggaatgtccggttgggcagaattgagatcaccgacatcattgatgccgttgatgctgctagtgttgttgatagtatcgatggtgtcatgtgtggtagagtgaattttaggagagggaatcgatcgaggaggggacgctgtcgcccgggatttgccctttgcgtcgtacaatccattcatgatagacacaggaccgtttgatcggtgtgatcgacgatcgcgacgaggagcaccagtaggagcagactcatcctctctattttcgtgcgaattgtcggacattttgcgcaaaaaaagcaaagacaggaaatcagtagtcgattttgcagatatttaaacctgcatgagggcgttgcaaagacacacgaaaagatagaaaggaaataaagacgaacgaatcggaaagttcagtctctggagctatacgctgatccatcaatctacctatatataccagacgccgagcaaatagaaacagatagccaatcccaccctctcacattagacagagtctctaggaatagtcgaaagaaggacaaagagacatacggattttccgatcattaggatcttcttcgtcctcgaattcagcatcgtccatttcatcatgaggcatcaccggtgtttctgttggcgaaaagagattcgaatacatatacatagcttaacatccgaccggacacagacaaacagatcggatcagagactcacgatgtatctgtacactaggcgaggctgacttgtcccgcatctgatcgaatatcgaagactttagcttctgcaaatattctggtgtgttaagatcctgaagaacaaaggaaagataatctatcaatacatgtgataggcagaccaagggaacgaaagagggacaaacatccatattcgatgattgaacgtccagctcatagtctggtccaaagtatgaaaagtattcgtttatagggagttctggaaggagaatgcaacagcagaagagaaccagatatgataagtgatttgatgtgcgatatatacgttgaaaagagaagagattcttactatgtcctagttcaacgcctgcggctagtccagtctcgtaacaccatgctcttgccacgtttctcactatcaaaagaacgagataaggacgtcacatccgtcaggctacatcattaagacagactgacataaatcatgaagaaaaaagtgtccaagcatacttgtatatccaccaccacccaacaaaagcaacggaagtccaaagctcttgacaaatttaacacactctgcatggcctttcatacttaaattgaatccaccaagcttgtctccagagagtgaatcactcccgcactgaaggacgattgcgcagggctgataccattcgacaactcgttggatgactggttgaaagatagacgcgtatgaggcatcgttgattccatcgtgcagaggaacattaacagaataactgaaaccgtagaagtttcatcaggaccaccgttctctggtaagtttaaagtaacttcgttgaagctgaaagcaaagaaagaagaacgacgaacccctttcctccgccaattccacggtctctgactccaccagtaccggggaaaaactctccgtacttatgcagcgataccgtcatcacccggtctgtggtatagaatgcctcttcgactccgtctccatgatgtacatcgatatcaatatagagcactcgtttgtgatatcttaaaagttccaaaattcccaaaacaatatctgagaaacaaaacgcaggagttcaagtgaacagtgtgcgtcagaacagatgatgtgatcaacgagagaacaatagaagcaatttaatttaacaaaccattgatgtaacagaatccagaagcttctgccttctttgcgtgatgaagacctcccgcccagttgatagcgatgtcgcacttgtctcttgacagacgagccgctccctctgtttgtaaaaacaagacaagacgagagaaacatcgattaaagcgccctgtgtgagagggaaggaaagagaggacgagaagaggacaaacccattgagccgccagcagaaattgagcagtattcgaacagaccatcaaacaccggacaatcgtctcctacattatctattcggtgagtaaatgattccaacacgcaatcatttcaaagatgtcagtaaaaactagatcgatgatctgtgcttgagaaaaaaacgcggtttgatgataaatataatatacgcacatttgacctgctctttcgcaaacaagttcatgttctcgggggtaatcctcgcaagaaaatcgacatagtcatctgtatgaaattgagacatctctcgctttgttgccggtttagctcgctgagggtttagaagatgaggatgcgtgaaaacaaagcaaattgagatcagtttcacgttacatcagaacagagcactgacgcgaggagacttacaaagatctccatcttgttgtacagccttgaaacccacatccaaacgttcaagaagagagcatccatgtttaattgtacataaacttaaacaactgaagcggtgttttgacgtgtgggaacaagcaaagatagttgatgcggttgtagaagcttggcttacccatagttcatcaccaggctatggcacattcgtatcctggtaggcttcatcggatggcccggtccatactgatcacgtaggatagcgcgaatagaagacacgcgttttcagcaataaacttgaatagcccatgagaagataacatagaggatgaaacagataatgtagatgtacatgatagttcccgatgtccgaatctatgtgcaagaaaggtatagtacgtttcagcctttatggatgcatataaaacctggactctgtgaagctctcgctcaagccatcactatagtatcagaagcagaattaagaactgaataatacgaatacgtaccgaagaagtaacactgtaattgtatattggtgatgtatacgatcgtcaatatccactgagcaacataacagagatcatcttcaaagaggttcgcctgccctttgaatggaggcagggaagactatactggtgagacatatgaagaataaaaacattctactgaccactcgttttttggactctcctggagctggtgtgagagacatagccgagatgataaatagcgatatagaaagaagaataaagagagtacaatatgaacggagagaaggcagaaggagaaaagagaagaggagagctgggtaagaggagggggcggagcgaagctgtatctcagtcacgtgaagcttgatttcacgtgatttataaacgccacatcagcatataaatttcgctatatttcctttctctccaatcttccttccgacaatgatcaaccattcttcttcttctcctcgctaacgtcgcctttgctaggtaagtctggagtattgctcttttgtatttgtctccctctcctccctcccacagatgaaccaaattttagaatcgctactcctataggcttcggcttaaaagacgacttgggttttcacccaccctttctgaggaattctttcatgattacctgcctttcaacctgctcgtgttcttatacactcgtggctaaccgtttggcttcttgtatcgcgttttcaggagaataattttgttctagcttctttgagcttggtgaggtcagtataggtccattcagcctttttgtccgttcttcaatccccccttcctattccacacataacaagtgatgcaaaaaaactttacctcattcatacccacgggattgatgatttaaaaacttatctacattgcctgatgtttccttgattgttctacttccgtattcgtccttttcaagttgttccagttgactgactgttttttttttaattctttgttttttcgcagtcactattttatctaaattttgttccaaatctgtatcccatatgaaatgattaaagaaagaactagcatgttgatcagaagagactcagtttaagaaatagaggacaaatagtaaatagtgaaaaagtgcgccagcagagaagaatcgacgttcaagtcagaatccctcgccatcaccatctctgcttctatctctcgtccatcactaaccctacccgctcatggatcttcccactctctttgcccttcctgacccggtacaatcccaggccaaaacagtagaagacgtctctcagacatatacctcttgggacgatcttaatctagatcagctggaagctagcatcgcactccatgaacgctctgttaatcaacttgaaagcaaagtctgtctaaactcctttgatcctctttcgctatcggtgatgcctgcgagagaagccgagagtcttaactgattcatgcctcctcacatccagttaggggattctatggtcgaaacccctctgtatactcataaagcatccgatcagacgaacgcgcttctaaaacaagcacaacatatctcgctctctagacatgagctctccgatcttgtcgcctctcttcgagaacaggcggaagtctccgatccctcttccagtataacagataaaggacagacactattagaacagatagagggccttgttagagaggagagagaggcctgggttgcagtcgagtatcttggactggttgaaagggtgttgcgtttcaggtctgtcttccgtttctctcgtttgacttcgtgtttgcatctagcggatgaacaccatttctgaaggatgacatcctctgcttgccaactgatgaacaccgggttgtgatagagaaaatatccttgccccagtatctagtccgctgtccgttcttcctacctatcgaatgttcttagcgttttcacttcaacttcaggctgaacttccgcctcaggtctcattcgggaaacttgcggccgaggtggtcgctcagacgtggaccagactgaagcaaacattgtccgagtcagtcctatcttctttcggtcttgttatgtcttttcgaaaaattgaggattgaatatcaacttactttgttgtcaactgtgttggaaatgtgttccttttctactacactagaaacttgatcgaagcttctaaagcaatctcatggccattaaagctgacgagtcccccttcgttacctgcccaaacggcattcgaggaagcattcttgacgcttctctcttttcaacaacagtttgtccatctcctcgagggatcaattaagttttcttgaacgcgaaagactaatatttccttcacttcatctaccgttgatcgtgtagaggtcatcaaattcacggacgtctagagaaggccgaaccactttacccattcgaggcactcatagaacctatcagacagcgatggagatttcattttgagagcagccgaccgactaatcgtcttgataaggtatgtttttttctcttatacccctgttgactttcctatgaatgcctatactgaccttaacgttgaacacatggttgagataaaaacagccagaatgggcgtttacccatctgctgaatctgattcatgagttagaagaagaaattgtcgacattcttggcggtctccttcgaaaaggaggggtagatgagcccgatccacttgtgcgtaacaccctcgtcattcagatgcatcattttttgtgctcatctttcgtctatcaacggtctttttctttgtcttattcagtccctgttcataacacatcttcttccacttcccgaatccttcctcattgcccggatacctcaccttcttccgccatgtcatccatctctcttagcgcatacaatacatcaagccttggtatttgatgatcagatccggatgattggatacaatccagtagaacaggacagcaaggctggacgatcgaacgcgtggggtggactagctggagtcgtattaggtaggagagattggttcgatgcgtggttggaaggagaagaagaatgtgagtcttttgtattccacctctgatcactgaactagatgtgccaacgatcggatctgtttgttcaatttttgacctttctcgtttctgcagtttctcgaacagaatttcagagaatattacaatcctcaaatgcgttcaaatacctcgcgccttccgagattgagttggatgaagatgaggatgaggacgggaatggtggggtcattcggtcggacgatcaatggggcgctatttggagctcggtcgagttgacgaaacttatcggacagatcaccagtcagtatcttcttacagccttctgtaggaataaacacaagctgacagtcactgaacattattttgctcaaaccagatcgatattccccactgccgtctccgacacacaagctgaccttcctcttaacgatccagactccacttctgcacacttatctgaccactctctctggaattctagacgccgtcgataggcttacctcaacgttcgcgagagtcatccctggtgcattggcaggacatgctggcgcgtcaggtctgggtctgggtctggaagtagacggcttcaaaggaaaacgagggttagagaaggtcgtggaggttctgataggagccagatgggtcagaaaagtcttgcgcaagtggggtgatgaactagtgaggattcacgtcgacctttctttctttctttcttctttttcttcctctctgtattctcatgtatctgattaatttttttgttgttcagttctttgtcgatctactagcagagattgtggacgatccatacttaagatcaaaggcgaccgacttgataccgtctttatcgagttcgatcaacgtcgatgagcacacattgtttgatgaaccggtcaacaggtttgatgcgttgtttagtcgagcggaggatgtgatggttcgacatatctgtcttgaggtcgaaagtgaactgaaacctcatttgactcggtaaggcgttatctctctgtccattggtttatgttcatctgcgcgtgtgtaggttcttttggctaacagattcggtcctgttctgcggtctgtttctcttggaacaacgaaaccgatgatcttgtctagccgatgggatatctcctcgtcctctgcgacgacaacgaccgcctcggatgatcctctttcccttcccccgacccttatcggccctctccggatactatcgacccatctgacgtacctctcgacccgcctcccgccgacgactctttcctcgatatatcgtagagtggtttcccacctgacgacccacctgacgcaccgaacgatctttggcggttggtcgaaattcacttgtctaggcggaagagcgctcaggagagaactggatggttggatcgatacttctaaagcggcattaggtgggaaagttaaaagaccagaaggaccatggaggagattaacagatatcgctcgggtgttgagcataccttctgatgagggtaatgatgcagatgccgatgccgacgaagacgacggcttcgcagaggagatcacaggaaaggatggggaaaggatcacgctgagtgtggtgaaggatacactggctagagaatctgatgagggtcttagggacagactaggtttagtagagttggataagagggaggtcattgaggtcttgaggagacgaattgactggtcgatctgataaattaggatcattctgggcgagaaacccaatttatatgtgtaacggacttttcttcctgagaacgtgattgaacgcgagtcttcgtaaaggccattcaaacggaagcaggcgagcgtttcatgtaagattacagttgaacgactaaaaatcgacagagacctccatgagcaagattaaagacgaaggcctgaggatggggactaaaatgtaatgggacgaagaaaggaaggaggaaaagagatcaagaggatcaaagagattaggccaaggagattgagccacagatgatcaataatagatattagattacgaaaagcagaaaagaagcagagagcaaacggaagaagaaaaggagtaaagaacaaatttgagaggatctgaaggaattcattcatctaaacgagcgattgaatcaagaattaagcttgagaaaagacaaggtccttctcgtctccttatctccgtcatcttttgtttgtcttgtttgtttgcggaaagaaagaggggggacagagggaagattcacttcgagggatgtaagacaaattagcggggaagaaaggaaaggggggaaaagaaagaaggaaagtcgatttgagtctctgccatttatcgagtagcccaccagtctcttcgaagggctcggaaagagacaaagtaggggatgatggcgaagagcatgactccgaacgcgacccaggtcaagatgattccgtttccgaaaacgactcggataccaaggttcgtacccgatccagagccgacggtgacaccgttgacagttttgattttcgcccaaagagcagtccagatggcggcaccaacggccaaggcgagagcagagatcgtactgaggagtgcggcgaaagcctggaaccactgttgagggacgacaccgaacaggaacgtcaagaaagcaaggcaggatccaatctgttcatacgaccgatatcaaaaaaataaacaaagaaaaaaaagccgtcagtaatgtaagacttttctgatgatcgatatgaacccggaccgtacaaagatgatatagaaggcggcgatagaatatcgaccggtgtaaccaccatctgtgaaagtagaggaaggcacggcagaggagacactaaaaggcgcaaatacaagaggtagatggtcatcagcgtctgtgagtgtcaaagagaaaacacggacgatagaggaggcgaaagaagcgaacgaccacttacgcgctctgaagagaggagggaacgtcactcaggatagcctcgaagggcttgaacctcaatccaaagtgggagctgtttgcggttccgaacgtgccatcggtataaccagccgaattcaacaaaccccatcggtagctctgcctaagcccgccctcggatccaagttgtccgaggctggtggtgttggcgtaaagaccactgaccgaggtcgagggggaggcggcggagataccggtaccgaggccgttcacgtcgattttgatcatgctgagcactcggggaatggcagacgtgttgatctgaccgatgtgggcaaataccatgatactgttcagaaagaaatgtggaggatatgtagtgtgacgtcagacgaaagattcgataagggttttcatagagaggcaacaagcctagagggcaggacaaacatggacgcggccaatctacgaagagaagttcaagagaaacgttgagcaaagatgaacgctgttcgcacggtgtctttccgtttggaacgcaagcaagaagataaagcagggagaaagactaacgagaagaaagaaccagcggatatgcaaactgttcgtcgatggaaatgaatatatgtcaaaaccgaccgcatgaggcatggttagccttttatttgatcacgacgacaagtcgaagcgacatggttgaagtccatcctgatgacacctatcaacactttctcctttagcgctccaaaggtaaagattgatcgagagcaagaaacctgttgccctcaactgtcgggactgaaacaaggatggaaaggtaaacactgaccagcacctctcatgttgatgtaattaataaaagtaaaattaagaggagcgagaatataaggattagcgtgtgaagaagaaaaggtccgatcggagagaaggaaaaagggataacggtgttgacgaggttaacgaaggacggctgggatagagtgagcttaaggaagaaaaagagaggaaaaagaaggtgagagaggagagagagcaacaaggctttaaggttgtcttggcttcgggttggctggcttacgtaaggatgtttcacaagaaaattgaatcatgatgtcatcgaccagatggtcatattaaacgttgaagattagatcgacaggacgagaggattcacagacaaatagcatactggacgcgaccgatagatgatcaagagccagagagaagcaggaagacacatagaaatacaataaagaacaacaaagaacaggaaaggaaaaaaaagaaagaaaaaaaaaaggaaaaaaaaggaaaaaaagctcgatcgaacgcgtcccatcataccgtctctccagcatccttcagaacctatcaaccgcatccgggggagaaagagtccaaaggtcaacggcaatcatctcgccatcgttcttcgaacactttaaacgcatgatggaccactcacttgacgcgaccgagcctttgcctcttctgaagtcctagaagaggctgttcgtcacagatgttgaggagaggcgtacgaaagcgatcagtcgagagctgcaatcaattcacaagtaaagagagagagagagagag

SEQ ID NO: 1027 - DNA, 2632 bp, Xanthophyllomyces dendrorhous
agagagagagagagagagagagagagagcttaccgagcgtagctttatgtccggccagtacatgtacgagatgctctttctgtccctgagctgaaacctcggtcagatcgttcttatgctctatctagtgacaagaacagaggggaacaagtagagagtgagctttgctgaacttcttctagttaatgcataggaggatgatgaaggacaagacctggttcaacatctgttgggcgtgttcgtgagccaaatcagacgccttggactgagattagaaggtgggtggtacaaattcatggtcagtctgacaagccagttaacgaggcgcacttaatgataaaagctctcctcacgttgtgtaaagtggcctgcgatacaatgatgatttgttttgttttatttcatttcatttcagtttgatgttttgaaggaaaggcagggtcaagccaagatgttgaaatcagggtcaatcattccttcagatccctgcatcaagtcgattaaacgagaagaacaaaaagaaagagcgaaccttataccctgccgccacgcgaacaggatccttcacatgattactcttttgaggagatttgggagacaccggagacattgcctgttgtttatggatctgtttggcagagtggatggatcgaaggggaaatgatgggatcaacaaggattgacgaaaacggatcatcttaactagcgcgtttctctctttcgttcgttcttatttttgaaagagaccactttcgagcgatggacgatcagcaggttcttgtctttctcttctgtctatagtcttcgatagatcgacccgaagtggtacgtgtcatgaggtcaagcgcactttctttgatgaacaggaaagagctcaaagcaaggcgtcatctgcggaggattattcataggcatagtagcaaagaggacaggctgcatgagatgccgtgcgcatgagtacgattcacctggtttcgtgggaaggatgaaaatcaagcgttgtcgttggaagggtgaactgttgttagggttaacactgattctctcatcacgtttgatcggctccctttttcttattcacactctttttctctgattcacacactttgaaaaccaaggcggttatctgatctgggcagtcatggttgttcgtcttattctctttctctctggagctcactctgattgatatttctggtggttgaggatgctcatagagagggcatggctttttcgaaccaactgactttggtgaaaactcacggacacatatacggatagaaactcactctactcctcaaggcgactctcgacaacgtgacctcgctcgagcctgcctctgatcagcacgagttctatctcaaggtgagcttcgtttgctgggaaggaaaggtataggaaagacgcgagagtagaagggcggaagagaagaaacggggctgacgtgtttgttgtctagtctttaggtccaatgttcgagctgtcatgaggttcacccaaaccatgtccctgtgaacatgcaggtgagttgaacagagaaggagagagagagagtgtgtgtgtgtgagagagagagagggagagaagtgggttgtctcgctatctttgcactcctgctcacccagtctgcttgggaaataatcaggaagaacacgagttgagctctggtagaggaaccgcgtcgttcgtgtggaaatgttcgttctgcaaggtaggtgtatatatacgttcatcaggaaatctcacccagttagatactcggcgtgggttttgggctctttgatttgattctaattttttgttttctgtttttgacgaaacagagagaggcttcgctctcgttccttcctcctcaaccaccttcccagggtgtgtacgcgccaaagaacaagaagaacatcaagattcctttttcgaacaagcctctgccgatcgtcgagtcggacacctggacggtcttcctgacggtcgagtgcagaggtctggaggccgtcgggtttgattgggagggaacgtggcggtgtggggtaccggatcgggagacgacgtttgaggatgtcgtttttgaagatggcaggtgggacgaatatgacgaagaggtgagtagtcagggtggttttccggtcaatctgttcttctttcccgcattgttgaccctttttttcttttctttttttcttcctatgtttgaactcttcctaaacaaatctaaatccacaaacgtccgctcttctagtcggccgcaccttgttcgatcgaagagctcgagtctcaatgggtcaaagtctagactggactagatgtgtttctctctctttctgtctgtttttctttttgttactttgttttgcttctgcatgctttgcatggctgggtgtatacgttgaatatggtatcggaaggcaaggaactatagaacgcctttgtgtcagagggtggtcgatgagaacatcgccggttatcgggtgaaccgagctagcgagcgagatctctaggtacaaccggccagctagcaaacgagagacacattgcgctggccgctgagaatggagaaggaaaaaacaaccagaaagaaaagagaggacgccaaggagggcggtgtcggacacagcctcttttttttttttttttt

SEQ ID NO: 1028 - DNA, 515 bp, Xanthophyllomyces dendrorhous
ctttagtgaagatccttagccacagagctgtgcaaacgcgtcatgagatttatccgatccacttgttcttcgtccttctttcttcgttcgtcttcttcccccccttttctggacgccactgcggatattttttcttttctttttcaagttttgttctggaatgtgactatgtgtatgtgtacgtacacatgagagacacatcaagaagagagggagaagaaaagaagaggtcatgacgatattggtgataccgaaagcagagcgagaacgtgtaaagagtgacagatacgaagagacaagaggaagaaagagcaagtcaagagaagaaaagaatcctacagacaacggaaagcggcattatcagagggaaaagaaaaaagaggaagagcatcatcaacaacaagactgaaagcgcatcatcagttgaatgatccgttcggtttgaggtcgatcgtgaagaagagaaggaaggacagccgaagaaccgcgcgccgaggagatcttcccatcattct

SEQ ID NO: 1029 - DNA, 457 bp, Xanthophyllomyces dendrorhous
ctctctctctctcttttcttacggagtagagcgtccttaccgaacgattgaatcgacgtcttttcgtttcgcactctcgctctcacttccactcctactttctatccgcttgcttgctttgctctctacatacaaacataaactaggtatacactcgactgttttctctcctcatcgccacataaagaaagtacttttgtgagtgtgtcttggtttccttgtagagagtccagttcgggtctgactgacggagcgaacgccacggattgatcaccccatccgtcctatctatcttacagcgcctccagctttccgccacatcccatcgagaggcagacagaaaggtagtacgaaaaccagaccagacgaccaagaaacatcaaagacgtagagaggaaccatacaacacataaataggaaatagatagaaacatacacacacacacacacacacaca

SEQ ID NO: 1030 - DNA, 595 bp, Xanthophyllomyces dendrorhous
aaggaaagataaacatgtccatcaagactggaacgagctcgacatcgactgattcgaattctacgtcctccgcgctctcgcctctctcggccgatggctcactccccgtgtgggactcgccggcgggtatcgctgttccgacgcctgctgctgcccctccttcttctgccggtggcgtcggcgccgggatgggctctgggacggccgatgagctgaacgggcggtcggttgggttagagaaggatctggaggcgctggatctcaaggctggatcggagagacaatccaatgggaaggaggacgatggatcgtttggtatgtccttcttttcttttctcttctcttcttttgctttcttctctcctttgggtgttcttgtccagcggcttatgcgaatcgggtgtatgcatgtttggggggtctcttcttcttcctctttcaaacccactaaacaacagatgattccgatcctgaacggcaactccggcggtacgcaagagatctcacgaggtatcaccggaatctgtttgacggtgtgaaaaccagggagcagagaaagaagtcatagagaggggcgggacagtcgagagggaag

SEQ ID NO: 1031 - DNA, 355 bp, Xanthophyllomyces dendrorhous
agagagagagagagagagagagagagagagagagagacagaggtgcatgtgaatgtataactagaactggaaatttgaactagatcttttcggcctccttcttggcgttgttgagctgcttctcggcctcgagctttgcgtcagagccgaccttttgagcatccttgagggcactctgggcggaggcggaggtgtccttggagaggttgtgtgcggtggcagagccagagtccaaggcttgttcagcctgtgccttgaccttttgggcgtttgtctctgtgtgggtgggtgggtggaaggcaacatgaggttaggaggcagatgacggggggagaaagagagagagagagagaga

SEQ ID NO: 1032 - DNA, 1207 bp, Xanthophyllomyces dendrorhous
gagagagagagagagagagatgaggaaaaaaagaaaaagaaagagatggggaaaggaagcgaaagaaacgagatgggggtgggagagaacgaaccgacagagtcgactacgtcagcgaatgcctttctggcggattgagtggcagcggctgcctgctttgatgcggcgtcagcgagctcggctggaagagaagaggaaaagaagagaaagaaaagaaaagacaaaagtcgagtgagaacagacaagacggagagaaagcgagtagattggaaaaaaaagggagcagagacgaacaggccgattgggcgaccgtcttttggcaaggtctggagagagtgagcgatcggacgctagtgaaggcaggtctggcggattgtctggtgagcagggcgaacatggtgggcgagaaagtaagtaggtaagtgagtgggtgagcaagtacagtgtggagtgaagaaaggaagagatgaagagatgaagagaggaaagaagtagtaaatcggatacacacaagacacacacgcacacacaagagacagaggatcacagaaagatcaggaagaaaagacaaacgtcatcgatggggtgtgtgggtgtgtgggtgtgtgggtgtgtgggtgagtgtggcgagcacagccgagaaggcacgggacgtcagacatggtgtaacagaggggacgtaacagaggggatgtactagagagaatgtactagagagaatgtactagagagaatgtgatagggggatacactagagaacgcactagaaagagagagcaaaagccaaggcgtgatggcgagtggcgagtggagcgttagagagtgtggggtgagaggagagatgacggggttggttacagtttcgttaccgagcctcacaggagcagtacactgttacaccgggctgaagaatccactacgggatacgttctaataccctcacccactcacccacaccaagaaaagaacccaggctgtgctatcgtcctctctgtctctctctctagtgcgctctattgccttttttctattgccttttttctattgcctttgtctattgccttttttctattgcctttgtctatcgcccttttctatcgcccttttctatagcacctgtattacatttttctattgcatctctattacattctttcattccatctctattacaccactctattagatttttctctattccctctca

SEQ ID NO: 1033 - DNA, 360 bp, Xanthophyllomyces dendrorhous
ccccccacacacacacacactatgtcatcaacaaaccaaacacccaacaccagccatcagtcatcagaatcagaaacatcgtcaacagacccttcctcgcacaaagaggcaagtccatcccatcgagttctgtttcgttctactctactctgttctccctctccctctccaaccaacatgtctcgagtgtccgatctcttgggcttcctttctttcttcctttctattcttgtcaactttttcccccctcccctccccttttctcttcctcttcctcttccttctctctttctcgtcttcttctttttctttcgtttttttcttctctctctctttctttctgtcgcctctccctccaac

SEQ ID NO: 1034 - DNA, 718 bp, Xanthophyllomyces dendrorhous
gtctgtcttaccaacagcccgatccggcagcagtctccaacggacacacccccggtcaaccctacctctcaccctccccatcgccctcgtcctctcacccacaaccggccacaccgatggaccagcccttcttcaccaacttttcccatgccttccaatcggccacctccccagccgcctccagccccggtctgtctgacccgatctactctcccggcgaacagacctcatcacacccactccccgtccatccaggtcaagtccaacggacagcgtcgaccatcctagaatccgcagacgaagtacccgaattgccctccaccgctcttctcccatccggtcatcagtcagacatcagattgcccctcgacccgacctcacccatatcggccgtcagagagaactctcatagcagcagcagcagcaacaacaacaaccaccactaccaccccaacagcaacaacaataacaataacagtagtagtcaccctcctcactcgggtcccccgccagcatcactcaacggtcgaccggcagactacaaacgaggccgatcccactcggccgcatctacaaagccaacgatgctcgtccagatcggcggccaaaagtctgccaactttatccatcgcatgttccacggaggaagctcaaaggaagacaacaagcacagctcggccaccggcggtacctccgcccgggacaccccctcctcctc

SEQ ID NO: 1035 - DNA, 3251 bp, Xanthophyllomyces dendrorhous
acaccccctcctcctccgcccacaccggtgccccctccccggccatcagcgccagacgctcgccctccagacggtcgagtaacgccggcaaggacccggacggtcgtcccatcgccctcgacaccaagcgaaacccgtccggcagcatgtttggtttccactccaaggacaccgattccccaccgaccaccccggggagcacgtacgattcctacatcggcagcggcccgacctcgaccgtgggcagcaaagcgccgagcagggcgacgtccgtccgggacgtccgacctcaactcggctcctcaaagtactcgtccaacagacacccagaccccaacgccgtccatccgttcgccctggccgacaagctggccgggatatcgctccgaccggacggcaagggcaaaggtggccagacctactctcctaacgcaccgacgtccccccggctccatagccaggaaggttcgacccccccggccgtcggggccacaacaacagcagcagccgcccctcctctacccacccctggtggaggcacaaagtttacctttaaagacctcgtctcgtccggaccaaagctcagtaggaaagcctcggcgtcttcagccgcctcaaagtctgaacgggccggtggatcggagaagggtggaccggacggagggtccaccaccagtctactcacaaagtacggggtttgtgaaaagaccgccatcggcaagggtgccaccgccgtcgtcaggctcgctcacaaatgggaccgaacgagcgaaaagctctatgccgtcaaagtgagtctcgagacgacaattcccccccccctcctgatgctttatctaattctcttttttccttctctcaggaattccggaagaggagaaagaacgagacggaaaaggactacgtgaaaaagttgacctccgagttctgtatctcttcgaccctacaccacacaaacgttgtcgagacggtcgatctcgtacaggacgaagcccaccattggtgcgaagtcatggagtattgcccgggcggagatctctacgccgcgatcaagaaaggaaacatgcctccagacactgtcgactgctactttaaacagatcctagagggcatcgcctatctccactcgatgggtgtcgcccatcgggacatcaaaccggaaaacctcctgttggacggaagaggtcatgtcaagatcaccgttcgttccctctccttttctttgtgtgtaggtgttttcccggaggaaggatagctgcacaaacttactcgaccctttttctctccttctctttctctccttctcactcactcacccacccacaaacaggactttggagtctcggatgtgttcagaatgtgttgggagaaaaagactcatctcagcaaaggtctctgtggaagtgaaccgtacattgctcccgaacagtttgaacaaaaaggtgctttcttttgatttcgttttctccccctccacccctcagcaattcctgatgttgatcaagtccctgacgcttcactggttctatcttatgtttctcctctctcacccacacactctcctctctccacagaatacgacgctcgactggtcgacgtctgggcggccgggatcgtgtactactgtatgcaactccaagagcttccctggggattcgccagaaagaccgatcggacgttcaccacttacgtccagcaatacgcctcgctcatcgaggcaggttccaattcaaccccgtcgccgctgacgaatctgtcgagggagtgcaggaatctgttgaaacacatgctcgatcccgatcctcgcacgagatggggggtggaagaatgtctcaaggaaaaatggctcgcccaggtgcccagcaagttggactcgtagccacttctctcactcttgtttcatcttgctctcaaagagattcaaataaaaaaaaaagatgagatctctcaattctctttgtatcaaaaagaccccagaagaaggaggaggaggaggaggaggagggagagggataacaaagggggttctatagttccgttcttccccgttttttttcttgttctcccttgtctctctttcttctttttctcgcttctctttctgttttctatccttttacccttctacccttcttgcaacccgcccgtatcttgccttcttttttttctctctctctcctccccttcccgcttttcactctgtcgcatctcaacacgccttattctcttgcgtcgttcccttgtctttcgttcattgttttggctcatcgccttctttgcgatttcttccctgtcctgcttaccccatgttcttacacctgatcccctatgatcgttttctttcttcttcttcttctcctcctcccggttgttcttctcccccttctctttccacctggtctaatttactctatccattgctgtacggtgtctatataacgacaattcacgaaatcatccttacgattctttcatcattcgtttcctaacagacgcatctcgagcaaaagcaaagcaaaggaaagcaaaggaaatgaagacgagggcgcggaaagtggataagatccggaccaagcgtaaacccattacgtcagccttctcgaccgcgttttcgtccgactcgattcgacccgttctttcccatccaagaagcgatcctcgttctcgtcctaaccattcccactagacaatatacacgcacacgcacacacacacacacacacatacgcacgtatacaaagaagagaatagaagagaacagaaacgatcatcgctagagaatgttcaccggattggtaagtctctttctcgcacctggcgagatcctcacttgggatttcccatcatccttctttacttgaaccctcctctctcgatcgaccgctcgcttacccactcacccactcatcgcagatcgaacacagagcccaactctactcacgtacgcctcaggactctacagactcgaacgcgtacgccgccggagggttcaccctgaccttccaccacgccggacccatcctcggggactgtaccgtcggggacagcatcgccgtcaacggggcttgtctgaccgtgttggagtttgatccccaggggggcgagcacggacagcacgcgcagacgtccggcagtacaggccctatcggtggttggttcaagatgggtttggcgccagagacgttgaacaggacgaaccttggtgtgtattcttcccccccctctctccttctctgtgtgtgtgtgtgtgt

SEQ ID NO: 1036 - DNA, 387 bp, Xanthophyllomyces dendrorhous
gtgtgtgtgtgtgtgtgtgtctctctctctctctctctcgctggagggtgtactctatcagggaaaaaaagaaaaaaggaaagctattcggtcgtaaatcgcagaatgactgatcgtatctttctctcgaatcggatttttgaacaaacaaaaacgatgataggacaactaaaagaaggagactgggtgaattgcgagagggcgatgagcgctgatacgagattcggaggtcatttcgtacaggtaggccttcttttttttcttttttcttttttctttctcgtttcccgtttcttatttgatgttggtcacgatgatttgaacgacgttcatctttttctctttccgtcttccccttgaacacgaaccccccccccaaaaaaaaac

SEQ ID NO: 1037 - DNA, 3702 bp, Xanthophyllomyces dendrorhous
aaaaaacaaaaaaaaacacagggccacgtagacacaacagcaaccatcacgtccaaagtcccagacggcaactcgatccggtacacgttcaccctgaactcgtccgccgtgctgccttctccattcgagctcgcccgatcgttgatccccaaggggtacatcacgctcgacggcacgtccctcacgctcaccgagtcttccgtcgtccccgccaccgccgcgccctcggacggagcgcaggtgaacgagcaggtctcgttcgggatcatgctgatcgcccattcccaatccaaagtgacgctctcctccaagaacgtcggcgacacggtcaacgtcgaggtcgacagcgttggcaaattcatcggcgtcgccgtcgatagcgtcctcagcggctcgggcggcgcggccggaaagaaactcgaggggctcatagaatccatcgtggagagggtcctggagaagagaggcttgatctgatctgatctgtccatgtaatatcgatcgtctctcgcttcatccaacgtttggcttggtcaaatggaacagagtgtcacgttgtttttgtctttccgaaggaaaccaaaagaaaagaaaactttcttatttttcttatcaagatcatattcatggggaacaaagggagaaaggaaagaaaagaagagaagaaaaaacgaagggataaactcgagtaagaagagggtgtcacagaaagcagacaagagaaagagagcgaatcagagaatgaatgatgatggtatagagaaaagactagtgagtggcttttcccctctcgaatgatcaagtaaaagaagaggcaaaagaagtagagcgaaaaaacgaaaggaatggaagggagagcacagggtccagatgcaaagatgaaagatggaccccattctcagagaagagagaatagtcaagacaggtcgaggcagagagaaataaaaatatatggcgagaatcggctgaaagacggatgtaaagagacaggaacaaatatatgtagctggaaggtgacgcaagaaaaacaaaacgaaaggatgaaaaacagaacccgaggaaaagaagagaaagacgcgaaaagtgaatatttgattgggtagatccgggtgagcacgcgagaccagtgcgatcgaggaccaatgcgatggtgaggaacgaggtgcaaaggaaacagaaggaaacaccggcagagtcccttcgtacagagtgaaagaagaaaataagggaaatatggctgtatattatggaatagaggtcgatgcttgtttggttttgagatgtatataccttttttgttatgctctttagtttttttagagggggatgattgatagcagatgttttctgagaaaagtatttaaaattcgtattgaccaggagaaaactactaggaagaaaacaaagacgatgagaatttaatcatcgaccttgcatgaagaaacgaagcataagaggagaaaaactcaccagaatagaatgttgttgattttttgtttgttttttgttttgttttgttttaagaagataggaaaaaaggaccgagtcgaacgaaagaaggtgtcgttgagaatttgtcatgatgtacgattgacagtgcagagtcaaaggtacccgtcgttaaggtgtgaaaagagatgaaaaggccgatttcaaccccggtaggtggcgtaagcattgtagctgttcacctgaccggggacggactgaaaagattgagttgggatccgtcgttggtggtgatactggtaagagaattgctgggcagaagatggattgtaagccgggagagtctgaaagttgacctatgttgatcggacgcgtgagcctggatcggagcaaatttgaagagatgaacagacagaagactaacctggttatatgcgccaatctgctgttgctgttgctgaaccaaggccttaccaggtcctctagccctctttccgtttccagtttgagaattagcctggggctttgcctgacctgctccgctaccgctaccgccaccaagcttgacacctccgccgagaacaccgactttgccaccgtcataagcggtgaccgagagttttcctccggcagacatgggcgagacagacctggatagctgatgggcactcacaccgagaccgcccacggatgaggcatccgaaaccttccgctcggtcgtgccgtggtgggcatagatcgtggggtgggacgaagacccctcagacagagtggaggtcgaggtgaatgtggagaaggaggtatccgattcagcagacggagaatcgggccgggtagagagtgaaggcagaggagcgagagcgtcggcgacgaaagaaggaggtcggatgggaattgcctgggaaggaggcgtcggaagaagtggacaagaccagatcgttcggatcgtatctggatcgaatggtgacaataatgaggcaaaacgtgggtcagtaagagatgctcaaagagagattcgccaccaaaaatagatgttcgttctggccacaaagagaagaccactaacctttccaaccgccgtggtaaaacacaccatcctcccactcccagccaccttcccggatagagattctaccggggtcgcaccagatctgccactcatccttgccgccggcgagaccgtctcggagagcggtctcccagagaataggatcgagaacggcctcggcggcggcgaacctaagagcagcgggtagtttgcccgagtaggcaatcaaggatcgggcggccgatccccttgtgggttcagctgggtgccagctaggagcatactccatgatgaaggcaacgagcagggcctttcgtagcttcagctggacgtctagtgtgacgaggggctcgaccggctttgtgagtgtgttgatgagcacggccagggcagggagcagtgagtcggaagaaggggtgttagacatggacatgttgagtagagtgttgaatgctcggagaacaggaagatcgatggggtgtggagggcgaggggtaggaaagggtgtggatctgagtgtgtgtgtgaatgtggatgtggataagtgtgtgcgtgccgtgcgatgagagtggagatgagaaacgaaaaaaaaaaggacaggtgaatatagaaaagaaggaagacaggctataaagaagagaaggaaaagtgcaggagaagaagaacaacaagaaaagaaagccaacgacccaaagatgagaagaatgaagagagtcgaaagggaaagataaagagagtcgaagtacgaaagtgaaagtgaaaggagaaggaaaaaaaagaaggcgagaacggaaaagacgaaggagagaaaaaacgagaaggagagcgagcagacagacgtggaggtctgctgcgcgctgcgcagggaacgcgttgaactcaaaaggacgagcgggactgtctgacaaagcgcgcccagcaggtcaagcacacgtctttcgcgacattcactcaacattcacccgggcgatcaaggtgagctcacgtgcgaggggcgctgcgggctggaaggggtgaggattaattcatttgtatgttttcttgtgaaacgagtggctttcacatcctattcctggcgcggcgtctgcgttcgatcgatcgtacgtcctgacgcgtggggacgcgtctggaacgcgctcgttccttcgcatgtcacatatagaaggagagaagtctagatcattctctgtgtgtgtgtgtgtgtg

SEQ ID NO: 1038 - DNA, 39427 bp, Xanthophyllomyces dendrorhous
tgtgtgtgtgtgtgcacagagccaggcaaggtctcccgaggcgtactcttactctcttctgcattctacaggctatctatccgtctgcgcaacagatctctgcactcgatctgccttctcttgcctacatctagctacgtttcgatcttatggtcggtggaaccatcggatggcgtatcgtcttgtggacactgtggatgagtgcacttctcatcggactcaacgtgtatgatcatatatttttcttagaagttgtgatcagggtccaaacgatgtggtcacgacctgaagccgtcgttaaccgaatgacctatccgctctgaagcgtccctctttgcctgtactgtatcctgtctatactttttttggtgcctacttcttctgatctcgctctctcttcttcttcctctgattgcgctcacgccttgggcctccttacgttgctactgcaaaactatatatgctttgacgtcaatgacctctacctaggtccttgatgacagccacgttgataatctgctctagtgcaagatactacggagcacgcttgaaattatcgacttctggtgtttcgacgaccggatgattctcgacaacaaaacttggaccaggagagacaggacagcgcgacgggacagaggtaagcccatagagaaagatcgtttcactgtgatatgtacatgatacaacagctcaaagtggaggaatctgagacgtcgtcgaagagagagtagaaggaaataggcaacgtcaagatcgtcaaactgttcttgtctttttttctcttgacagtcagtcgcgcgaaaccatataagctattagagttgatatgaatgattagaagatatccacatatgcgagatgacacgaaacacttgtccgatcgagactaacgtaagagggaacatgcaatgttgggatagtgacggtaagaaacgattcctcaagttcttaccgataacattgctctttctcaagtctttcaacataagttttctactctacccagctgatctaaaccgtaagacgtgatactaaaaaccaaggacaactgcaaaaggaagaaaaaataattgtagtcaaaaaagacaaaagtaatctagccccatgggggggtcgaacccccaaccttcagatgccccatagcttgtaaaagtctgacgctctaccgattgagctaatggggcggttataatggttggcatcaattagttctaagatcttcatttgacagatatcaatccattgccacgcatcaatcatcggccataggtcatgatatcaagatggtgtccatgatatgttgatgactttgcctgtgaggtatactgagcagatggtacatcagagagtttttgtggcagacgaggcagatatggcagcacatgtttcgtgttgctgtgatcaaggagatgtctgtgttcagaagaccctctgtgaaatagttctccgaggcggaagatagcaagcggcactttgatgtacagagagcgcgcggaaacctcgttgacagggcgcggccgaatacgtttcggaatcttgaccgacgtctcgatatcggtcatcggccgaacgaggtgtcgcatatcgcggttaaggataagatataagaaagattgcgacgagattgaatctgagagtcatttccatctcaagagttcaccatcatacaaccactaatcctccagtgctttcctgaagattctaaagaatactatggctatcgctaaagaagacagaaacctttatgaggcaaacatgcggaaccacaaccctgccttgtacaacaggtgagttccagacgatgtactggatgatcactacgtcattacagctgaagacctgatgacgatctctactctgtttacaaagcaacgcgcactttgtgtatgccgatgcatcggtttggccagtcttgcagctactcgaccttcaaaggggagaacagattcttgatctcggctgtggaactggggaattgaccgccagactcacggacaccgtcggcgaaacagggtctgtttggggaactgatgcgaatgaggaaatggtaaataatcatatcaatatgttacaagcagaaaggaaacacagtctgatccgagacctgactccttatcgcagctttcgaaagcaagaatggcgcattctaaacttcgcgacaaggtcttccttgcagacgctcaatcactggaagttcccgaagggcgaggattggagaactcgtttgacaaagtgtttaccagtacgtacctactttgcttatatatcctctcattatttcccaaggttactttagatagattcttctcggtctcttcggacgaaagacctcttagctgatgttttgagtgcttctcaacagatgctactcttcactggtgcaaacgtgatcctgccggagtcatcgagggagtcaagcttttccttaaacccggaggagcgttcgttggtgaatttggaggttttcagaacgtttgtggttagttgtttactctcttcagacgatatggacagagccgatctaactcgatcattgatcggcactcatgattcatcatagctgtcagatctcacctccatcaagttctgcgcgagcataacatagatccagttccattggacccgtggtactttcctacggctgaagcttactcgtctctcttgaccgcgcatgggtttacggtttcgtcgtgcatacttgctccccgaccaacgactctcccaacagatctgataggatggttgcggacatttgcgagaaactctttcctgtccactttgagcgatgaggaagcggaacgtatcatgcaggagacgtcgaagaggtgcgaaatagattgccgagatgaacaagggagggatagcgtcatgtacgtcagactcaggttcgcagctcatctttagtggaccttgcgcggccacgaggaataagactgtagccgtttgacatatgtgaacgcagagaacaggaaaaggaaacagagatgaagcagtggcttcagatggttagtatggagttttgaaatcagaatacgtcgaaagacaagagtatgttgatggcaaactagaaaacaaacagatcatttttgatccgttagtgtacgcactctcaagctatgtttagtagctaactattcgctatataccagagtcagagcatgacccgaatcgtgtggatctacttaacagctagctagctagctagcttctggattaacaactgcacaagtcgatcaggaagtcgacgattcaagacaagtatcaaacaaggagtacaagagtttccctgtattaggtcgaaagtctagaagtgctatagaaaaaaagaaacaagatacgacatgagaagtaccgagtgggcatatttaggaaaccctccgtttatgatgccggggatgtgtcagtcctaaattctgtgctgaaactaatccgaaagaaagacatttctgaacatagagcgttaagaacaaacaagaccgattcaatgcgcgtcaccaccgatttttttgggttgaatatttctagtcaaatatagacagcactaagctgattacaaacaatcaattagcttcttattcactgtacagaacgaagcctgagttgtgtgaaattgagcagggtcttgaaagagaataagagatcagacacgcgaacgagtaggtctcaaacttaaaccagctcatcggctgcctgagcacgatgaacaaagagacaataccgattcaatgactagactcagctttcgccgagttcatgtctgggctgggggaataatcagagagaggtctgcatgaccttctgctgacagagctggacggacagacagagaaacagggaagaaccctaagagaatatcggtaactcacgatccgggattcatcggcagcaaaaccttggttagtcacccaccacatcgtccgttggggaagccgtgcgcagtgaatatgtttgattggggacccggctagacccgtgcccctgggcgagacgaacttggggaaggggaaagaaagcttgtttattatatcccgtgctggctgatagaagatatcaatgctatatctacgttcgactttcttcccttcttcccgtcgctcaattacttcccgtgtggtcgtcttctttgccgttcagacatccatcctcgtctcctcgtttaaatacaaccagacgacgcactcagatacgttcttagattgttattgaatccgtgtctttacaatctcgcgctcccttttgtcgtccgaccagtccttgtgctcttttctacgatgcgtaagtttgattgagcatccccccgttcactctttcatctataccctcacgatggtttctctagatggatgagttcttgagatcatgtctttcacctgttcacttactgatatgcatccgtttgcggattattattacttctctagcgtctcagacactcccttctttggctttgaactcgtcaggccatctggccctgaccggggatacatccccaacggatctttctctttctagccctccttcgccgaacgtgtaccaacctcgaatcagatcgccgttgacaactccagctgttaccgatggatcttttggcttcccctcggcttcttcgaaaccgagtgttcagatgattgaacgacgaccgtctccaccttcattcccacgctcccgtcctctccgaccggcggtcgttcggttgacaaacattgacgatcccgttaagaaggcaattgtaccgcttaaccagaagtctaggatcggaggcaatggattggggctcagtacgggaactggtccgagaaaggccaaaattcttacagggcgaagcatgaaggtttgtatcatttattcgtcatgtattgttgttcctcccgctcgtctgccagaccagacttactgacagtctagtcccctcatcttatcctcaatctatcttagaactgtttcgagttgaatctttctggacgagagcttgctcgaagcgattaacaaacgcgtcttctggttctaagccagttttggtatgttctcttttaccttgtactcttaggttcgtctgattgcttatctagatttctccactgcgaccccaacagaatacttgtctcttgtgaaacaacctctactctctgtcttccaaaaccactcttgtacaaatatacttcgcatcctgccatatcggttcgtttcgtcactctgtgttatgactgattgtgaatttgtggttgagccaacgcctttttcttctttttggtagtcaaatattacaatcgcatccctcacactcctcattttctttcctaccctgtcccttctttgtcctccgaatattcacggactataacgccctggccatgagatgccgtttctatcgtgcctgccgtcggctatcattcatattcagtctcttttcgcgcaatactctaggcggttttggtttcccttattgacgatagttcctgaggtcctctcgtcattattctgaccagactgaccagctctctcaatagagttgttagctcaatttctttttacatttcgttcttcgaactttaatctttccgcaaaatactctgtcatcatttagacaggttttttgcgttttaaccaaccttcggtttcctccttcccttctcttgcctatctctcttttcttttctctattctagagcgtagccatgtgtgcgcttctcagagatatgttatttgtagactactttttaagaaagcattatatatgttctttttcgaataatttctacatatttttctctctgaaaattgactgcagtgacgacttgcgcggaagagatgacgtcgacgtcgattgtaaccaacggtgtgccagtcacaaaaggaggcgtgccctaaaaggacacgcggacgattgctcgtctccatctaaactctgcctgttctttcgacctctgatacctctatctctctactttccccctctccttcatcttaacatttgctcattgaccctctggccatagctgtatctataaatttaacatggctatcgatcctcatttgtcagtctttcaattcttccacttgatcctatccttgttcttttttggatgcactttcaggggtgatctacttactcatcaccaatgttctttatctttcaatctgtcttcgatcggtgctctttctctatgctctcatacacccactttcactttccggtgaatgcctaaaccttgaatacaggctctgggccataggccatgctcttcttcttgttggttccttcaaagtgggacttagctctcttttcttcaggggaactagtgcttggtggtacaagagtacgttccttcttcatctcttggagaggagcgagtgatggcgagtacagatacaacgtccagatgtgtcggtattgaagatctctcatttaatatcgatcaatttgtcagcttccttttctggagccatggcttcttacgctatcgtctgcctgtaagtatttcgcatccttcgtgtacagcacggctgtgtgggactaatgacgtgtctcctgggcgatgatagcaaatccgtcggatctcccacctcgcagcctcccttggagtatgcccaaaaagcccttctggatgagaacgttcagtacttggtccttgctgtttactggtggatctcaaaacctattccttgtacgtcgctgtgttgctctctttttctcatctcaataaacatgcatgcatgtaacttccatcatcacgctgatgcgctgtgtgaggtttctcccgttttgatattcggatccgcagtgaccctccttccctatgccacattttcactcttccatactttgaccttccttcgatcaaaccttatccctaaattcttccccccctcggctcacaaggcgccagctgcagcagccggaactccggcttccgttcagccaaaggctgcccccgagaggatctctagagctatccagctctgggtgaaggccaattacgatactgccatgaagttcgttgcctatgtcgagctcgttattctcctcagggtcacgctcggtgcattgctgtcagtttccctatctgtcttgcttttcaacatcagatcttggaacaatagaaaggacgcgatgctgatgtatagttgtcgtgtgacaacgccaccgttattacagattccaaaactctttccttgcccctattttctatgcccatttcatccgacttcgatactatcattccgcgttcactcgaagtgccgtcgacaacatcaccgctcggtatgttagcaatcaagtcgttctcacccttcgcctgaatgactactgatgacgcctgttgttccctccgaacagatcggacaaaatcgtcgctaaccaggcccctgcagtccagaagggttacggcatcttcaagaacgtcgtacaaaagtgggctggaagcagtgagttcctgtgtctagtctaatttgttcttctttctttgttcttctttgcctgtcgagcataccaatggattacattctgacatgggttgggttcgactatcgtcgtcactttgttgcagtccttgctcgaaatgatggcgctgctcctgctgctgctggcactgctcctaacactgggcgagctcgttaaaacactgtcgtgtcgttacttttactctcttcaacagctgtctactcaatctcctaagattctgcccctttctttgatcttcatacgtctcgattacagtagtggtgatgtgtttgcttttgacgataactgtatgccttcttacttgccatattgccaactgcaatacaaatgagctctgcagtcaactcttactagcaaaagaacgcttatcacatgacaaactgaaagatgagtttcatgaaaggatgtcggaacaagtgttcgagccaaatcggactatttagggttggcatgcgttcgccgcggatctgtcttccaaagatgtacggagggaggtgatacggattgttcccgctgccaaccgtcaatatacacctagatttgacatcatgtcgttcgtcatcgccgttgactttgatgatggttggtctcgttccttcatcgttcttaacctacgagaactaggatcactcgcgataggtgttctagaagttgttgaagatcgtaactgatcttggcttcgtttgttgatcatcagttctttgtcaggtatgtggtgttctcttgttcggatcaaacaacagtcccggacacagaccaggctgatattatgatttctgatgatctaaacgccggtgactgatagacgaacttgaaagtagctgagcgttcgtccttctccattccatctacttgtctatctgagtgaatgcaccggatctgtttttacatgagggctgagaatttggatcattcgctattcgggatgaacccgctcgatctcgatccaaaaatgaatctacactagtccacaatgctcagtacgaaacggatatgacaatcgatgatttccgatattatcgtgcgttcttaacctcggtcgtcatgaaacagccctgaggtagacatcagtgaggtgctgatcgtcgatcctatacgcttcgaatctgggtttaatctcgatatatacagactactggaggaaccggggtaagggccactcttcgactaacaagaagatacatagtgtgtacaacgactcaaaaaattatttcttgggcaacgcaaacccgaccgatgatcgttaggctggggtaaccctgaagagactctgcgcaaggttcgactgatgtttgctcaaggggtctatagagatcctcttccaatcgccgacgcttttagcgcactggaagcgatcaaagcgattcccggagctgagctggtcatcgtcactgctcgaagtgagaactctagggaagagagccaagcatacctggacaagcattttcctggcagtaagtcttccaattccatcatactcatgtatgctttctgactgcagtgacgaatgcacatttccgatttctggttatcctttatacgtaaagtttttagtaaaatatattttaccggagctttgtccgtcatcttcttgccgatgtctatgcgcttcccctcctcaatgcactgatttttctctccatccgtagcactcacaccgaggctgaaggtgaaactggacccgttgtgaacaacagcaagactaaacactctcttaaaaaatctgaggcaagtacaacgcgttaatttcccactggtttgctaaagatctgatgaaaatagctttcactgattctcaaagaacttcctatctttgcgcgcgtggttcttctgatgacaggtcttgaccctcatcaacgcatccgttttgatcgacgatgctatcgagaatgctctagataccgcctcggaaacgtcgatcccggttcttctctacggagactacccttggaatctcaggtcttcatccacaggaaaagatgaacgggagcatatgagctacaacgaggttcgcgagcgaggactggagcatctggaggatgaggaggacctgatcaaggacctcccggctacagtccgtcgggtatcaaactgggaggccgtggtccagtgggtgaaggagaatttgaaaggacaatgaaggcaaaagacaaaaccctgtctggcttaaattcaacaaagaacttgttatagatttcaaggactatagagtgttaatcaggactgatataaggagcgttcgataccaagatatcggtcaatgagacggaaagaacagtatcttatatgatctgaaacaaaaaagaacaggagatatcaagctcaaagaagaagacttgttgtagtctaacagagagaaataattagcgggataggggtcagtggtatgataagatagaacctagatgtgattgcaataagatgatgtaactattgtgaactactcgtcttcgtcatctccatcgtcatcatcgtcatcatcatcttcctcctgaaggttgctagccgtagatgaatcgttcccttctctgctgatgggatcctctgctccttctagttcgagaccaggctcgattgtttgaaggagggcacgctctagcaagaagcagttttccttatatttctcagattgctcgaacgatttgatctgttgttatgcgctcatttttcgagagaccgaaccaacaaacagagagaaagaaaggagccaaaggggaagatgcaagtagagtaataagggaggaatacgaagagaggtctaatcagagatcgtctgtccgtgtacctgtgtgtatcgcgctgccaaagtgagcagaggacgcacatatttccacccgagatacgtttcgcacttcaaacacctcagatcgaccacagtgtgcagcccggtggtcatgcgcctatcttcagggggtccctccaaaacattgacgactgagtagaatagggtggcctggccaaacttccctgtaaagcgctatagtagtaccgtccgcgatagacagctcaacaggagatcagccaaagtgacttcctttgaatatcacttctttgaccctctcgattcaagcctcaaaaacttccgatgattttctttaggtccgtcacagtgatctatctcgaaatgagcccgatccttcataatacacgtccctgacagcttaccttgcttagcaaagcttccaccgtcgtcagatgagtgccacaacggccacatccgtagatcttccggcccgtaaggtgggcccttgtttgttggcccatccgtaaatgattatgctcgtagtcagcaagatatgagcgggtgaatattgacgcttagatacaggcttaaaaaactaccgctgagagaagaaacaacagttagtcgaagatgagtgtgtagatcaaggtgcagacgatactggatgaagtgagtaatctaaggtttcagtgtcacgccgggatagaccgcagctatacgggaacgatagattgcgtagataaatatcgttctctcaagagcgctctcaatattgcctcttggctatcagccatatgacctcagacaacagttagaatgacatggtatactaagaggcctggtaggtaaatgaggagaggggcagagaagaaatggaagcaagaagtatggaaaaatgtatgaaacaaactagacagaggagtagggctggtgaggagaggagagcgttcacgagtgagaagaaaatgacgaggaaaattgtagaggcagaccaagctggcatccaggaaataaaaggatagatgcctaaaaagtccagatgcatcctacactaggatatccgaagattagtttagatgttgatcctagagctcaaccttgagaaacgacacactataaagggcagaaagaggaagtagagagatgaaagatagaaaagacgagtcatagtacaaatatgaaacgaatcccccctaaagccgagaccagatcgacgattaaagaaaggctagacgaaaggatagacacaaaacagagcaaggacaagagacaacttgtcaagcgagcttcagtcattatttgcccaaaccaaatcgcttcttttgggattgctgttgctggatacgagcaaaaattaaatttcagcgcatgtacacttctaaaacaagaaagtattggagatagaagagtgaacatacgccaacactaggtcgatcaggagtaagaggccgacccgattcctataagcagaaccatttatttatagcgactgtcaatgaatgcagctgtgtattcttttgaatcgtgacagggaatatagagcgggaaataaaacataccactctcctcttcttctcctcgagttccaatcgttgcttctccaaggcgtccttcatctccttgtgccgagcatagagttcctcttcagactgcttgagtttggcctctttctcctggactttctgctgaaagaccatcttcatctcagcttccatcttggacaacttggcttcgtgcaaggttcgctcctcagccatcttagctgcgggactgtgatcataaaatgaaaagtggcgacttagaattgattaataattatgattcaatcacgattaagaggggagaatgcaatctaggtatgagacacagtgatacgaacttaatctccttgaagactgttgggtcttgagccacacccatgcccagcagtttctccgttcggtacctctcatagagtaccaagttagtcctctctcgaagatcctccatatgcgttcggataagcatttgtcgcagtttgacaaagtcgcagtggtcctcattgtcaacctcgacaacaccccaagggtagctcctcccacggatctcttgccctgtaatagctgattggacaagcgaggttgagccaacgactgcaaaaggaattttggactgcatgtattcacggtgccgaggaaacacaacacgaattagttagatcctaaaagtatgtttgagatttagaacgaacagcaatggcttcattttctccaagagtctcttcatcctcattgtcgtaaattggcgcagagaatatctggatctgatgataattgatgtctcgcaaaacctgggtgtatgcatgacaaaacaagaatagcagattagtctagattaaatcgaacacagaaagagcaaacccgtaccctttgcttgaagaccaagatctcttcatcagtcattgtatcactcttggcgattatcgggatcaggttgactttctgatgaagccgccgcatgaattctatatcgataggcttaagcctggtatatgcccaaaaatcgttttggacaagttagagactgaggtataaaaaagctagcacatagaagcttaagaaggacagatgcatacgaatggccagtaggctgaaggaagtacagacaggcgtgtaccctgttatcaaccatcttctgcctgttgacgcgattctcctgctccaaataggcatcgaatcgagcctcaatattgtcgacgataggcttccaactgtcgtgttcggaacaatatcaaattcttgatttagaatatgcgtaacgacataacactaaaagtgttccttacgattcatcattgttgacgtagtcaccgaatccaggcgtatcgacgacagtcaaccgtagcctaactccattctcctcaatatctgcgatagggttcatggagtcataagcatatatcgaggttcgatggtacataattgatagaatcttacctgcactagtgctctcaaccgaaacagttgagggcaactctgaacccggctgggagtagagtctttgtggcttgatagtggttgagaagagagtgttaatcagcgtggatttaccaagcccagactcgcctaaacaacaagagcaaagaagaggaatctgttcaacaaaagcttatgtatgccaagtgcggcgtgtcagaatactagtttaaacataccaacaaccatggcggtgaattgaaatccctttcgcacactgaaagtgttatatgaactcaacgggtcgtcagcgtccatcattcaagcagtatttaagggttcgatgaaagatatcaaatgtttaaattcaagactacaactgcacaagtcgcaagagttccgtgtcccttaattgaagggtacttaaatcttggacatagatcacgaggcaagctgcgaactgatcgagctcttctctccaggtttagatctcagaccttcttattgtcatgtcttcgtccgcccatattagatcactagtcactggcatatatgcagctatacagtttaaggccctaaaaggaccttgacttatccagaataaaacggaggaatcgaggcgaggaagaaaaataggcaccagaacgaacctctttcggtgaacctggtttgggagattagcaaacccgacatatccactgagcttcttcctcgttactgccggcgaaggagccttgaagggttcttctggctgaggagaaacagatgttgcaggagaagagtagccgttgtgtgcctggtcattgacaggagtcgatgagaggctgagggaagtggtttgtgcgcgtgggtacgagggactgagttgactgtgttgagagctctcgtaagagacaggagtagagtctacagagtcttggtgcgaggaggattccatgatgagatctggacagctttgtcaggtcgatagtgtgtttgtagaagagaaagatggtcaaagagaggaacaagacgaggtaagaagaagaaagatcagagtggaagtaaagaacgaagcagagatggaaaaaagggcaaagaccgcgcgtcaaacaaagggagattagtcttgccttgtttactcctagtcgagtctatcctgtcgctgtgacaacttttaatgaccgaatgctcttgtactcatacatatgtccttcacttttttgcacgcatgctaccggatgacagtaaaccgcatcatcatcaaagcagaaatgacatgctccatcttacatcgtgatgccgtttacccagagccaaacttctggcttttgtatcttcttcgataatttctaccacgttaacatccagttcctccgattttgaatcactctgtatataagacccggctgatcttttgatcaaatcaacgtgcccttgacctctggagtcatccaccctgtcttgctgatcagaaaagctacttcaccctgcccttctccagtcacaaacatcaaagtcttgatcttgtgccctggatcgatgtcccagacgtattgcaaggacaaccagataggttgaagtgatgatggccaaatagtatctagagaggttcgaagcgcacgcatgagcgcaagaccgcggctaatgaatagacgggatggtcaggtggagatgaaagatagaaagagtcaagacgataacggcaaatagaaaatgaattgagggttgcgcggggattataggtccaggtgaaagcttaggatgatgcgcctccagttgaaagggtagggaagtcttccaggtcggtatcgtcgtcaccaatttcggtcccatcgccttgagatccatcgcctgcaacctggttatcgatgctgaattcagagccgttcagatcagaataatctccgaaatcgatcccatccagatccgacgcgtctaacactcctatgtcatctaaaagatcttcgtccgaccaagcgatctgcccgttgctctgtccggccgaaaaccagctttcctcaaaagcggtaccataaccatccataagtttgaccccaactttggccaacacgctacctgcgtacatcaccaccgggctttttctgttttcctcgatcttgaaactcaagaggtacaacccgagccattgaagggatcccagtccatcgtcgcctcgacgaacaaggtttgccacatgtttgcatgttgttatcactttgtcccgagagccggcaagcaaagaggtgaaaatcgagggaacggcaagctcaaggataagaactttgagcttcggacaaggaggaagatatggtagtgtaggatcggatgttcgaagaaggagttctgtcaagttgggacactgatacgtcaaaattgaaaggtgtccaatccagttcagtttaccaaagaaattcgagttgctccctagaacaaaacaggaaatagaagaacgaccaaccattctaaacacttcaggagaataatccggacgtgagtcattagggtatagatgaagtgtcttaagtctcggtccaactagagcgccgttttgttcatcatgtctgatcagtctacaaaagacatttattgtaaacacacatgtcagtcaagagttggactatacctttggccagtgtcatgagcaaaagactttcttgacgtctgtagtcaactccgaagaacctgagatcctccacagtatcgggcagatataataaaacactcgaggtataatcatgaaatgtcaagcatgagaatgttagccgacagagctttgagagatcgaaccatttgcggatgtcaggctttggaacgaaagcctcgaatgcaggaatgctcagggcgcgaagtttaggacgaagttctggacggcttggtggtggtgtgtccggaagaaaattgtcgaatgtaatgaactggagattggggagattgtggaggttgtgaagaagtcgggaggctggccaagtgaattttccactgtcggatgcccctatttgagagatttcacatgcagcccaacaggaagggttcaattgatcgttagatgatactctgggaaggagatatgaaatacaccaagagtactgacattgtacactatggatgagggtgccgagctctggatttttctgaagagtattgttgagcttttccatttgaacatgaccatcctcttcaaaatggaagaaggcaatttgtgagtagagcataggaattgatatatctctgtagaagggtaagttcgacaagtttcagtcgcgtctcttcattcatacgtgtcggatgatgattgactcggcttacctccatgttcgacagactaacgccgttttatataggagcagattccttctcgctattgaggctagattgtcattctcgattatatctgcacacatttcagatagagcaaggtgaaggagacgatgattcagcttgttgatagatggactggctacaggaacgaggtggtcacatacaatagtttctttctgctgcgaacgatatgatatttctctgaagttcgatcggaaggtttctcatcacaggcagttttaagagggaaagatggaaagatcgagcgcactttcggaaagagatcaggaggaaaagtaggagagatcttgaaacctgaagagtaagagaggaagtagatgggtagacgcgcaaggaggtcacgtgaagtgattggaaaccattctgaaaccggccacatttgctgtacagacttcgacagatcatcgattgatccgcgacgcttctggttacgtctaagtatgtggcatatataccgacgtaagaaaattcaaagagagagtggtataaccatcgagtgaggtatagcagcaaacgcgcaggaacagcgtccgaaggtggaaaaaaacaatcgttcgacatgtaaggaagcggaagagggacgagagaagatacgtattaaaattcaagaagaatttcagaggacaggggcgaaacaaaaacagggaaagagaaaaaacgagaaaggaaagaaggaacaagaggatggaacgttaaaagtaacgatacttcagagctcgaatagtcttcgagagttcgaagaggttgtagttgtcgtcgatagacccgttcccctagaacaaaattaacatatgttagtgcgctttccatatcaaacttcgaaaggatgttcatgccggacacttacttgcactgaaatgaagaaagaatcgatttcataggtctattaataaaaaaaagcagcagaagacatagctcggacagatagggaattgaatcttacatagtcggttgccttgacaggtagacagctgaggtatcggcaccattcgcaactggcagctgagtccgccttaaagaactatcagccgaccaagtcaaaggtgaatagaatgcacattcagaagcgaggtatcgccgctcgtaagcaatctttgaactcggcaccacgagagaagatgaacatagcagtcacatacgttgcgtgttatcaagacgaaagccaggacaatcaatacagctgaaattacacgaagcacccatacgatgatcaagtgcttgcgagttggactgattgcaggactaaggtcatccgttgtttccacacaatgtgagatatggtcagaacgaaatacgttggaccggacagagtgaagatcaagaaaagaatagacagactacaaaatcatcccccaaaggagacccatcatgaactgagacattcagacgaaaccgaataggttatcgatagcccgttagtagcctgaggacatgacggccagcagttacaaacaatgaatgataaggaacgtactcctccgagatgagaaaaattctatatatcacagtgtgtattgttttttttttgtcagtcagactaaaagcaaatgtgagcacgaagaaacaatgacataggcttacatcgatgagatatggacttgggtgagaaaaaagtctcgataatttcagttcgacaatacgcaaagactagaaagacaaagagtaagagtatatgttcgtacatatatcccattccaactaggttatggccacaaagttattcccaaaccatccaatcgttgaacatgagagatttcccagacagagaacgcattgtgtatgtgcaaacatacccatgatcacaaactcaatgattaagaacgccagctttgtttttggtttgctctcaatctatttactcgtcaaattggcatagaacgagtgttaggatatgtgcgagagcagagcatggccattgccgggtcctagtccaactctgctcacagattatcaaagattgcctcaaaacagatatgtataaggatacgatacttaccttccaatgtaggaaaaggtctacaacagtaacagcgttgacagcaaaaattccacctgatgcaccaacagagggtatagctggcaaactgaatgatcctccaaactcaaacctgtatattatataatagttataatggcatctagaagtcagatatgaagaggaatagatgaatatatgaatgagatccgtcaatgataccaacccaaagatcgctcccgcaaagaagacgattgagaaagccaacgatcctgcaacacaaagaaatccagcttagtccatagagcgtttgaattttacagatacttcccatgattgagaacaaaccaagatctttctcgatctgagctcctgcgctgagcagaactagcaggttcagagaaacatgaatgatacccgcgtgcaggaaaattggcacaaagaacctccacgtttggtttggtacatctgttattctcaatccacagtaatcggcaaccgtacaagcctcggatactggcctaggtgtcaagaatatattgaaggacatgattgaaggttagtgtggcattataacctatctagactatatcctagacctacacggaagtgcgcgtctcgttgaagcacgccactggatatgtgagaggcacgtccgtcaagttctgtgagggtgcaagatcagatagagcatgggttagacgacacacgtatatattcaggctggaaacatatgaatcacttgccttcatacatggcacgaaacgagctcctgtatgaatcaacgtcgccgaagaaggcccaacttgtgtgttagaggcaaacatgtataaagaaccgtatagtcagacaaaaatccagaacgagatatcaaaaagactctcaatcaagcttactcatccagttgaaactgaaaaggcgcaatcaaaaggtattcagtggttgattctgcttccttataagatcgcgacaatttttatagagcagactaacgttggcttgattgcgatcactgaaccagtcaaattcttgttctttacaagggtatacgccatgagcgctatcatcactgaaggagtgttggtcatgatcagaacttgttcagatagtctgtgatatcataatttgaataacaatgtacgaggtgatgtggctcaccaagcgatagaaggtagcagacccaagctcgtcgctgtcgtcctattcctcttcctgttcgaaatgaacaaataaagattaaaatcaacatcaaatgaagacaacaaataagagcatacgttcatgtttgacgttcgagattagacgacaaaggtggtcaatgaggggtagacatacgtcgattctcaattctctgctctaacgagtatcgcgaaaatccaattccaagggactctagaattttatccttggtcgatagcttgtcatatacatcctgagaacgatcttctgtcagaagctgtgggccctcagcatagtctatgcacaccaggatttgtatgaatcagggcaataaattcatagatcgagcaacagacagaagtcaagacagtcaatcaccaacttgatcaagacgcctacagagcggacgacatacccatctcataagacgagcccttcggcccttctcggagcccgtattgccacccgtcggctcctgcatcccgtccaaatggtgctgcaccctttaccaaacccatgccgtcctcagtttgttgtccgtacagacgttcgttcagaggctgtcggtaggacgaagaacgatcacttggtaaccactgatcgttatgatagtatccctcttggccgttttctaaatttgattgatgcatgtattcaaggtttctcggtcgagaagatagatcatttgtggaaggagtatgggcgtatgatctagaattctgaatgtcttgaaagtcagaatctgaagtagaagaggttatatgcgaggcatgctggaagggcggtgggtcaaacgtatctggatgaggcgacgctaaagaaggaggatatggttggaacccataaccagattcctcattatacgatctgggtctatccgactgcatatctactggataggagtgatggctttggtcgaccaaacgaaagacagaaccagggcagacagttgcgttgacgtacgaggaagtctacctaaatatcgtctgcgctttgtttactttgttttctctcgtcactgcaatttcttttagtccttgtgcacacatttaacatcgcatcagtcgtacatcggtagaagcagaaaatagtgtgacaacacagggggagatccaatcacagctaataacaaacatcacggcaaatctcatcaaagaggcagacaacacaaatctcctacccagatccaccattcctctctcaaactcttctatctcagtctggatgcacgttccatacgacaattcaacatatagaaaagagcgagtcacgttacgattaaagcagaagatcgtcgaacccgtcccctccagaggccttgggctgttgctgttgttgctgctgttgctgctgctgaccaccatttcctcccatgtttccccaaagcatctgctttctcttttcctcttccatctgagccatcgacttgacaggtcctccagcaccagatgctgtcttcacaggcacagtcttacccatggatcccaatgaagaggaccaaaggtcatcgaaacctccgaaaccggatccagccgccagcttggaagcagcagaagagggtgcagactgagctgagctaaacgaggattgaaaggtatagttaggcttcatgggctgctgagagaacacaggtgcagcagcaggcggagcagtgtaagacggagtttgcaagaacgtaggtggccggacgggggcggcggcagcggcggccacgacaacagtaggggtgggttgagaaggagtggagtcaaagaaatcgaagagatccgcagccttgggagccggagctggtacagcgttcggagctgggggagcagagaaagaaggagtggacgagggagcggactggaaatcatcaaaatcatcatctagggtaggcgccgatgcaaatgaagcttggttgggaagcgcggctattggataaggaattccgagaagtatatagagtcagctcgagtactcgtaggtagaagaccaaaagcccgaaacgtaccaggagggacatcatcattcccaaagtcaaatagatcgaccgccttaggaggtgggggagcctgcttcgaaactgaaggtggaggggctgcggcggccttcttctgttcttctctgcccttagcagctacgctgatacctccaccatttcgtctggccggaggaggatgagggctcacatcttcttcgtcgtctcctgcatcgtactcctcaaaccctcctccccttgtcacaggatccctgaaaccgtttcctctacttcccccgccagatgagcccccagcagtgcgttgattgctaccagcatactcgtcatatcctcttcctccgcttccactacccgaaagggagtcgctaccaaatccaccgtaccgtgaaccggtgttggtctggaaggaggcgcccgagagaccactgctgctacctccaaaggaggtcccctcgtttccaactccaatatacttcgatcgatttgccttcgctttccgacgttcgacacggatcttctccacatcggcaagaagctcggaaatctctttagatctgtttcgaactggttgtgcgaaaagaacacccaaaaggacaaagacatatcaactaagtttcagaaacacactagtgattttgcacaagcgggtctttaacataccattgataccctgatcttttcccttgtcatctacatagtggaaatttctcagcattttaatcgtagagacgtgagcccgagcatcgtccacaactctttctgagccattcttgaccagatactcgagcaagactaatgcctttgaggtagacggaagataaaagtaggtaaaccaacaggtgctcgaagaaacattatggatgagtcgacttactttgtaaatctcacgccattctcgggcttccttctccatgaacctcttgtagattgtgggcataatctcgttgaagttttggctagaatttgatcgacacaacgagtcataagctggaaagcccaactgcgagatgatatcaaacaacttccgagacgcacaagttgaaggttctgcgttttgaacagcgcgagatatgcattaaaagtcgatgtagaggtcagcaacggtcccatagatatcttgattaataagaacaggacttaccccgcagcgatttcttgcatcaaagatgatgaggcacccctatacattggaaatcaagagtgatgagtacgggttgttcaatcgggcggtcccgagacctgctcgttctatctacaacacagtatagacgagatctaaagactctattccgtagttctctagaggttgcaactaagcattgaagtatgtctcaaggacatttttggaaggcctcgcatcttgatgtacgcgacgtgagggaggaaacaagaagaagagaggaggaagagggacgataaacaatggagagaaatctatcatcgagactgaccatgcatcgctattagtcgcttctagtactttagcctcgtaaggaggtatgttgaggaccatgttcttagcagtcgagtaatacgacttgaggtcgtacatctgagagttacgaacatgagaagaatgccaattgaacactgatcaaccttcgtatttgagcaagagaagtgtaccaacagtgacttggctgagctgctcgcccaaagcctagaggacagttgtcaatgcgagacacgcgattagtcacagatctatgcaacccgacagtaggtgtattccagagatgatccgtgccaacatacagtgatcttgtccatggtgcgtgaatatgtgtgtgatgagtgtcaagagcgattgatgaacggacagttgaacaggatggaagaagcagaaatgagatgaggcgggcagtcatttctgatattttgggaatttccttagttaacatcagggaaaaaaagatcgttggaattctgttcagcattctctttgtgtgaccatcatcagcccatcgtacaaatccctcatcctccttgaaagatggccttcagcaacactcccacatatggagacctcatagactcccttccttacatagatagagaccttgaggatattccaggtgagtctatgttcactatcaacacctctcttgtctcgattcctagacactttttctcgctaaaccaattccaaacaatatgtttactaacctttgaggaaactctgtatctcgacaggacttcgagaaaaggcagagagccttatccaggttgagcttaaggagtcaggtggcttgaccggtaaagtggatcatcctcgaatgcccaaagagttggaccaggatctcttttctgtacgtattgaagattgatctatcgacctccatcgtttgcttgagctgcatcagcttacaacctttgaacaatattttatctttgtacacatggctatatctccaaacgaaaacttgatcgaacagaactcgccagcactgaccgcgctgttgcaagactacccaaccaaacctgtaagtcggtcgcgtgtctttgcctatgacaccttgcttaaggactaaagcggctgatagatgaatcatctttcaaaactctggttggtttgaatggggtttttgctgtgtctaatggagtagctctcggccattgacacatcccgatatcaactccccatgccttcctcagacgaagccactgaggaagaatggaaagctgctagcgacaacgcgcgtgctcagttagagcatcttaacatccggttcgtttcttctatctttcatcccacaagacactgtctttgtcgctaatcattttaaatccggatcgtaaacacatctctccaccatgattagacagatcaacttgtcccttctctctcaacacggctcgaatgctcatttgatccacaatcatcttctagagtcggaagccaaacggctagaagctgcagttgaatcactgaaggctcatgtggtggacataaaccgaaagcggaagaatgctcaagtacgtcgattagatcacccattctaaattagcctgtctctgaccttctttttctctcggttctttggggttgttctcattcacctttgccttccaccaccacggtagacggacgcttctcagccgataaacagattaaattctcaatggaatcaactgatttcgtctacgttacaaaccgaactcgcaaacacagctttggaagcggaggtcgaggagctgaggaagaaagaacgagcattgggcctgagttagataaacttccattagattatgtcctttttctaatcccttttacttctcttttagggaagacgtcctttccttgttgaaagggcttgtaatctggtgagtttcgtgattatctcatcaattttggcttgatgatactcccctcgacgcgttctgactcgtttaatcgtctcattgtcctcgaatgtaaagaagtgtataaatgaactcttcttacggtgattcgcttcaatcatcaaacgtctttcaggcgtgatcccacgaccatagtgtctactgctgcaaagccatcgatacaatcgcgcgaaggaactgacactgtcttcgttactgtacccatcgctagcgagttctgagtagcagctatagggaaggtttcagaggcttctatcatgccgacaatcttgttctcaattaagccaaaaactaagaatttctttcgagacctgttatggagatctgaagctttctcgcacatctgtctccacctgtcggggctcatcccgcagtcaagagtgtagctaatttctcattgaatatctgaaagtaatgatctattcagagaagagctttgtacgggacctaagaagcaccggcaacgacgccaaaacatatacggcttaaaggcaagagaacggaaacggatatagaaaggaaggataagttctggagaacaaagaccctctagtcgtctccggcgagctttcgaactcgcttcaaaacggaatcgcgatccggatcgtacggatgagtttttctatatttgagtcagagggacaagagtacaagaaacggctggtcggtcatctggcagcaacacgttcaacatggtctcaatgtggtctgttgctttaacgtacgagggaatttctagcagagccgggaacgcctgagaatatttatcaacagtgggtcgaatcatctcggcaatctataaagccagttgtttattggatttcgataaaacgaaaatgaagaacgttttcagagaacaagtcgaatcttgatacattagaattcaaccaaagagatgcggacgaacatattggttgatcagaaggatggcgatatcaggcctctgagtaaactcttcgaaggcagcctctatcgttgacggttgggtctctaagaaagcgaaaaacccagagatataaaggaatattgatcagatgcactatatataaagaggacagaaaaacagaaaaaagaagaaaagagaaggaggtgtatagaactacaatcggcacgtacttgcatcgactactaagaagttcttctttcctttctcgatgtgtcctgttcctgctaacaggagtccagtgattgaatcctaagaaacataatcccaaaagacatgcccagatattcagccgcaaaagtgaggaagttcgcattcattcaaacagccagtcttccattcgagatcaagaggtcagtcttctgaggtcagcgttaatctgtccaattgataggcagaccatcttttccctcaaaccactaggtcaatcgaatcatattcaacatcacccctctctttgtctcctgtctcgctcatctccgtcttgatcccagaccttatcctccgcaaaaaaaatctcgaacaaagatgactgaaatcttgattgaaacaggacagaaaggaaatctggacggaactaacctcgtctccgatacaagcgatgagcgttctgtttttagctgaaggatgagacattgtgattgatgcttaaggtggtgtgggcagtcgattgttggtcaatgatggccactacagactcaatgtgatggccaaagacggaccccatatcgggggtatatatccccctttcggttgtgttctcacccgcgttatgggcagatcttacattcgtgctcacaactctatctgcagacgatgatactgtatatagcaaacaacgataacaagtcttccctcattttgaaagatatgcaccgatacccgtcaattgggaaaataattaagagccatggtagaataagacaatttgtatagacgaaaggaggataaatcatttttgatcattccgcaagccagaacagcccgttaataaccacccctgctcttatcaggggaaaggaccactcaaaggatagtttgtcctttgttccggatgattacccaggaactacacccggtcccagccgccaacccattaccccgacaggcgttccgggcgcgggggacccctcaatattacttgcagtcgaaagcattgcctgtctacctgtcagagcggtatcggagctttgtccgggagatggctggtagcctgatgggaaagaacgtgttgatgtttgggtagaagttccgccattgggtgcatactgagattgaagagatctttggctaggcgagtatagtgactgctgctgctgctgctgctgctgctgctgctgctgaggctgagactgttgtggggttgatcgtgaaggtggattagaggatacagatgatgatgacgatgaggcatgtgccaacggaggtcggaacggttgaggcctagcattgcctggttgagctgatgttctttgcgatcctacaggtgtacccatccgcccgacaccggctgaaggaggttgcctgttaatcaatcctgcttgctgggacggggctagagaatggattcggacggttgtgttgtccttaagggtatagggttttgtcgggtcaagtgtacctctgtatgaaggtcgcgggttggaaagagagattaacgattgcagattgtgaagctgagatggggtgataagtttgcgggtcgcaggggatgagtaggacatattcttcgtgtccgtggaaggagcagccaaaaaggagaccagccaagctaaggatgtcgaaagagattgagctgacgaaagatgacgatgaaggcatcatcaagtaaaaaatagataaatctgatcagatgtggtttccaacaatcagagaaagttgctagcgcacggcaccagagagtagaccaacctagtcttgtttcaacctctccaacttcggattcctctcttctcaccctaccaacctgcaactcttgaagcagccgtgctcttctccagttgcgctctaacatcttgtccacatcagcatcttcactcttgagatcatcagttccccaaacatcgtcaagcttggccaaccgatcgatcgtgtttaaggagtgatctacctgaacagctctgtgcatgagttcttggagatctcgtttcgattgttggacggactctgtaaaggacatggtggcttgcgatgaatcatacgaggggcagaatgatgagaatggacttggattgattatcgatactaaacaaagaaggcattgtttggtagggaagtggaagatgatgatgaatttagattcctttatcaggtgaattcgaagatgagagcagaggaaaaccaaccaggatgcagggtcactccattggtttggcgaacatgaactcgtctaactctggggatcgacgcctcccctaatttgggctcttgatcaatcggcatcaaaggagttggatgaatctcaatctgattggcataacctgcagagtcggattatagagagaaggttttgaatcagactgccttgcccaacctcgcacagattaatacgaaagagaagcaacaaaccgattcctgtcaaaccaacatcatcttcgctttcactgtcatcgctgtcgtcgttgatgatcttatttggaagatcgacaaggaccggatctgtgaagaacgtgccgccccattgtgggggctggccccatgagggtaatttctggtacagagagacgagcttccgaggttctagtcaaggtcaatacaaaacacaagggcaaaaataggatcgtttcttgaatcagtgttctgaccagttatagagacaaagaagagaatatcagctgaaacgatcggaggggctcactgttgtcgatgcctgtaccacgctggcctttgtcaaacgcgtttagtaagtaccggacactccgcgcccagttgtgacgagcaactagagctttgtttgaagtagcgttcgaggccgatcgatttggcgacaactcgatgggtgagatgtttttcaaaaactcctgcacagcgcagggggcaggttggtgagtaaggtggacaagaagactcggtgagctcgcagatctagtaaatcctaccaaagacagacttcaagatgacaggtgatatttacaaggataggttctttgggaggcgcgtctgaaacggtaagaaggttgtacaatgtcgtggtagaagtcggatcggaagatgtcgcagaaactggaaagtgcgagtgtaggaggaagagcttttgatccattctgttgaatatttcgggtaaaaaggaggtggtgacgataagcaaataaataaactttgaacttcaaaaaactgttggataggaagagggagagagatgaaggacggacgttcggagaatgatcaatagtttgtctctgctctcagtgtccaagagatctcgcccgtcagtctgatcgcctagccttccggcttctttatcgagtccgtgtctctccaaatccatcacctcttcttcatcctcctcctctaattctccctcggcatctaagtcttcatctagcttttctcttttggctgaaaagtcgggagcgtgcgaaaatccatccagggcggtagctatcgagcgctttcttttgtgagcgttgtgatcgaggacgaagttattgggggatgaaactagaaattgtatgagatcagaacgaatattttatgtaagaaacagacagacaacgagacatgcatctgaatacggagaacagcgagctggaagatgggcggagaaatgggtatattggacatgtttgataccaaatgtcaatggggaccagatctgatgtttttcaatctggcttggcacggagagtgagagagtacagaacttgctgaggagaaagataccgacagagacggaacgagtgagggtgagacgcaagacggagcaagtaaactgacctaattgttctggattacctttaccatttgagaacgaggccgaggagaaagatgaactggtcgcgtcggtgcgcgtcggttgagccatttccttttttttcgccttattgtttctggatgtgccgtcgtcaactcaactctttcgagtccttttgtatagtattgcttatttgatatctgtgttgaagcaagcgtggtccaaaccaacgtgctgtagggtttggttggatagaaagacgggcagatagaaacaagaacgggagagaattcgaatggtgagtccaatggcgagcaagatccaagcgaccatgaatccaggtttcggtttcaggaaaacgcgtaaccagagttacacgagttatgttccattacgtgagcggctctgccgtctaggcggcagagcccagtatagtgagcatttgagatcattgtccggacaacatgtttctatacgagcgatggttgaagagagggatttataaacacaagtcgccggcatatgctgttcttgtcgttatgatttggctctgctttctaggaaagtgttatggccgcttatatatggaaccaacgggtgggagacggacaggaacaagaagtattatcgacccataacaactttctaatgcacttttgactgttactacaaacccttgtttgatggatggcctaagcctgagtatggagaaaatgtatactgcctccaccgcaatctcccctcatttcatcacgatcaagcaaacctaaacaaatactgtttccttccggacaacacacttttaatcagctctcatcagcatctacttgaacatacactcacacgtacctccttgattcgacaaatgaacggtggctcggatgctagaattggatctggtcgttcatcggttagtcatttcttgtttggcatgttttatctatcactgtaatcagtcccattagatcgtgcctgttcatctcgaggattgcctttcgaagaaggatacaatcgattatgtcaggcagaacttttttgttaacatcggtcgtgccattgactcatcgatagattgtccttgtttgttgagcatatgaaccactcacgacggcatccaaactgattcttaccctgcatttcgtttgtcgcatttcactcggttatcatccggtaggaagaaaccgatcccatggcctcctctatgcgcaactcattgtcaaacgatagagctttcctatcctccacatcgcttccatatagacgccatgctcaaactgctgcaaattcaggaactagctcgagtgtcaataacagtagcagtagtaaatttcgccatactgctggcggcaattctcagcatcgagcttcttctctcaccttgactggtcggactttaaaacgaaaacctagtctcaacataggctctgaacgggactgggaggacgacgtgcatgatgtcaatatcttggacggttggtctgattctgatagaccaacctcaaatacaccgcacgcctcgacgccaataataccttcagcttccacctctgatctgtcctccaggttcaaaccaaagagagctaaactttcgactcttcccacagactctccgaagtcagagactgaatctgaaggcgatggactcaacacgaatccttcttcttaccgttctgtctctcctagccgttctgttcaagttcgaccacagaccaaaaagttacctcgacaacagtcttcctcgccttcagaagtccaaagcggtagcatcgctcaggcgatcacttcttctcaagacaaaggcaagggcaaggctcttacagacagttcccccatttttgaggaagatgattggtgctgttcgatctgtcaagacatcttagttggggccagtgtgctcggagcatgcggtcacgagtactgtgggaagtgcatttgggaatacatcaaggcaggcaacgtaggtccaactggccgactacatttttgactttctatgtctgacttcctctttctcatttcttgttcttcttgttaaacggatatatcgtagacacaatgcgcgatctgtagggtgacgatgaccgagcctaaggcggtggtactgtacaagttgaacgagttgatcgagaagtgggccgagaaaaccttgcgtggcgaggagaaaaagaattgggagatccgcaaagagtgtgtcctctgttttatccatcgtctctcaaaactgtctttgttgacgaatcagatgactcatctacgcattgttgtcattatttcgtcaaccgtcttgaagtgaatggcttggtacgtacagtcggtctcgactcgtcgtcagagcatgtctttctgacgaacgtttgctcaactgttctcattccaatcgcttgcagcctataagttttcattcattgatgaggaggcagcgacccttgcttctaggaataatagacgcgctcaacaagcatatccattaaacgacgagagcacttcatatgatgtagggcctcattgtctgaccgaagggatggtttcgatttgttatggtattgattgacttgatgagtatactcttttatcaacagaatctttacagaaattcttacaattttgacaatgggatggtacgtcaccttctctgatacccaacacacatatcgtctgagcccaccagctcatctgcgctcttcacctttgattgatctttctgcctttatttttcagattcgacgttatcaagacgagcgatcaagtgacacaactgtgtctcgcgggaaccctttcagtgttgtaagtctcgctctgttgcacttcaagtatgtatctcggaatatgacgaacaagatgtaactgaacctaatccttgccggctgcttctcaataaatgtagcggtcccatcacgcctttccacctctaggtcctccggtctctcaacgattgtcaaccgatactttgaacgcttcctctgtctcagagctggccctaccggtctttcaaaggataccacgcgtcgatcttagttcttccatttcctcgtcttcctggagcgatcgatcaagtcaaagacgaccaccatccagcgggttcatttcggcaagcgatctccaccagcctaacaccgggacgatgccttctcgatcatattcatccggctcggtctggggcgttaggccttcggcatatacatctacaattcgaccccgtagttccgccgccgtttattcttggatcgggtcgactaattcttcttcctcttctcctgcaacgagacaatcacagtcctccagacttattcaaccaggttctatgagtgcacctgcgagacgttcaagaagccaggctgcaccagaggtggtagatcttaccgctgattgaagaattttgagggaatgtgccggggttgatgagaggttcatgcggacgcggacatcatcaggaattagacacgagatatataatcgatgaccctcttatcacgcttcttaaatatcacttggattctccctcggcctggtatcaatatatagtccaaccgagcgttgcaagatagatcttatataatcgaacaaaagaagtgacaggtagactaagggcaaaattcgagtatccgcctgtatacattgtggcctctgcctaaatctgctccacttcagtccctccacttccatcttcaccgttgctggccaatccgttcaagtggttgaaccttgtccacatccttaacatgtctcgccttgcatcttccgatcaatttcagatcgattcaccggacctgattgagtctgcctctctgagcaaaccgatacagcaaacgaatacactggctcttttactgccccacccgttcctatttcacccgtcgattcttgatttattcagaaaatactatggatcattcggaaagatacatacatgggcacctatcaaggcattcgggagggttcttatcgttttctacgaagaagaggatgccatgagggctaaaagagaaggtgatagactcgaggttgggaggccgggaggggtgcaagatgggactactcaacaagaggtggcatacgatgacggttctccaacgtatctcaacggacaacaacctgggtgagtccgcttggattacgcatcttccttgggtatgaagggcgaagcgaagctttctacgtcttgtttatagacctaatcttaagcttgtgtgcacactctgaacccgtgtttctctttctttccacaaagacttgttcttcgtctgtatcttgctgcacccacttccttaacaccgcctacagataaacatctcgaaccaccgacactcacccgaaatttcctaatttcccctcctggctcgcctcctgaaggatgggaaccgatcgaagaagatgcaccaaatagcatgacattggctgctgatctgataaaagccttggaggccatcgccgtcggatctgacactcgacgacgacggcgaccaggagagatcgagacgattattaattcacaggctgaaggaagtagtgcgcaaggaccgagtgtgactgttcaggactgtaccccgggtatcttagtcaacaacggcaacgcagagcaaggtgcaggagaggaggaaggccccaacgaagaaataccagaagaaattttcgagagtttagaaggaaggaggatcagtttagtcaaagctacgatcgagagtatgggtggaaaaccacaggataatgactggtttggaggcgaaggtgatgcgttcgctcatagtcctagttggagtctgatggtcgacgacaggtcagcaaggatcccgaggatcgtccctacagctatgccccctcgtacatgagtcacggacgaaaaatcttcttcttcttccttaatcattgactctgctaagggagatgagaaagaaaaaggactcatcttctgatctatccattcataacaattgttgtccatcatcgtccgtctgtgttctcctcttctttctttccttttcgtaactggagcgagccaaagtgagtttcttgtccgtggtcgtactaccgttcgattccctctgtgaataccacttccttaaccgtcttgccttgctctactttcgaagaatacaaagcgactatcactcgtctaaacctcgactcggccacctcgaacctcatgtgatttctctccgatcgatccttactatagactaggtctcactatcttcatacaagaaacggagagagcaaagtgaccaaacgaaagtcaatgaaatatatgtaacggcgtttccttctgcattgttactctggttctgcattgaagaagggaagagaatctagaagatctgagataggctccagaggagtaaggaggcagagtggttgagaaaattgtaaaacaaacacagaagaaaacgagaggattataaaggatatatgttcatgcaaaacaaagaggaaaagagaagataaagatagaagagtgtagaggtatgtatagagagatgagaagccagataggtgctcattctagaaggaaggtttaggtcgaggggtaaacttgaggtgaagaccatctttggggaaaagagtggcgatgaccctgcgaaggaagcaagcgtttgacagaaaacgaagacgacacatcagttaaacgtaagcggaagggaagaaccccaagagcaggacaatatatctgaagaagagaacgtactggaacttgcccgtgtcgggagtgatcttgtgatgccagtccatggtgacggacgcggtccccacacaggcggccaagtgcatgtaggcgtactcgaacccgatacacttgtgggcaccggctccccaaaccatatagttctttgggttggcttccgcgcttccacccttctcgagccaccgctctggaacgaacgagtccggctcgggataaatcgtttcgtcgtggcacgatggccaaagcgaagggatgagcatcgttcccttcggcacggtgtagtcaggcaagatagggaagggcttgagagtcaagtaagggacctggagtagtcattcaagaagatatcgtttatttcagcataaagatcaagaactcctcagatgagcacaatcaggcgcggacggaaagaaatctgcgaaggaaagacagaacgcacgaagatgaccggggggatgagtcggagggcttccttgaccatagctcgggtgtagaccatctcgtccatctggttgaacgaaagcggggcatcaacgtcgttgtgtcgaacatagtactgctcctctcggactttggccaaaatttcgggatgatcggccaggagctcgctgtgcatacacgaatatcgtcgacagatgagcaatcgagaataagtcagagagggaagaaagaagacttgaaactcacaaagtgtttaccaaggccgaagtcatggcgtcctgactagcaaacaagaaactgaggacaaccatggcgatctcgtggtcggaaaactctctagagagagctcttcgctcctcggccgaactctctccttttccggctttggcgtcgatcatttccttcatccaggcgtcaatcaaacaagttggctcgttaccctcggccatcgatcgtttcgacttagcagagacatcctcgagaatagtcatcgcaatttttctagccttgatcgcattgtacacctttgttccaggcagggcaagagggaagttgacaagctggagagcacaggtgatgagccagtacttgtccgaaatggcaaactgctcttcctccgacatgtgttcgccacaaaagacccggagggaagtttccatattaaggtctcgcatgaccatcatgtaactgtggatgtggaaaagacagaagagacagttcagatgatgaaaagctttgacgttgaaaagaagaggccaggaacaggcgtacggcttgggctcggtgtcgggatcgttcatccactcgttaaagtatcgacgataaatcttctcctgaatgggcaggtagatgctgtcgagaagtagagacgaaacaaacaatatgagaccgggtactttggaaccaagaaatgtgataagggacctagatctaacctgagagcttttcgggtgaaaagaacgttcaaggctcgcctatactcggcgtgaacctttccatggaggaaaaccctattgagaaacaaatcgatttgttggttagtgacagaaactccggtgaaatcggctgcccaaagttgtatgatagtgatcgaaactgaccagttctctgggagaagaacctgcttagcactggcaacaagacagggctcagcgtaatcgggcgagttgaagatctttcgagcgactctattggagacggccatgacaaggaaactgtggccaaagacaagatagattattgtcgtaaggatcaagccggatagcagagcaaagagaagatatgacgagaactcacagatggaacacactgaatgcgctgagttctccctgggcgaattgagctttgtaaacctccatggtgggatgaagcgagttaaggaactttccaatgatggggatcgtccatgttggtccaggaaggtgctgcttcttgtttcgataattgatctatcatgaacggaaaaaataacagatgttaagcgacccattgaacgtgtcaagtgtataagtcgcagaaggaggagtggatgtctgtatggttgttgaaaaagagagggaaaagaaagaagaacagaagatccaagatgaaaaggaatgagagcaaaagccgagaaacaagcgaggaaaataatgcaattcactccctccgagccgatctccgcgacataggattgctctggactgctccctatagaccacgatcgagtagaaggagaaaggagcatagggatgacagatagacgaaggaatctgaagaacggacctgttcgaaaatcaggatggacgcaacgacggtgaggatggagccgagaagagtcctggtagtaagctctgggaacgcgaacgcctccgtgcctgagaggctgaacggaaaggcggacgcggtggaagaaggcgctggtacgtgttgagaagccatgtttgactgtccttgcctgatgagcgtataaacagagacagatggatgtgagaagccagagaaagaggaaaacggacttgatagtcagatgaaatcgacggctataagagagtgcgttaataggccacaaacctgattccaggtttttctcgtctcttaggtaacgaaaggaaggaagatagaaaagagaaggcagagagaaaaaaaaggcgcgaaggtgtgagaaaggttgattatgtaagcaactatcaataatcgacccactgtggtttggcttgattcattgaacctacgtaagcctgaggacgcgtatttatccgcaatcaatggttccgcgtggtgcttgcggtgctggaccggacgagcttgaacttaatgagaagtagctatgtgtcgactgtaggattgatctcggccgagaacctaccgtatctgctagctggccagctctatcaccaggcgataacgttggactcatcgatagattctttcggctatgctatggctttggttgcaatctctggtgatgaatctgccgacattggcatatgtcttgaataaggagtgagaggtagtatggcctagttgtactattttgccataggcaaacgaaatgtgaacgaccagatgccaagactgatgaagatgattttcttacttgctacgttgttgtcagtttgcgttctgcagaaaagcttctgggcgcagggcttacagcaagacttgagtctgtcgacacattttatcgcagctgatttgctcgagacatacaatatgtacgggtttacatagttcgtctccgtcgttcacttctaccgcgcttagcatttttatcggtacgctggctatctttctgccttgtgatctgatctgagttcggacctgtttccaggtctattttcttggctgatgcaagcattactagtgttggctaaatagccggcgctatatatcttgagtcaggataggcaaacgacaaaggagattgagacccaaagaaggcgcctgagcagatgcctgggtgtgcgcttgaatatttcctcggctcttggagcagtacttcaaaatgttatccttatcaagaaaacccattgcgatatatacataatacaactgcatgttgaaacacaatccaaaacgttgctgaatagggaaaaagttagtattttgctagcatgttaaatttgaagaactacaatttgttttgcagagccggttgcgttcggaattggtgctctgttatcaaaagtagacaagacaaaaaaacaaaaagagatgttatgaaagcagacatcgagcaatggtcagcttagctcagttggtcttctactacgcagataagcacgaaccagtcactcctttgcccatagcagccgttgaggaactgtgaggatagggatagatcgcaggcgtcagttgatgttctggtcgataagaaagcttggatgaaatacaagaactgtaactcacactccaccagttacagtcattaacaagttatcaatgaattcggctccagaccactacaaacatcaataggtatgtataatat

SEQ ID NO: 1039 - DNA, 57678 bp, Xanthophyllomyces dendrorhous
gtataatataatgtcagtatacaagattttatcgtttgatacaaccaaaggagaaccgagactcgaccttctgatgggtgaggacatcacatccgatgtcccgttctcttcgctggacgagctcgacataagctttcattccctctttggcaaacgctgccgcaaacaggtcggagatataagcattcgagtgaagaccgccaagctagaaattaagaaagaacagaacagaacatatcatatcatctcgtcaattcaactatcactgttagaagggaagatgattgatatcaaactcacggtaatgaactgccagacgaatcccagttttccaagtgcccagacataatcttgcatttcggctgtaccaagcccagctgcatcccaattgaaactgggactgaggttgtaggccaaccattgagatgggtagtgtttgtgaactccatcagcaaattctttagcttgggcgtagataggcgacttcgtctccatccaactgatcaaacacacgtcaaacgataaaaaatggtcagatcctcaaaaccattctgtttttaaaagatgaatttccggaatgaggcttacaggaggtctgcgtaaggagcaaaggctactgctctgttgattgcacattgagtgcctccttggtagcctgacaaaagaaaaggcccaaactatttcacgtcaggtgccgttttggagaaaagctcgagaagaggaagaacgctaacgcacggtagtagccttccctagttctaggactgtcccaatcccagaaagggactttcgtgaggccgtagttcttttgtgctagttccagggcggccactcgagacaaatggctagcctcggaaacgaacctgtttttttttttttaccgaaaatagtgagaataagaatcatcgggtgagaacaagaatcatcagtcaattcggattgaatagataacctacttggaaacctttgcggtgtcaacgccttgcgctcgaagagcgtcgcccaaagtctcagaatagagttgcagcttggattctgcggtccatctaaccaaattagcagcccgagaaggatgagtagtttttcttttgatagggagatgctgtcctcaacttacttgtcctcaatctcctgcaaggcagatccactctttccttctctctctgcttgggtcatgacttgaaccaaaggcagcagtctcgggctttaagacgaagaattgaattggtgtcagaatctcacgcgaaatgttgaggaccaaacaacagaagaggaactggactacttactttgtacttccgaggatgaaggcatgatcacgttcatcgatgttggttgtgatcagagtagcagcctcagaatctgttcgggctacaacaaggttggaaacgcccaggatatcatattggagtcgaatggcgaccaatcggttgatgtgctcagaaatagggaccagaacctgtaccagatcacgacatggtatcagcatccaaataatatatgcccatatacttctgtgggctttgatgcttacttttccagcctgtttgagaatcccacaaaaaatggaagtcagatagttgagatattgcttgaaagtcaataattgaaaacgtaccaagtgtccgcacttctttgttcccggagcctgatcctcgatatggattcctgacaaatgaagaaaagaagatttgaggcgaagtaacaacatacatgagcttggtattcgtttggtaaaggagcaacatgcgcacaacttaccagccgctccagcctcgacaaaaagcttggtgagcttcatgacggcggtcaaccctccgtgactaggtattttcaatttgatatagagaacaaggcagggggttagcatcaagccatgggtactagaacgaccgacaaaaaggctaaaaaacgtacccggtatcagcgtcagccacgatcggcctaagatagtccacgtagggtgttttggctcggtcagactcggtcaacgagaggcgagcatgacgttgctttctatttatttatttattgaagttcggagaagacagagccagaaccgagataccatactgagccaagatagttctttcggatgaattggaagctttgtacgaacctgtcatgaaacagttgggcctggaagagatgagtaactttattgggcacggtgttgtaaggatagtcggcaagatccggtccaggctcattggtcgaactggcggtactcgaagactgccatccagagacatagaccgtctctaaatatttggccatctgcgtcacctggacagggtccaatctgtttgagatgaatcaaggttctcaatgtcggggaactagatctatggggaatggacgcggttaagctcagacgtacgctccgtaagtatggctaactccgccattcttgaacttttcgtccagcaaagagtactgatatgccaagatcaaatataagcatcagcgcacactcttttgttgatgttgggcgagagacaaggtagagcgtacaagcttcttgcccatctcattgctaggatattggatgtcgagcgtgcctctcatacgagcaacatcagcagaagtataaggcctcgtggtctttgcgaacctcgggtcctgcatcaccaaagattgaagtcatcagctctggccccttgggcagaaggaacgcatatcagactgtcgtaccttccaccatttctcgatctgagaaatctgctcattgagatgaagctgctcgttcgacgtaaagggatgcaatagggaagatgatgagggagacatgatgaaaaacagacgactgtgactctctggatgaaatcagttggttcaaataggttttctgtgagatgaagagagaaacaaaatcgattgaggatacgtgcaaagggagcatatatatggcctctccaagatgtacaccactggttcctaacgagtcaaaaggacaggagactgggttgacaccactcgttcagattgacaccactcggtcaacctggaattgaacctgagatgagaatgatcgggtgtctagctgtaagtttcgccggttagctcgctgactcgctcgaacgccttcgggtatttcaggaagccagtgagtgagagaacaatcgttctggccggaagaacgagacgaaacatgtgagcagatgagctctgccagcccagctgcaaggggtggatacacatttcgtttgcttcggcctgcattggcttctgttcttctactgctcgaaacgattctttccgatgctgacggccgaacacgttcggacccagtccgaaatccatcgaccaatgtttcatgctggattcggaagtaacttttggaaaagcctacctactcaaagattttttattccttttttttattaagacatgtatggctcggttaaacgatacctgaacaccaatcatcgtccgatgaaattgcataacacactcgatgaaacttggtgccgcctggccagaaaaccttgagaaaatacagaattgatagtttcataagagaacattgtgatagaagccgaaccaagtgaaattaaacatttaacaaccctaaccaagtttcatggttcgtcaggtgttattcatgacaggagtctggcagactctggatttggacagtgttgtcatcaggtgtgtttgttcctagctctgtaccagcgtgaaaaagaaagcatgaatcatgacttgagaagcaatacatctcgaaagtcgcctactgatagagaaagacatattacaaccagcaaaccgagcagacagacggtcaaagtagtctgtcgagagaataagatatagcctagagggtacaacaccaatcgcgggaagatcaggtaatcatcgaacacaagtgaactacgttcagctcgttccctagagtgaagcaggtctagccattccgggatccaacctagccatcagatcactacatgaatcggtgttccgacagaagtaccaagaagatttatcagtatcctcttcaagactattgatgcgacaccagctacaaagtggcacgtacgaagtcaagaaatcgctcgggtattttgcattgatctcgccctcgaggtaaactcgcgcaatctccacgttctccaccgagatgccgggagagcttgagacaagcttctgagactccgacgtgagcacttttgagagaagagcaggcgtgatggcatctcccgtgtcgagcttggccccatggtgggcccattgccaaagctgggttcgagcaatctcggcagttgcagcatcctcctaaggtatggtagaaggcgttcatgacaagaagaagacaaaaccgatgagaactttgcgctaaagcccatagacaggtattcgacaagagagacgtaccattagatagttgataggaacacatccgtttccagagatccaattggcacagtatgatagagctctgttgacaaaatatacaagtactcattaacaaagctagcccgatggcgatgacaatccagaaaaaggctaacgcacgccgagacattgcctgtaattccgccgatagtgatttttcccggaacgttacttgaaacaagatcctcaggcttgacgacgacttcctctcgtcgaacgtgatactaatgatcatcaaatgccaatctcagttttagtcaggcttcctctctgatgcagatgtcagtttaaacttacttggttaggtccaggcatatgctcattgaaaatatcgagagcaatcttgacaagcgcagggtgagcgacccaactgttctcattcagatcccatcaaaagagagatcgttagataccaaaggcaattaaaaatcatgaaagataagttctcgataactcacgttccatcgtgtccagcagtaacctctcggagtttatcagctttgactttgtccatggccttttggtttgctgccgggtcgtctttgatggggatttgtgcagacactaccaaagcaaacagagtagaattctggtgaacaactgatttctcagcccgtatacacaagcagataaggcactcacttcctcccatggcagctacctttctcttatgacaagtcttgattaacaaccgaacgtaagcatccatgaacgggacggtcatggttacctcagatcgatcaggaagcacgtgcttcttgtgcgctcgagtctttttgatgtacgagaagatctgtgaaacaccaagagaaaccaagacatcagcttcgtccaaatcacttcatcagtcatggaactcacgtagtcccatcttccacagttcaaaccggacgagtgatctcggagctcatagatgatctcctccatttggaaagcagcaggaagagtctcaatgagctgtgattggtgatgtgatacggattgtcgggaattagttcgccgatctcttttatgaacaaggacatatcctgatgactcgagtacttacgacagtagctcgaatagttcctggagtgagcttgatatagttctcagaaaaattgaaaacatcattccaaagtctttttatcccatcaccaagcccaaatgaaagtcagtattgagggatttctatgtatgaggcgggtgaatagaatccgcgagtatgtaccttgcctccaagtaatgttccatcttgggaaggtagaagtaagggccaaggcctcgctcgactaaaactttggcgttgtgtaggaagtacaatgcgaagtcaaacaacgagccagaaatgggaacaccatccactagaatacgaggctcgtaaagatgccatcctcgaggtctgtgagcgtcaagcgataacaattattgagtacagaacgtcaaccgcatgggcacaagaacaagatagacagacctgacaaggagtactgcaggcttatcggaaagcttgtaagactttccatttgaatcgaaagtcatcgacccactaccagtaatacaacaacgagaagctaagtgtctatccgtcttaaggaggaacaaggaaacgagatatacttacgtgcaggcgtcccgcatgttgatctgaccgtttagcatattctcccatgtaggagagctagaatcctcaaaatcggccatgaatgtcttggctccactgtttaaagctatgaatcaaaggtagtatataccgaatactcaatacaagtacgtcgacgggcttatctggacagtgaaattgacgcaccattgatgaccatctttcggtccgtgggacccgtgatctcaaccctatatattcaaaattcaactcagtcggtataagaaccacaacactctccatccgtccaagtatggctttataagcgtagacgattaccatgacttaccttcgatcttccagcccagggccgatgggtgctcctcgccagttaggatcgtcccttacatgttgagtctctggggggaaggtcagctgtgctcctttgtcaagttcagcttggagggtcagtcggttcaacaaaagctatatcgttggattccaagagagcgatgatcaacgatcggcacgtctgagatgacagtaggtcgggccaagagaggaggcaacgaacctctttgcgagtcccatcgaaagttcggtgaagggtagcgatgaactgaagggcttcaggagtaagaatctcggcttgagcagatgatactttgcctgagaatccatagggttaaaccaacagaccagaaagctgtcagatgtgattgaacaattgagattgacgaaatctagatcacaataggcagatacacactaagaacttgaacgcctttgatgtttgaagacattgtgtatcgagatggtatgcttgtgaatgaactggaagatggatggttgtgagcgaatatgtatagcaaacaagagacgggaacggaagtaagaggaaagaaaaaacgagaggacagacggttgagaggacgataaaaagatggtgtccgtctttatcggcatgtctttttgacaatacccggattagatatcgagcgagaaaagagtcacccgatgatctcgcatctcgctcgagcggcttttaccgacggggcttgatcttttctcaaatcctatcctctctttcttcgtttccttccttgattcccctatttcagttgtagagctatctgttcagttcatgtgatatcattcattccatcatagtttactgtaggtttacaaataaccccccatcaaccagcaaagaggatccagtacagtatctagacagatcactcgcaaagaacactgctgctccagcctatcaaatagatagataacattcaaagttgatgcaacgtcagagaaatgattattaaaagggcaaaaggagaagagcgctttggccgcttacaatgtcatcggctgttatcggaaccatcagagtttcaagatcagaaggaaagtatcgagatggggtttgaacgagtggtgtcaaagcgagtggtgtcaaagcgagtggtgtcaaagcgattggtgtcaaagcgagtggtgtcaaagcgagtggtgtcaaagcgagtggtgtcaaagcgagtggtgtcaaaaccaacgagtggtgtcaaacattaatcagtcgcggtccgccccaaccaatgtattgtcgacgcttttcccttccttcctacttcacttgcgactgatttgaaatagtcatggtggaagtcacttacgaacacctagtcgacctgcacatgtccgatcggccattgccttatactttatgggatcagccaggtcttccgtattgatggccgttgcaatcgtacctagatatccatcattcacgaaaaacgagagaaccgcaatttatcattcaagtctcttcaagcctgtggagaagagaggtcgctcaagtagataagacatcacgtcgagaaaacatacctgggagaattgagttgcatcgaatagagtgcggcccaagagctatagcacaactctccatcaaacctgtgcccaccaagtttgcatctcatatggttccattaccgaggcaactagatatcgagtatataagaaagagaaaaaagagaaaaagtgtgcgcactcttgatcccagccttggtcggcgtctaaattgcaaagcaaaggtaaggcatgtagaatataatgcccaagtgagcaatctcgtaataacagttcagtcagtcaaaaacaaactatccaaaatagaagacgaacgtagtgagtctgaatacctcctcccaccaaagcctacacatacgttcgaagcatagccggtaggccgattctatcaatactatcccttcaaacacaaaggcatagggttgtccctttcgaattcaagagaaaagtcttacgctgatagacgagatggcgacgatggatccacccggtggagattgagttgccatctggttggcaacagcctgggtcacataaaatgtgccgtctgttttcgcgcacaatcatatacagatccttgacggttcattttctaattgatcacgaatgagataaaataagaaaagaaaagagatgcgcataggacagcgctttggacaaacccatatttacaccctgtgtgaccttatatacttctattggccttaggattttgcgtattgacacccccaaagatcagaacatgtcagttgctccagttcgttcgtcgttcaagaagggatgctgacttgcgcagaggagggagacgcacatatcgagaaacgtatggaatggacagattccagcgttggagatcaagacgtctatccgggatgagatcgatagagcggcctcaacgatcgccttggccgtttcgggtagagcgatatcctgagaaggcatttcaccacatccggtgccgaacaatgtatttcagttcgtcagaattatcttttttagggacagctacgtaacaagtgttcttcaagcatggatcatcggagtgtgaatcaattgtagatgagacgaacgcctgaaactacagcacactttctgcccatcccttggatctctgttctcatttgttcaacttcctgagtcgaaagctcgtctcctctgtagtggagtgttacgtccgctccgtttgccgcacactgaagagcgcaagctcgaccaatacctctggaagaaccggtcacgatgacatgtttatttgacagaagggttgtcgtcggaagagtcggaatcgatgagggagtcatgttgttttctatgtcggcggcttctgatattgaagaggtagatgaagatgaacgaaaggaaaggatggactgaggaaaaaggagcggtcgtcgcgtgtttgctgatgtaaaggtgaacgaaacagaccggaggaacaaaggaccgaacgacgaagtttgacgcgggacatctcttccggtccacttttcttttacgtttttgatttatgttactttctagatttatccaggtgacatcaaccaagagatctcaaccatagccttgtgccaagttttaaaatgccaagaatattgagagaaccgttcaatgtttaagacggtattatttggcaacgggctcaattgtcacttgaaaaacggagaagagagagaaagaggagcactcgaaatcatccacatccaggacagacgtgaagaacttcatgaacactgagcgttaaacaaaatccacccagaagagagtttatgaagatcgatgcgaaaaggatcaaagaagtcgatcagaccgggtttaatagagaggaccgatagagagcaatgaagaaaagagtagatggacacatacaaagcgtcgcattctgcgcaaaactctccggagcacttttcacatttgtatctccctgtcggactcaaagcagcttcctccttcccacctacagcagttcgctttgcctctagattgacaggcgggaacggaagggagcacccagagcatgttggagcgagggataacaagtcttccgggatcagtctttatcgatttggttgatcagacagacgacaaaacattagtacagcctatccaaacttcagatgatggtggacaagtcctatttaacaaagaattgcttacaccggcttccaagcgctcacggggaagagatgatggtagcttctcgccagatgcgggctgctgactacaaggagaccgcatacctcacagtccgtcggaacttcacagagcttcgctccacacctcgggcagaggaagccctccggtttaaacacttgggcggacgaatgacaggcgcacaagcttgccgggcccgaatctggtagctttgtggggaaacccatcatcattagatcactacctcctcctccggaagtgccagctttgcccttggaatcagtagtagcagatgaagtgagagcgggtggtgggatctcctcccacatgaggtctttgagatgaccctcgttcaaggcgacaccgtacgagccacctgtctttgtggagagttctctggaaagctttgtctctgccgcgaggcaaacgaccgagactcgaatcttcgaagattggagcgaagttatcgtttgtgataccgagcctggatcgcatgatgtgagtgaagaaagaaggagaaggacttcacgcgatgagtgtgcaggaagatggctgaccgtcgccaatcaaggaggtttattggtcagaataagtttatcgatgtatcagaatatgaatgatgaccagacagagacatgaaggggaagatacgcacttcatactaccccgtgccatctccaagccattctgcaaagaaggctcgccagcgggttctaatttctttttgtcctgtagaattctcagtatctcttgagagttccctgattgcgatcaatcgttcgatagatgatagttcagattacccttgtaatataacaaatagagtgatgcaagggaaagaactcacctcccatctcggtgagcctctcggctataccagagcgaagggcaatgattcctatctagtgaccaacgagcgaggtagctgatccgtcagaatttatccaaaagtttgcagactcgagccgacgtgaaatcatacctgtcctagagggttttgatcgaaccattcgctcacgaattctttgacgtattccagcgtgaggtcgaacctgtatcaagacaaggtgaggatcagagggagggagagaacgcgcacagcagataaggtagaagtacccctaggtcaatctgctgatcctgatggacgccattgagcagagaaatggcctcacctcgacggccgaaggtccttttcagacattgtatctgagagatcgagaagaatgatcagatgtcgaatgatagttcgtcgaacaggccgactatcttgtaatctatgagtccacgaggtgttacagatggtcaaaccctatagattttcggtttttttgatccgtggttaacgagaaggattgctgaccttcttctgcgacctcgggccatgagagtctcgactgctccttcgagactaccagactcgtcctcctggacgacatcccacgacctctcgaacgaggcctcccacgagtatccgttctgcgcaaatgggaggtaagatagctgtcagtcaaaggggttctacggttggaacggattcctgatctagagagatggacggcaacgactcaagtcaggctcacatctttgccttttgatttatcttccttatcctttcctttgccttttgccttcgatgggccggtattgagctttgtatttgtagtcgtcatgtcaaggtccagcatatcctggtcatcttcatcaaaatctgtgtcttccgacgagaaatcgtccgagtcggagaactcttgtaatcgtttacgaggcggcatattggtcagggaccgtcggtccgataggtcttaagaataggatggattgcagagggaaggtttattgatcgtggtaatctctttctgtggtttgtggctgatgacatgtagggttacgcttgcgaggaatctgttgtcaggtgtcagggatgtgatctgcgtgttacaccgggtaaccttctcctatttctatcattccttctgctttgctatccctatgctctcccattacagcgcaggcatttctagcattttctatgacctgttctcttatgcataatcattggagtctgaggatgatatataatacgtggttcctttgccaccaatagtacaggttctcaagcctgaatcctctgtcctccttggtcccttgtattcttgtatcctgtgatatcaatcttgttcttccaaatctcttcgcctcgcccctccgtcacaatcaccgagcaagagagcctgaacttctcccctactcttcgtactccttgtctggttacacttttgtaaccttcccgttaccctctgaacccggaacctgacatcagggatgtaacccgagtgtcacatgcctgttatctacaactggttggactgcttcgccttctcaactccttcttcatttgctcatgctcatgctcttccaaggcttttacctgcaagtatatagcgttccagcgcaggtgttttctagcacactctacgacctgtgattttttaaacgcattatcgttgaactctgaagatcatatataagacaggcttcctttgccacgcatggcatagtctctcaagcctgaaccttttaatattcgcttcctgttatccttgtccattgtgccatatcaatctcgttctccgtccgaagtggtcttccggatcgtctcctttgtttgaaaactattccggcaagagtttgaacctctccttctcgcccgactatatcccactcgcggttactctcgttgcaaccgtctcgttaccattcaggtttggattctcacatttatggcaagcaagtttcacgtgaaacgagaaggctgttgacaacagtaacagtttccagcattcggtaatcgcggcacgaggcaaccggcgacggctatgctggtaagaagaacccggaaaattccgattggcggccgtcgattgctgccggatcgaggggcaccagtggccgtggagcagtgagtgacatctatgcgtggagcacggaaggagttaaaagaaaagaaaacaaatagagcctcgagaagttggctttgaatgggaaagcgtgatgatgtgcagcatcgcggcagtcagtcgcggtggatcgcagttgcacgtggtggcggctgtagcctagtcttttagacgtggcctctgataaagtgcctcgcaattcagtgtgcctggaaggcacgagcgtatcatgtttttctttatcttccttttttggaataaataaaactgaatcttagtttggtcttagatcattgaaaccccatcgcacatccctccgttgttctcctctgtgcctaaggcctgtgtccgtcctgaaaggcaaaggaagcgctgacatttctcttctcttctcttccttttcttctgatcctcacccggaagagggattgaagaagagaaatagaaggaaacatagaaaatgcttactctctgttgttaaacaattagagatctcacaagagaatttctcgagacagaaaacaaaaaaccaaacttcccaaatccggacatctctcagaggtagttgaacagatctccgtctgcctgtttcctattcctgctccttccttctgtcccctcgccggtttagggttcatgtctgaacattcccttatccggtcaacacaccaggttacctttcttcttgactgacgtctaaacatcttctctaacaagaaggagtctagcaataaacttcattcagtttgacttttctttcttttctttctcttcgcattcttatcctccttccgtctgaagagccgatcgaccgctcgtttatcgacaccatcggctagttcttgagaaacacactcagatcatagagacagtcagagacaagaaagaaccgacaactctatctggaacacacattttcgtttcatctgtcgatctcgcactctcctccgtcccttccctcttcatcgagtctcctgaacatcctcacattcatccctcgatccttgtgtcgctttggttcccgactccgaccctgactttctttctcagacatccatccgtctcgctctctctgtcactcatccgacatcctcccgcgttcccttctttcattcctttgaaaccagtattgtctcaacgacttcaacctgcctctctaattcaaaccattatacctgtatcctgtccgggcttgacgtgtcgtcccttgataagtctggtgagtccgcacagcgtgtctcttcggtcgatgaggtttctttgcatgcaaaatcaaggtcggtcgaccattcaagaggactgtggtctggtcagacgtcttgatttcttaggacaacttccatcggtgctctctgaatgcaaactcgtcactctcgttctcactgttatccgctgttcctgaatcctcatctgtccatccatcaatcttaacgttcctctgcttggaacttcttgatatttcctcactaataatgtcggtcgctaaccttccgtgctctggtctgacttctttcgtcgtgtcagtcctatcatcgtccagatgtacccccatcatcacgctcattactttcctctgcctcctaatcaggccgaccagacggcatcttcttcgttgtcatccaaaatggaccagtcgtttacaagagatcccttccatgcctctactcggatgacatctcagtcactttacccaaccaatctcgctccggttcaacagtacccgtccgcgtcagctcaacaacactcttcagctccgactcaactagagccgtctcatatgttgtatcccaaaccggctgccccatccagacctactgcggctcaagcatatcagcaccactctcgctatttacgcgtgcacatgtacactccaaacttccttcccgccggcctcgtcggtagagatccggtcaacaatcgcccacaagagcttcacgtcgaatgcaccctctttccggcccctggccggggttttgtaccctccacttcgttcccttcttctcagccgacgagtccgatgagcgcgttcccagtgacaaccgtggcaacgatgatcaggttatgtttcgcaaacatgcctttggccacccaggttgttcggtccaccagaccttcgtcaatcgctagtgctgccggtccgtcccctccaggctctcaggaattaagactgtcatgtgccattcccaactggaacgatgtggttgagtcgagcccaaaattaaggctaggtggaatgcaaggtaaagtaagcctgtttgtggaagtcatgggtgatcaccaaggcgggcccggcccggaaagagttttggagagaatttggtttggcgaatttgaatacatgcatgatgagcagcaaccacacaacagaggcttctcgtggacaaacagtcagttcctcatcccgatcgttctcttgatgggaacaattaaagcccagtctagttcttaccatgtatgcatacacctcttcttctactctttattcttttaggctttgacgccccttcaaagggactcgaaccgtcccttgatgttcggttcgtcaaacggccgggatctccactctcttctccgcggcagcagcctccaggaacccagccctttccgtctacctcatcagttgatcctaatagtcttgaccggtgtccacctacgcagtatcaatccccttctggcactatcaaccctcacgctcaacgttccgcctacgctcctcacggcggatcatatcctcctccccaacaatttcccaatcagccggtcgcgtattcatcctctggaccgtatgcaacacagactcaatatcctcaccaaccttctcagtcgggtcacttaggttaccagccctcgccatcccaaggacagccagaaaggcatgtcgttcgggctcaggtgtctgatagcttcggctttgtagagagtggagatgaagggaagggtgagagagggctcaacgtagaactgggaatgtcgagcaggccttgtgcgtctcaagtgttctgttctctctctctcttctcctccctgagtatgctggacactgaatcatgtctcctcttgctactatttttggctccaaagactaccagccgaatcctcctccttctatgacatccacccaacacacttctcctgcggagcttggcataaactcacaggctcctattatttcttctcagacacatccatctccttatccttcagcagggcccggctctgcggggtctaatcaaagttctcacatccggcatcttagtgcttctaatcaatcggtatcctcacctggttctgccttcggttcgatgcagattggaggagacagaaacaatcctaacgctccacgggctcataccggtcgagccgattggggagctccatcctctgctcctggacaaagcactggatccaatccgtcacctcacgggatgactccagaccactatagtcaagcatatgcaccttcgcctgcatatgccagtcaaaacacgcctccatctctagtcaccccgtcgtccttgagatcgtcagctcaagacccaaaagcgatcgccccgataaaacctcctgtacagaagggggagaacattgggatgggagaatttcctagtgatgacgggatgagagatcgttcgagctcgacctcaggaacagatcctacgctgacgccttcgaaaggggcgttcggaggcccgaaaggcatccagtcaaccatgaaggctacgttggaactacagagtgatcttggactgatggctatcggatggttcgtcccctcgggtctcttctttggccgtcatgctcgttctaaattgcaggtttttttatattttaaaatactacaggaatcatgcagagtggatcacccgtcggcgtctcgttcagttctggagaaggcaagaaagccgtgtcattcagtctaccttcagaccgatcagccaggcagactatgtcgacaattctatcgtgatcagttgcatttatagggatgataccaacgagtgctatgtgtgtcgagctttctttccgtctctgatcggagtatttatgcttgtcagagcgtctgactcttctttcatgtaaacaggtcacatcggtcgatacaatctatctgctcgaagccctcatcggtactcgattctcggttgaggagaagaaccggatcaggagaaacttggagggcctcaagccagagacaatctcgaagaacaagcctgcgactgaagagttcttcaaactcatcatgggacttccaaaaccaaaaccaagaaatattgagaaagacgtgcgtgcatccttctgaaatgttttgagaaggaaaggagagaagaaattatgatttatatccttatggaactcgttataacaatacaggtgaaagtcttcaaatggtcgcatatatccgatgcgttggttaagatcgttggaaaatacgtatgtgatctatttcgtatcgtcttccatggtcttttcgcccatcatgtgtcctgactgcttttcgatggcgtgccccttggtagtcggttgtctatgatatctcagctgtccagcaaactccggtaaatattgttcccggtccccttcgtcggcctccaatcgacggttcacagccaattttctctctctcttcagacaatgaagatctcaccgctatgccttccttcccatcaccaatgtctttctcaatgcagtcaacacctccgggttctcgctcagcagttcctccgcaatcggtccccagacgtccgtccgtgtttgcttcaacccttcaatctggaatacatcaattccatccacagggacaacctccgtcccaacaatcatcttcagccgcaccaatgatttcgaacgaatatgcgatgtctccttacactaactctccgttgactgatcctttcggtaccaccccatccttccaaccgggagctccttctccctctgtcgtgggttctactcggtcagaaggtcgatcgtcagacgcgacttcgctcggtttcgggttcgatgacttcttctcctcttcaggctctacagaggcttctatgccttcggggatgaccacaggtccaggcatgggaacgggcaccggcccgttctctagatcgttcggaagctctttttcaagtgaacggttcgtagtttcttccttctgtcgagggcgctgtttattctatcccctcggctctcctttcagccatcagtgatagcttactcgagatcgtttgattggctttatagacagatttgaagtatcttgaaatcccttttctgaaaagttcggcccggacaaatctaaggcgcaaaattttccgcttctggatctagataccttttcatattcgtttttttgcctgttcttttcaaaccatataatttattcgactgatcacctccaagccagaactttctcgcttatctgtacatcatcattggcttggggagatcaaagtcatacggactatcatccttcggatatttattttagacactggtactgggcccgccatgtaccatcttccggaaatgtaaacagatcatcaatgtatcttctagaccgacgaattgagaagaatagtcgtaatcgctcgctaaacaaaaacaaggttgaacaaggaaaaaaaaatctcaagagttgcctaatcaacaatccttatacccatgagccaatcgtcatcgtcaacatcagagaactcgtctccttgctcctctgaatgggtgtttgtttggatctttaaggctgacgaagggccagcagagtttggattcgaattcaacaggtcaaccggggtaagaagtgggtttggatgaggctctataaatatatattgaatgataatatatttgatagaatcatattcaatcaaaatgaatggtagataaaacaacagaagaagacaaaacaaatcaatacagtaagtatagagtgaaacagatgacgcatatgctctcaagcagaggacataggcagtcgataagggacgaggttgaagataaagaaatactgactcgtactttgaatgtctttagaacgcgatggattgttcaagtcagagagggctcctgacagaaaggccgggtgataatctccaaacgcttcgtggtcatcatcctcgccgtcgtcaatatccaggggcatattgcttgtctctctctctgctgctctgtgatattgaaattggatgtctcttgaatcatggtcagctaaatccttggagatgtcatcactagagactagctcagaagatatagatgatcctggatgaaacaagggcttattagagagccgattcacagcagaagtacggggaagaacgacggtaggtttacggtgacggttggtcaggttgataatctcctctgaatcttcttcctcaaggaggatattggccgaggacggtaacgatgattcgaatgagggcttgtatgcgagccgagcgatcttattacgagctctagaagaaaaggaatcctctcgattaaaaactcctggattgtcggttcccgcttcttctggtttcgacgctgacatatcgataggtagatccagacttgcaatacaaggaatcatgatagcatagtcaacatgatttatctatatgtagcgcggtacgtatagtagaaaggacatacaacttcctcttgactggatgcgtgactgcaagtggcgcttgttgagagggagcgcgacccgattcatgggatagttctggtaggaatcgaccagccgcttcagtctctgagaatccgaatgcagaatctacattatcctaggagatgcacagatgttgaaggatattatcaggaattgtaaaagagggatttccaggactgatagttaacactaacaaccttatcccagacctcagttctgttgccagagtttattgcagttgacttaacgacataatcttgagatgtccttgattcagtcgaagtggatacttttggcccggaagcagaattgcatctactggaaagttttctgggcactttgccctcacgacagctttaggtagcagttgaaggcgctatcgttagcaagcgattgatgaattgataactagctatgccaatatcttgctcaccaaagatgagcacatatagttttgtctttacacggatgggaacagctgcaaatattttggtttgaaagctatgagttaatggatatattagaatcgtaataactggacttactcttctcgatcagtcggcagtgttatgttcataatgatttcacgattaaacttccctgcagatgaaagttcaaaaatgttgtatcaaccattacgccatatcgttgcttacggcagcgtgaacaggtttcgtaccagggtctacttcagtatcatcatcggtatgcaatgtcgtgatatcaatggattggtctatttcttgaacagatgactcctctcgaggtcgagtgtcaggaacgggatattcctccatacgaacatcggggttgtatgtggcaaatgcgccgacacccgctgatgaatgacagacattgtcggccaagattggaaatatacagcaataccaaagaactgaagacacttaccaatctcattgccttgcaaagaaaacagttggaaaagtaagaatcaatcggccagttccgaggaagacatgaaagagacatacaagtgacgctgatagacacagactcgctgggcttgctgagcttcattgtgacgacgtacgactgaggcttcttgactagagacatcacacagtcttaggttcatacaaatcagagtgtttgacaactcatatcagacatacagttctttatcgcgctctaaaacatatcaagatgatcgatcagcatgatgaagattgcagcgtcagtactaacaagcaggaatctgatcgcacaatgcacgcacttttctaaaatcgacaagtatcatttcgctagtcacaaccaaagctgagatgctcagatacggtagaaaccccttcttcttggcagctgcctgagatgtaacggctaccgtaatctctacacgatcatgtgttgtcaggagaagagaaccatgctctatgaatgatgatgaattttagagatattcctgcgactcacctaagcatacctgcacaggctgccttcctttgaaagtctcaacagatatctcccttgataataagatatgtattgagtgaacaggaatcaagcaatattgataaattatataagaacgtactctatttcaagcgaaaaggtcggcagggctctgatttgattgacgatctaatatgaggtgatggtctatcctatcagcgtataataggatactattcgattaaatagtacaaagaagatgcttgcaaaacgatacagacctgagtaccaaatggaggttttctgttcatcaaccgctcgatacgatttggatcagctgcaagttctttgaaacttgtgattctgaatgtatttaatagattaactttgagtttacaaatggccaatttgttgaaaacgaaaagaaagacaaacttgttttgttgcagtatttttaaagctttttcaccaagctttttatttgatagtacaagtagaataagcgatcacaggtcaagcggtgctgcacacaaacgacacgagacgatggctcactttatcgatctgtttgaaaatgacgctaccgaaattctcccatgccttggagttggcagcacgtaatagctctaagccaaacttgacaatagaaccggaatttctctcgactccaacctgaacaatggtttgggtaattcgagatgcgctccggctagagattaatgatagacgtcaaagaggttgtgttaagtctgatatgaatcacatcaaattcgaagaaaaggcttacaatacggaaagagactgcatcaagatcggcgcatcaatcttgacttctgtgagagatctacgatttcaaagaaaaaagagtttaatgtatgaattgatacagttggttgtatgcgagagccttagacagaacataccctccgccacagatagtctatggtgtgaatgattgcgaggtcataagcacgctccaaagagaggacggtacaattggtatctacggattcagttacatacctgaaatagcacgaagatcttgtcccttgggtaaataattgaagatatgatccatatcagcgttctttcaaagcgaacatcaagtacagagtccgattaacggatggcgaccattacataccttgtactcttcatctctttagttggaaatctcatatgctcgcccttagccagagcacgataggctgttttttcatcatttctgagttttagatcatcaaatctatggaaatttgtaacataactatcagtgaatatcaatcttgatcatacaagaaaattagacagccacatactcctgagcatcgcaaagacattcaagaaggtcacggagagttactttgtctggtagcgcaacaatctttttcatctagacaaatgaggggtttcttaacaatcatcagaaccacagtgtttcaccaaggtttttactgggtgcaaacttcatgacgtacagttccaaaagaaatgttatgtttcgacatgaggtttcctgtgggagtaattaatatcttcgagtctggattgccctcttcctcaaatgtaactaaaccagccttttcgagattgtcgatggcgctcttatttatgaagaagatagtataagtcttgatgcaggttgagatcacattggtagatcactcacaacacagaacttatccagagcctcggtggcacttgaagactgctcgatgatatctttacctaagtttctcagatagtggcttgggttctgaaggatacgaagatacaggaacgagctgtgacagacatgtatgtcaatatcgatcttgctatatcaaaagcgataaatgacgctatgagaattcaccccttgatccaagtttgtgcagtagctcgagaagtaatggtagataaagcaatctcgctattgatgtgttcggtcagatgctatataaaacagtatatatcagcaacaagcacagtatgatgcatcgaaacacgaaacaactatgttgctttacctcatgaaggcttgattctaggatggtctttccgctggaaagctgctcgaactgttgaaatagaagcttgagcccatacattcgtctagagaaagggtcaatcactaaactcgcctttagttgggatgatgtatctgtcatgattaacgccagtccactagtatcaaattgtggacggccggcacggccgatcactgtcgtttgattcagaaaaggatgagtaggtaaaaaatctgcacattgatgtgaagatatgcgaagcagacccactctgcagcatatctagatcgctgtagtcgaccatcccttccccggagaacatcttggttcctaaaactaccacagtatgtgcagctatcaatcgggcacgaacaaagaaaccatcacagaagggagaatgagaccaaatcatgatatgtttatttcattttgacaggaaaagagagaggagaaaaaaagagtaagacagtatcacgtacgaagattaatgccaacagcgagtgttgaggtgcacacaatgaccttgatagctccagatagatatgatgcttcgacaagccgtctgtcgtcaagcttgaagaatgccaaaacaaacagtcggtcatcacaagaacaaggtgtaattggttgtgcaatcttaccaataagccgccatggtgaaaacatattcctttcggagctatctctgatcgtccaaacagcgcagatgaatgtatcgcatgcgcgacgttaatagacatagtatatatgcagaggcgcagaagagacgtactttgtagtcttgcattctggaatactcccaaaggactttgcagcctgctccagggcagtttatttcctcggtctgcctcctctccatactgcttggcaagctgatcggcgcaagacattgtagaaacccgagtaggacagaaaactaggattggtttaccctcagcatgaatagtgagcagttcaaacactttagtttcgagaaacttcgacaaggagaatagtagtcaatacatatatacttgaggatgaacatgtgtgtaggaactgcttactttagcgaagatgaagtgattggttgtgtccttcttcggatatgcgatgatcactttctttaacgggcacggtcgatactcatcatcgaactgagaaagaaggtctgttatgaagctcccagatcgaattgaagatgcaataagaagagatttaccttaaaaaccttcgctgtctgcgactgaactccgctattgatatcagagatctcagttcctgccataggacgcagccatcttccaacatcctcgacattgggaacctgtacagaaaacggacactttagcgggtcgagacatgtgtatcaatataagatgcattttgaacaggtttactgaccgtagcactaagcgcgaccacccgaactgaattcagagctttcattcgggacacaaccacttctaagacagctccacgtttctccctgaggatatgaacttcgtcgattagaagcagagactaaaatcaatagaagaacattagctatgatcatatacaaggcatgtctcggtcgatgatactgacaatgtgattggcgatcatagattcccgagcggatgctgtatttttcctatcagatatacggagaaacaagctaatatcaacatgtcagaagaagaatttttaaactgagagacaagtttaccatctggtcactgagtcccatttctcgggctatggaaaaacaaaccttagtggtcttagtgatatgtgaagaggacataagatcagtatggcttacagtagtaactatcacacgagcgttctgtacgcctttgaaagcttgtccgctcatatcggtatccccggtcaactcaacgcctgagagcaacatatctgttaggcttcaagggtcttctcttgtggaattggttcggcgaatggaaaaaagtcacagaagaacttacactggacacctataccagcgaactttttgttccaatcattggccttctcggaacatagagctttagtaggggctagatataccgccttgccgcttcctgttgtctcaagcagtcgtattatggctaattcaaagattacagtctttccacttccggttggtgctgatgtgaccaggtcagttctcactgactaattcatttgaagcatccagttggtccgataaagatttgcagagctcaccacatataaccaggttctcatcactgtgtagagtcgcttgcaagcagcgactttgaactcgattaaaagctccaaagcggaaccatgatcggtagcggtcggcttgatacaagaagaaggaacgtcagcagtaaaaacgcaaataactgtttggcagctataagcatggacttacgcagtgagctaacacagaccaggccatctaatgattggtttgctgcagtctcgtaagaacgcgaagagactgcctgctgatagtgattttgtttaattaggggcgatctacgatctgttaacccgatgaacggggtgtcatgacggtgcatatagctcaatatcgtatattcgagtggttccatatgaagtgagagttcgcgtaccagtggggcattgtctttgttgagacagaactattcgcagaccacagattagagatacgagatcagatctgtcaatgagatctaaatagagcatcccatcaaagaggaaggcctcatacctttatcatcgatattccaaagctctggatcatctggaaattctccttcaaactcatcgatttcagcaggtcgcccgtatgttggatttcgctcggatcgtatagggacacggattgccgtgcttcttgcttgtgatggctgtggagaaagttgcataaggtgagagtgggtatatgcgctatgattatctgagacaagacgaagagagctgtgatttgtgctagcatggcgggcagagagcttgttatcatgtaaggattgatatgcatcttggtcaggagaagatggattataaatgattcctaaatataatatgacatagactgtcttgttagaaacaaatcgtagagaatacacttgaaagactgaaaaaggtagataccagtgctttgaccatgttcattatactcagcagggatgtattcgttatgctgacgttgagagtacttatgcgctgaaccaaaggcattttctgattctagaaacgctccggagtacctgtactcccctatatacccctccgcatgactatatgcgctagatgttgagtggaaaggccgagaatcttggtaagaggattgagatggggcctttgtatgttgctgaaagcttgaatgttgagcaacagagctagcacgttcttgagcaaaccgcaactgagagtaagatgtgatgaagcaaagtatcttgtcttcagcgatccttgcttgcagaaaacttaagagaaggtggcaagaaagacattaactgcaagacgagcagacctacctccagagcttcaaaagtgaagtcatcatcgctaaaagattgcattacacaaagattgtcaagcaagagaagttggacacaagatctcagttaatgggaagtgtgatcagtatggtatgggagtggtgagcttgatcaagcgaagtaagtgagaaggttagttgacaggaaacgcagcaatattgtgatcaagtgtcttattgatgttccaagcaatcagggctgttcaatgatcagtcttcctcttcttcctgtgtgacagcaaaagaaacaaaatgatatgcagaaagagcagttgataggagaaaaaaaatacaagtataaaaatgtgagcgaatgatctaaacagttacgattgtaaggaggatgggttggaatcaaaatttcaaaccggtacaaagcaggtgatgagatttcttcgaaacgaaagaaatcctgaatgtactttaattcccgatgtgtgttggcaggagcatccgtggtaaccatctaaatgtatcagttggtgatttgtatcactcaaaaaccaataggaactgctaaaaaccttctagtttccttccattcgagatttagtatcgtctctctcctcctcagtaattctatcgatccaggaatgaatagctttctcaagcatttgttcccagcccggggctcgttttgccaccatctggtgatcgaaaaagatcgattcaggagtaggattgacagcattcgattggattagaggaacaaggtagcgaagtttgatggctctgagctcaagaagagtgtgtatagatcacaaggagacaaaagtcagattgcggttgccgaaaaagatgccttaaggactgacgctgcaaagttccccatgttctgaaccctgcgaaagagatactccttcctgtgcttgaccaggccatcactttgtcgacggctaatcgtgcctccgcttctttcaatggctacagtatcgatcaagaaaggttccagttgattgcgctctcgctccccgataacgtcgtgaatctcgttgtcaggaataaatccccaaggtttccgagatcggcggacagcgaaattgtgggcatagcaaagaagctgcccatcggtgagatcgttcaggaagtcaggtagaggcgatgtcaaaggaggtatataagtggccagataggggggcaaatgatacgataacagcgagtgaagtcggactgtaaccaagagtgttgtaagccgataaacgtatttatgtcctatagtcgacgcttgactgtagactcaccgatgatatctttttcactgtttaaccactcttcatcggcttcgtctccttctgcgtgcgagaaatctcggatgctcgggtcagtctcaatgttttctttgtcttcctcatttattcttggtctgccaatttcagttgtggtccgtattctcggcgcgccgcccagtctccgtttccttctgcctttgtccaccatatcgctatcccatcctcggttatttacgcgccctccaccaaataacacgtcgtctactagtgacaggtagtcttctacggctttccgagcatcttgtagaggttgagaagatgccaaagtgacatctgactggtagagatgcccgagccggtcctcccaagacaacttttcggttgttttttctgaaatctccaaatcatctggatgaacgtctagatcttcagagaaagaacttctcaaacacgggagagaggtcgcggaagggatggtgagagatttggtcgtctccggtccgagagggtgaagtgtcaggactggctcggaattgtcttcatccactgcttcatctagaagtcgatacctctcctcgataagacgaagcgcaccaagaacgttgagggctgattttcttatacgactcacaggatcgactggagttgggtggagagatgaaggagccgaactaattcgtgtagacggtctagcatagttgattggcgcaggacgagatggagtagataagtagttggtttgcacagcgaaggaaggagaaaagacagctccagtatacgaagttgggatcgatagaggaacagatctagacgggaacgcttcctcgggtatcgttaccactgagatatgttttaagcaagagggcatgataaggcacgttgtatgagtttgcgggaaggtggaaaacatcgaaattgaaaacaaagaactcaccatagttgcgaacacttctgactgctgtgatagtcgttctcaacagcttcaatatatctatttgttgttcttctgcccgctctgctacactaaatactcgttctactagctttaagtccctcaccacctccggcctgagcgattcagggtcgacattgatgactggttgaggagggaatggcgcccgaactgttgagcttcgtactggagaaggaggtaaggtatcgagactgatctgtggcagtctacgagaaaatccattgagaaagccaggaccgctcttctctatgtccccatacttggcctttgtgccttcagcaatggttttatctgatgctaagctaactttcgtaaagtgatgctgtaaagactcaatggatcctagagcggtgactgaatcacgccttctggcggattggctgaacacctgtctacctttcttgccagcatcaatagagggatatatcttgagcggtcgaggaagccgatcaaggccgaaaggaggagtggatagtggagcctgaatgcttgtcgcaacacaagattcttctactgtggggcaggctggtagagcggaagagaccggtgatgagggtgagagtgaagagactgaactgctgttgaccggcgactcagactcttggtaggaaagcggaatactcatttgggatcggggttctagtctacaaagatgtacctttattcaggcgaaggcaaggacatacagaaaaacaaagaagaaagaccgtaaaccgtccgaagaaggacgcttgggcgctgtgacgaaacctagaaagagctacagtcaactactctgtaacatcatatccatcactcgagccaatacctctaatactccttcgataagcgacacacgttctctctctctgtttgccagaatatttcggctcgtttgcattcaacgcttctagcagatacacttccggacaggcagatacatattctgtaaatatgacgtccaaatacagtacatccaaccctttcgacgacgggttagtcttcgcactagtatcatcgtgtgctgattgccaagctgactaaatgacttgaatgtacctctcagagatgaagatgcaccttgggggctaccctctccaggagtcctccctcccggagatggggatttgatccaaaacgctttgaagaaggaaaaactcgtcaggcaagaattcatctctgttctatgttcttttacacatctcctactgacctcatatctttctaatgaaattatatagcgaggttgtcgctcagcaagaaggtcttagaggtgtgtcttgaactttaccttgtttcgtatgacgctgctccttgtgttatatggccctgtattctgatctgtgtctttcttctttatgcccttgatcagcccttgttgctaagatcaagaccgttcaggccgagacggacaagctggccaaggaaaacgccgttcttgaccagtatatcgctaatcttgccaaacgataggtatattgttcgatctgacagtatctcgagagatgtatggagtcttggcttgcgaagatgtgtaaaaaaaaaatacccttatataatgataccctacctactacagcattgttaatgatactcgtcaagtgtcatcaaggccaagagagataagattggtttgagggcgtatgttctgagcagagaactttgacttgttctctgtttacataaccaaattgttcaaaagacatagcagctttgtcagaaacgaatattggatcaacgatcatcaccatctgtgtgcccctctgtcttctttcctctctgtcctgctcctctccgttttttctaggcgtacactctgctatgaccgacatggcgtactttcatgaacaagtttataacgtaataacttttcttgaggacatctctctttgtgaaacatcagtatcacaatcttatctcatgttctctggctgcgagttgatcgatagattgttcgaatgatccctttcgcgaaggtgacctcttacaaacatgttgctaccttggcaggtcaccctcgtcactccagagcggtaggacaaggtttgtgcgactcgcttttcagtatgttggggaagagataacagtcttttaatcgagatcatgatattattcgttctagctctcaaattcgtgcaggatccatcgataccttggtaggttttgatcatcttcctgcattgttgattccgcccggcttgacttgtcttgtcttgttctcttgcctgcacggcaggcaaagagtgattgcctcgagcggtacgatttctttcagaggtgatgacggcgggggagccgtccggcagcgagaggccttggaatcagaaggagtcgtagtgacggccgtgccggcaaacgttgcacttggaggaggcaaggtttcgttcagcgagtttggctggttcccagagagtgtagatatacctgaatgagtcgtatggatgcttagcatctactgatataacaaaggcacagactagagcaacaacgacgacaggagggatgatgagcatctcttcgacattaaagggcgaaagttcaacatccatcgcaagtaagcattcctttgtcttgtgcgattctacatctgaattaaagctcatgctatcaagagaagaaacgagaggacaacggacacgatagaagaccaactgttcttttatcgcagggcctgaaagggaaagaaggttaagccgcgtcaggcgctggacctgaaaagaaaggggcggcgggtgatgacgcacacaatggatgaaactcgcgcggaacgtgcgtccatccgagcgagtttcatcctttgtttcgttcgcctttgtagtttctctgtgtttcttgtttatcctaattcgcttctctttgctttttgctctgcttttcgatctttctcttattggccttccgtcagggtttctctgtttggatcagacgctcacaccaacatcgtgtatacatattacacatactcttttgcgctcgttcatttgaagcatgctgctcactcgattcagacgtcacgtcctcgttctcatacctatagccatcattttgtgttagttcctctttcagatcgatcagtcgttacgtccatcagggtgaagcttcattgggatcttcttacttctgatttcccatgttttcatctttcccaacaggcttgaccttctttcttccgcctctacatctcgacctggtcttgccaagcttcatcggcataaatagccaccgtcccaaaatccccttaatctatcaggcactagtccaccagctagatgagtctcgtttggcggacaacctgattcttgagaagcctgcagtgagtttgagggcagacgggagggttgtcagcaaggattgcgaagcgcttgggtggcagtcgctcgaagctcatgatgtcggggaggtgtgggatgcattcgtatttgtgggtacattgcctgaaacatatatctgcctgtgacatgttcgtctgcaggtagctggccacttacacagtccggatgattggtatcgggatcatgtactgtacagacgggcaatatatacatgctcgaactcaggctagcagagatgtttgattcggtcaacatgttctttgtatgtttttctcgatcatctactcttcgagaacccttctgaatttgactcatcctgtcgcttgaaatcaacgcattcggtctcagatcgttgatatgtgagatctcacgagcattttgtgttgtcgtcatcttgtcagttctaatacttgctttgataccaccctgggttggccctgaatcgatcaatcctttcaggtccccacattcgatacttccctccagaccttccgtcatctctctccctccaggactgaacgaatatgctggaaagcttacgatctctcatctgccttcaaccgcatccttagaggaagcttgggatgagttgacgaatatgttggacggacatgccaaacttcgagaaggccagaggaaggaacttaagaaggggctggaaataggagagacagtaccagagggtaggccgaatgttctgatgggaggggctgatactatactcagatcacaggtcgcgcacatcgtgagacaatgtaaacctgaccaggatggaggttttagacttggggtcgggccttatgtgagtatgccctctctcgatctcagatctgccgcgtttcgagcgcgcataaagaaaggatatgagtggacaacaagtatagatttagctgacaggtatacttggacttgcttgttcggcgccctgaacatcatctgaatgaatagatttactcatttgaacaccctctggtaagtttgtctttgtgttcccttccacgctttccaatgaacatgtcttacagattagactgattccaactgaaaccatattccgttttttaaaacagcaaattgaatcacactacaactctctagcgatctcttgggagcgacacaagtcaaagtatggcttcggattcaactcgactagctcacagagaaacatggaacttctaaaagattcaggatgggaatgcgtcggatgctaccccaagattgagaactatgtagcccttctcgaacatggttcgcactctcttctcctataccgcctttatctgatatctattgatgtaagcaatgatatcaacgaacagaggtcgcggacaactcccatcagattcctgaagcgaggatgaaaaagagcaaggagcgcatacaacatgcgctttgcactggacaagatatcttcaagttccttccaggatctacatacgtcagttgcctatcttcctatcttattctcttcagatcaaatggttttgttgagctgattttatactgtcggtctatgtctcttttgcccttctgcagtggaactctgcactctcgttacttcccccaagctcattgcgctcgactttgaatcttccacaacaccttatgaaagaacggaaacgtctgtcatggcttctccccgaaggatgtgagcgggacctcggagttgttaatttataatcttggcatctgggtttcctgctccttctgtctgccctgctttgttcttatttgtttcagtctcatcatccatatagatatacattgtatcgctcgctaacaagttttcatctctttctgtgcaacctcgcatttgctctctcctgttccgtgcttctcttgctacgtgtcatattctcttcgcgctttcccgagtcccatcgatgtagcctgaataaggaagataaatgagtatatacccaagaaaaatgaacaaacccaggcatcaatcgttcatatctttattcaaacattttatcggatttttctttcctctttccaccgtcagccggacatttatcatatcctggctcagaaggacatcactatgagtagagatgttagaatatcctgagctttgtacgccgcccaagctcttgaactcaaatcaagcgaaaacagaggcttgtgctaaaactccaggaggtggacgggttcgcgcgcacgggcagggagagatatggatggaacgcaaaaaaaaggtatcggcaggatgatccaattaatggatagcgggttaggatagacgagaaggtgactgagtaaggtatgagtggaagatactgggtaaacagaatctatattgatcattccacaatggtcttcggatcgaaatggttcttttccagctatcagataattaagagaggtggatgttagcaccaagtcatgcattgatggaaacataagatgaggcgaaagcgtacctcgatatttaagccttcctctatactctcgatttctccagtcttgacgaccaaatgtgtagcatctaaatcagcgataataaattgatcttgggccggcaacttctcgttctggaagagcagaatctgcttgatcgcctcatcactgtcaatgattgggcaaaaaaaagagaacgaagagaggttgaatgagtgtagacataagagtatatgacgttcaagacggtatcgacaaaccatgtgatcaatgtggctatcgaatacaagagcgagattagcttcaacggtgtcggagtgtgggctgtatggtatctaaaaatgcatacctttggtcactatggccatgctggatggttcgttgcggatagagatacagatgggttcactttcgtcgtcatatgctccgatcacttctcacgtgtctcgtattgtattttgctagctgtgcaaccacaatctcagctgaatggccttgtctcgaatgaatgttggctgagaaacatacccagcgtgatctggtagatgatgctccagctgagataatacacttgtctaccatcaatctgatgaagatggtgatcactattcaatgatgtgcgggagatgggagtttagctatatcatgttttctttttctcctctgtcttctcttcttgcaaaatccctcttttgtgggttttgttgttctaattattgagatagaagacgtggaaggaaacctctaaggactgactgtccgaccgttcaccatgcttcgtgcaaacacaagcagcgccgaaacgaaaggaacaggactgtatgaacatgagtgcctgttctgatatgtcacgtgatttacctgccaaaatgcatagagctctgcgctgttgaattttttcaacacccgttgcctctccaaatgcatagcatcgtccccgccctgcccccgccgggtttcgatttttggccttgtccagagagtatcagaagaggtctccttctttgtcttttcatcgtgtaactccacaaaggtatgtctcctccatatgatcagtcctcattccgcatggatatcggacagcagcacaagcacggctgccatggaacacaatacatgaaattccagtagattggatgaatggacgaaagaaagctgacagaacatacggaaatatttgctgttcttttctcgctttctcttttttttctactctctttctttcctccacccctcacagatgcagatcttcgtcaagacccttacagggaagaccatcaccctcgaggtggagtcttcggacaccatcgacaacgtcaaggccaaggttcgtaaaccttcttcgtcttgagaacagagggagaaacgagccgagtttaggcagtgtggtttctgggaaggattggagaaatggtttaaaaaatactgaagaactcaagaccaaacagtcgagtagaacgtgaggcaggaatgaggggatggatctcatggatcaaccaacggtgaacagaatggttccagggtaccagatggctgacgatgtatctgactttcttttcccttcccttcctgattgctccatcccctcattcgatcgttttctgcggttatcccattctcgatcttcctatcattttcttgctcgactggtgttctcaatcccgacaaattcttacacgacccctgtgtattgccgtcaatattctcgaatcgacttatcttgctgtcgctccgacgtgcccacccatcgataaatccttgctacactccttaatactttattgcaatcttcgatatcccctcatcaaaacaccatggctctcattcccaaatacagattcaggacaaggagggaattccccctgatcagcagcgactcatcttcgccggaaagcagcttgaggacggacgaaccctttcggactacaacatccagaagggttagctgcttttcccttcgttattcagacttttgttctgccaaaaagtagattccgtactcattttttttacgtcgtggttcttcagagtccactcttcacttggttctccgactccgaggaggaatcattgagccttccttgaaggttcttgcttccaagaccaactgtgacaaggtttctactctccttgattccttcctgttcttgatcgttttctctttgttcttttgagtaacaatgtcttaacacttcgtgtcgtgcttttcgtgtttaacagcaaatctgccgaaagtgtgagtggatgcctttccaagttcacgttctgctgttcgaaactgacctagtctatttgatgtaatataggctacgctcgacttcccccccgagctaccaactgccgaaagcgatcctgcggacactcctcccagctccgacccaagaagaagctcaagtagtggttttcttgctattattgcatatggagatgtttcgttcaggtcaaatatccccaagataatgactttacttttttaaaggaagagcaaatgttttggaatgtgtttttgatttcttttttcattgacagtcatgttcagtatccgatcttgagttgatgatacacttagccacattgaagtaactaaactaggcttggtctggttcagaatgagctttgagtacctgtataggttgaactgaatgagtacctttagagtatgcaagtaatctttcattgattgttgaggtattcctcgtctgcctcacttgacacaagcacactctcatcgaccaatcgttcatcctcctcactcatccccatttcagcatcctctctagccgccgtttcctcagccgtctcatcatcgtccacgctgtcattatcatcaccgtcgacagtgatgtcaattccttcatctcctggaatgtccgtcccaccaggcagtttgttttccggtcgacctctcttctccttctttgcctttttatgtgattcgaccatctttcggataggcatgactttcgtgagagctttctcccagtctttgaactcgacccatgaggttaggatgtcaaacacctagacaagcagaaagaagaattaacagatcgtggtgacctcatctttagtcgatagacacaccattgacagaggcgaacaatgactgaaaagttgagaaaccgctctgacctgattaacggtgagaactttgcgcgtaggcatgctagctagataagtcccgatcggaagacgagctgttcgaatacccaatcgagtggctttatccaaacaaagattctaaatgaaggtaagaacgcagagagtgtcaggaaagcgagacggatcaactcaatagcagagagaagggcggtaagattcaaaagtcgacaaaccttgtatcggtttcgatcgacaatcccaccgatcacatacgttgtgccctcttcgagcgcatcaatctcgttctctgaatcagccgtcaggtaaacaacgtcttcttttctcgcgctcgatcgtccgaaggcaacatctcccaagggaacaaagtcctcggctttctcgtttggcggtagccatagtcgatcgagttcttgtccgtcccaccattcggtaccggaccatctgttcctagagttatcgaaatgagctttgtaaagtctctcggacagacgaccatcaagatgggtgaagagtagcgagttgaaaggcgtgtgagaaacggtatggatgttgtagaggtagctgatctgggtggacattgattttatctcctgaagagcatcaagtttgatatagtgagggatgatagtaccaagcgtgtacgaagcatagagaaacatagagttagtcgccgtgtttaaacccatattgcaaccgggaaagggcagctgtcagtagatttagggaacagattcagaaaggactaaccgtatcaatcataagctcgtcaaacccaagatcaaccacaacccgaccgttccaccaaccctccctctgatcctccggtaaggtcagtccttttctaaactttgctttcctactcttggtctccttctgccgggtaagctttctttgtaattcgagtgaggcttcctcggatccttgtccagactcttctttaagcctggtcatcctctccttcttcttgatcttttcacgggcgcgcagctccatctttttagcctggaaatttgcattcttggctgcacgcttgagggaccgtttggacggagctggtacatcagcctcggaggccaaagctgaggccgggtcagtgatcgcttgatcagagctctgagcgtcagcgttggtggctagctgtaaatttgtggtggcgtgattcactgttggatttaacagaggactactcataacgggagaggtaggagactgggttgaagccaaagacggagtagtagcggtggtggtcgtcgtcgtcgtcgtcttcttcggatttattgagtgaacgaagcgagtcaatgcaaaccgtctgcagtataagcgggctatgggacgactgtatgaattagaccgttaatcaggttaagaacgaacagactagaggccctatatccctactagctctctctgtttcctcgccaaacaaacagataacgctcacgatacgaaagagctagagagaatgatgttcatcgactcttagttgtttctcgattctgactctgaaatgttgagaaacttgatgtcgttagggttacgccaaagttacacgccagtttttctacgtcacctccttctcccaagctatcaccatctcttccaccaagcaccatctacatctgttgaccattactcatgccttccctattcactccccagacgtttggaactatccaccccctgtctcagactcagctccagatcaggttggatccttcgtctccacaggtctatcatccaggttctgtgctcaaaggacaggtcgctctcatcgcccccaataaagaaggcgtccgagatgtcaaacatcgtttccaagtcggccgactcactatcagatcattctgggaagccagaaaaactagtgaaaatgctccggtggaagagccttggcagagaggaggagagactcaagttagtctagtagatgaaccggaacaggctttgctcatgcctgggattggcaacgaactagaagtcacttgggatttcgaggtacgcctttcttcttcttcttccagtctccaatcgagataggctctgtctgtatatcagaaggaaaattaccctggatagactaacaagctgacttgtacgaacgatatttgaatcatacgtttggtgattttaacttcacctttcttgatatagttcactcttccggagaagtccagcccaactcactctcactttctccctgatgcgccttccggcaaaggaaaagctcctgtgacgactgctagctcaattgtctccccaccgtcgtttcattctacagagtatcaaataaaccatattctggaggcttaccttgccttcaacgaagttccgtctgctggacctctacttgatgagcgggcgttcaatgttgccggagagatggacttggtcgagcgaatcgtataccccttccagaacagcgacaacatagaagatggaagagtatgtgagtgtaatgagtctgttaaggactcggagggaaagccgttaggcgttctggctatcactgtgcgttgtgtctcctcgtccttcactctacccatggtttgacattacatgcatcccgccctgacgaccatactcttctcaacacattcgaaaataatatcagatccaacttccatcccagtccatctcgacgaccacttcgaccatctctctagagtcctcatttaagttttcagccgagaaagccaagctaaactcaacgccagaaaagcctaaagaaagtcacctgaaagggctgtttggacttggcaaaggtaaagacaagaagaaggaggaagaagccactatcgctgcctcagcacaacaagctcatccagcagagcaggctttcggaatcgatcagatcggaggagaactggtcgtcaagactactggagagcaggacgtgagctctcgggttttgccttttgtataaccaatgtgaaagaggctgtgctagagggtaagcaattgaccaaatgtttttttatttaattttttttaaatccctagcttcatgttccactatcaccctcaatcctcaacatctcgtctcaccatcctgtcctcgctcgaggtctctcttctactcttcacttcgatctggcctatcctctctcgactgccgatcaaggtccgctcgttggatcattccatactgacctggtctcccgctccgtgagtcggcttttctcttgagaatgtcgactgatgtgctcatcgtccgatcttctttatgaacgtttcttcctctttatgcaatccagttctctctaaacctgcaccttaagacaacctactctgccacccctcttccgtctatcctgatttctttcctggcccctttgacttcttctgtggcctcttactcggatattcctccaccctcaattgacggtcctccctaccagagcaatgcgctcccgcccggtttcgacgaggccatggccggtcatgctcagccagctagggcaaacattgagccacctagcttcggatatgccaccaatgagagtggaatgaacacaccgggcgcgggagatctgcctccaggctatgattaactggttgcgaagcttctgcgtcttgtgtacaagggaattaaaaaaagtctgatacagtgccattttgtagagtagatgaagatattataaataaaaggaagttgttcgcgtaagagtgagagagcaagttgacgggagaaagaggtgtttatatgcaagcctgaatgtgtgtgaggataggaaaaccagacccagacaaagaaagtcgtggtgaaagaaaatcaacaactggcgcgagacgcgcgacgcgtcctatcattaaaccaccaacgactttccgctttcttttccgtccgatccatccttatttcgtttcgtttatcggattcgctaccaaaatttcaggaaagcataatgtcatcaccggaagcagggccttctactcctcgtagaccgacaaatcctcctcgaagagccccaagaccggcggccgcggccgctcctaatcccgttggacgaccgcgaggaggaccaccgagaggtagaggtgagcgctactttagtctttctcctcttcatccattcatgtaatatgctgccatttttctatttgagtgagagtaaaatgggtggacgaacaccagacaagagagagagtggggtggaatgaggttatgggtcagatgatgaatggatggatagatgaaaccggatgggtaggaaggtagggaaagatgggtagatccatgagacaacattcagtcgttctgatggacagatcgcctggtgactcttaaatattctaccgattgaggagaatgagatgtcagattcgattagtagatgagaatggatcgcatggaatcagacgagcgattggggcaaaggagtgttcggatcagggactgatatctagaaaggatagggaaatcgaagggcgaggctccctccctccgaggatgagttgactctggacgactcggattatacgtgtatttttgtgatcaacaaactaaccactaccaatcatcgttcttctcttccgtgactatcgcatggaatctcacgttgacgtcgacagtaggagggacagccaaacctcatcggtatcgaccgggtacggtcgcattgcgcgagattcgaaagtatcaacggtcgacagaactccttatacagaaacttcccttctcacgtgtagttagtctccttctctctccttactatccgcttgtgcctttctttcagaagacagtcgctcctcacccatgaatgtcctcaggtcagatcaagtataatcctgatgtcactcttcttttttttctctcccctcttcaacaaaggtccgagaagttgctatggattactcgacaatagacgcagaagatggctcggtcgtgaccatgcgttggcaaacatccgctttacaggccttacaagaagcaacagaggcttacctcgttcatctgtttgaagacgcgtatgtgtctctcttgctttgttcctcttaatctcttcaatttctcgtatcctctactccttttacaagaataaaggagaaaaggatacagatcaaaagcgcctctctcactttctcccaccggaccaagcttcacgtcgctcacgtcactcattccgttccttctctttctcaaatgcatcttgattcttcttggatcgaccgacgacatataggaacttgtgcgcgattcatgctaaacgagtgacgctaatgcagaaagatatccaactggccaggcggattcggggaccttggggtggactcggttgatgttccttcccctcttctcctttttcttctttcctctttctcttctttcctgcgttcattatctcgtagtaattttctctagtgttctccttgggctgatttagaacctcacgttttctatcctgtttctttgtactcaatctaaatcatccttccttgtcttttgtcttttgtcttttatcttcttattcttctcttgatctctcattatttcccccgggtcggtcagacgaacctgaaaattccttactcttccttgtgtcaaatgccgttcgcaactttccaaaaggaagaaagaaacacatcaaagtgagtgcgagattagtggatagctggaagtctcgaaaagatcgaacagattgagtacgaagcgaaaggatgttacaaagtgttatagatagtggttaacgagtgaattgagcccgattagatatgagcgtaagaggtggatatcggaggagaatgagctcctccgatatatgatgtgcatgtggtcaccttcctctcgatcgaaaaaaaaagagaaagaagaagaaaaaatagctcctttgcatcctgtaggccaatccagtacaataggaaaagaaatggagaaaatcgaaccccgaaataaagatgtcggtgaaggttgcaataaaaagagacaggagcaaagtcctatgatcacgaaagaaggagagaagaagagcaaaggaaggtatatgtgtaggccgccgtggacctccacgcaagatttcaagaaagataaacaacaagaagtataaggtataacatacagaacacactcaagaaagataaatatgaacaaggtccatcaaagacaagagagagactgtcgatgagaaacaatgaaagaaagtgacatacacaaagacagaatcgagatagattatatatgattgggttaaatagaccgagaggaggtgtcttcaagagtccactgaagaggaggattgagcgtgggtccgtatcctcgacatcggcctactctcaggatctccgtgatctccaaccgatccaactgatccaaccgactttgccgtgttctttcgttttagatttggcctccctcctggccctacagacgccgacttgctcatctcattggatgggtccgatccgttgttagcgagccccggaggcatgtccagaaagttcggattcgtcggactccgaggcgttggtggtggaggcagaaaattctcatccatagaaacctggggtgtaacggaatgctgttggtgttgaccatggggatgaggatactgatggggatgctgactgtactgaggtggtggattgttgaaaggaagttttgagaaatgctgagaaggcgttctggataccagtcggccgggtgtcaagaccgacgagccggatggaacgtcactaccggttgctgagggaggtgatggggtaaaggatgaggattgaggtaacatatgagaggcccggattcgatcggccagctgtttgagcccatctgaagaacgtttccagatgatgggggtttgatatccacaaaacagagaagttagaacggtgatcgtttaggacattaaaacaagctcaatagaagggagggaagaaagtctacgaacccttcggtcccaggttttccgatttgcagaaagacatgagcgggcccatctgcacgacctgttccgaaatctaccgtttttcatgaccgatgcaacgtccagaccgttattcatgacaccgagagaagaaacaagagaagaaaagtgaatagaggaatgggacgaacctctaggcatctcatcatactcagtgaaattccaaactcgttcacgattggaccaggcatcgagtaactttcgccgacaaactccatctctggcgggcttaagtctgccgagtttaccttgggtgtggctgcctccaggccggattcattgaccttttctcctgttactttgctcggtccacctggcccagtgcctgagccgaatcccactgatttctggttctcccctgtcttggcactctcatcttccttcccttctaacgcttttgattcctttgacgtcgatgtcgtcgaagtggatcctgccgacgcggacgtcgcgtcttcctttgcgtcgattgtatcaaccgaccccgctcctgttcctccgtcttcgtcggtctctgtctttccggaatttggtcctgacgctaccggtgtaggagtttgacctggcgtgggcgcctgcgggttgaaccctgactgagttgaatcgtcattggatcctgctccagaagctgccgctgccgctgccactgcagtcactgctgctgctgccgccgtcgacgtggtcgatgttgatgaagcgattgaatctggtccggacgcaagcttgttcgcgattccaccgttcggattggcccatgtatctatggataatcttggtcgatagatcgggaactttcgtatggacgatcgggcgatatactctgtaaagtcgagcgcgttgaaggatatcctgctcaataacaaagagccagagccaccgccgccgatgtttccttctgccgactcgccatggggcgtgtagatgaggacagctttgagtgagccggtggtgacgacttgggtgccatcataatacacatatgtgatagatgctcgggatacatcgacagtgatcgtccggaagccatgctgcgctgagaagactgtccgggactctcgagggttctcaagattaagagtgatagctcgacagctattttggtaagcgacgaggaagtaccgggggagcacagatgtcggaagatctatgaaacaaggggattgggggtcatcgtatcaagaacaaaagatatctagtatgcacgcagaggagtgatacatgcgacaaatcagacgaaccaaattctttaacttcaccggtgaacgtattgcgaaacgattgatgaacgatgccttcttcgatgaaatatgtatccacatggtccttccagtacgcgtactccctcctctagatccgtccatagacaaggtcaggtgatcatgatcagcaaagacgcgatttgggatgacagtcccctgtctatagggtcgttgatgatggaagattgtgagactcaccctttctccatctgcaaacccagaaaagtactggagtagccgcaagatggcagctccatgaggaggttccgtcctcgctctactccccataaacagataagatgaacggagccagtacgcctatgtcagcatcccagttttctcctctttctgtatggtcagatgatagaacaaggcgacagaaggaagaaacgaagaagagagacagaaagataacacaagacggatggatggacgcacaatattgaactgccggctcccttctgagacggatgtgacctgaccaacgttggtcctcccggaaccattacaggttggatcccctgaaccaatctttgttgctgctgctgctgttgatgaggacctctcaatacctggatgagtccgggctgatggattccaatggagggcgaggccgcgtgtggttgtgcctgctggcgggcaaagccaaccacgttcaagccgggagtcaccactgtcgacggtgtctgtacttccaagactccgatctctgaatgggatcctggccctccctggatggaaggcgagtaaatcgaactggttgagaggggtctatgggctgaaggtgacatgtgagcgttcgacatcggagacatgtgctgagacggcggttgcggttgcggcggctgacggtgagccgtttgtgggtggacaggatgagggcccattcctgggttatgaggagttccatgagggacaggccctagttgggcatgatgggtcggattcgaagatggaggtgggtatggagcttgtggatagggacctccattcgtgcccaatggatttcccaccacgatcatttggggccgaccggacggagcgtatgatccgggagatgtttggtgttggcttggattcccgtttgttcgagccatttgctgatcccgagcggcctgaaaagctgctgctgctgctgctgcttgttgttgttgttgttgttgttgttgttgttgctgttgctgttgctgttgctgttgctgttgtgagagagggtatggatgctgctgctgtggctgcccttgtggtcttgagatatttggattcgatagagataactgttgctgttctcccagggttcgaccaagatactgctgcccctttccgaccatcgggtttgacggcggttggtgctgatgctgaggagaatacggaatgttcccgttcgagtaaccatatgcttgttcctgcgagacttgtgatgcatgctgtggttgttgcggtggtggtgctggtgctggtagttgtccagtcgacatgaccctccggccattcggttgaggttgggcagactgttgttgagacggaggaagactactctgaggcccggatggtcgagaaggaccggatctcggaccaccactgccgccgccgccactactactgccacctgcactgacgctcgacacgaggggaccggtttgagagcctgaaggatatggtgaaaaaggcgagtgttgttgttgttgttgctgctgctgctgataagtagaaagtcctggttgcatgtagcttggaggtgatgtctgaattgtcagagacatgcaactttattctcctacttcttcttcttcttcttcttcttttttcttctctctctcttctttctatcagtttctccagaccaagacggatgcagtggatgacagaatgaatgtgcagacagagagcgaaagagaaagaatagggttggatggagatgaaccttggtgtctctttgacggactatgggacacttggagagagggaaaaaagaaaaaagataatgctcgcttccttttttccaatgtcgatctctcgtttcccgcccgtcggctcaatgtccgttttcgttcgaatatcgtcaccggactctcttcattcgttttcctcctctccttccgttttttttctccgtggaaggatccatattcagaggaaaatatcaaaaagtacaggatgataattaggacgctcacaaacatatagctatagcaatcgggaaggatcaagaggaagggaaaagaggaggaaacgaaaagaagaaaagaagagaagattactaagcaatatcattcgtggcggcaaatggaccggaccgcacaagggatgacaacaggattcgaggcggagagaagaaccccgaagataagaattatacagtgaagggggagaaatagagaatataaagaacgtatgtctattcaacagaaccgaatcccaaattgaagaaaaaggaaaagaaaggaacatgaggagactccatcttctagtctgaatagaaacacagatcaaactgtgtttgtacatgtgtgtatatatagatgagtgtgtgtgtatgtagtgatgtcaaagacaagaagaattgtgcgtcagaattctgtagtttttctgtcctcgtggaagactcgatcaagaagagaacctcgactgacaatcatcgcttgactccgaggaatcgcagaaggcccgtccctcatggcaacttgtaatagtttgttcaaattatgcgcgaccagataacactcggacaagcgtgcaaatgtatccctgaattgtggttgtattgtttgtttgtttgtattcattttcaataagaaagatacgcaagtccacaagttcatgtaccgttgtcagaccagaaacacccgacagtgagaaaagagagaagaaaaaggaaaaagagaaacatacgagatgtcttggatctgccggtgtagctgggctgcaagctcaacatcggtcatatccattacggctgcgaaccgaagaagcacctgagcggccagaaagtaggagtctgtcaaagggagagtgagagtgagagagaagaagagcaagtcgggtcaggcttctcccgtcaaggatgaaccacaagaagggaagccccgagggagaacgaacggagacagtacgaaggcatgatagtcgggcgcaagacagcagccgataaacaactctgagagatcgactgagcggcagccagacaagcctttcgctgggcgttcgatgatccttggtcgagatgaacgtagtagagaagtagtcgggcactacatacgagaaagaagaagaaaagggcattcactcaatattctccctctgtttcgctagctattgacgccaacaatgaggaagaaatgagagaaaggaggaagagaagaaaacgcactgttcggctagaatcttcccaccaagtaattcgcccatcccccgattgtcactccactgatgttcggggtcagtagaatctaattcgcccaacgccttgacccacgcgtccacatctagctccaaccgacggaacacatccagctgagccggctcggtcaacagagtcccattcggcgaagcaggcgggatcggtggccaaagtgtccggttgaacgagtcgacctttgcaacgaggagggacgaatatacacttatctgaagcaccgtccgggtcatctgacgcgaccacgcaagtcaagaaggagggcgcatgatgagaaggcgggagaacaagggagaatgaagaatccatagcaacacaattgtgaacgatcaaaactaacctctttcagattctgaccgcatgtaaagttgaggtaaacgctcgaacctcgagcggtagaatacgaatgaacgaagagagcgaatcgagcgagctcggctgttcggatccgttcttcccgaatttcttcattctccggcggaggcaagacgtcgacggtgtattctggaagactatagtgcgagcgagggacctacatgggaacaaagtacaggaaacaaacgcagtcaatcggtcagaaactacaggagcctcgaaggcagaccggaaggagaaacacctcgagccgagagggctatagacagaagggaactgactagaccgaagagatcagcccaatgggtggcaagcggagcaaacatatgaaactattggcaagtgagaaagagaaatcgtttggttacaactgttctttcgtttccagaaagcttcacagtgagattcgtctatacctgcgcccagcatccattctgatggtagtacgctgcaagcatgatcgcagctaagatgacaaagcagaaaatatccagcgtatctttgtcagctactcagacgcatatcgactgcactatggacgagtttatccttttctttttttccttttttctttcttcctccaaaggacataccttgggtacaatccaaagcgtaacgttctctttttcttgcgtccgtgtccttgttgggtgtatctgacgtatggaacctacaatacgtcaacgccctcccggccgctgtaatccagccttcggcctctttgtacttggatttgctagtcctgtgggcgaatccacagactgcaagcaccaagcttgggtgcatcgacagaggatcccagggcggaagacgagctcgatgaagaagggagagtccaacttctgattccagggtcgtccgtgagcgaaacggagggtaaagatcagccatcaacgcagtactcgacatgaccagtcggacactgcggatgtgccaaggtaacagagagcaaggaaaggaggctatggtgagacaggttcatgatgttgagaacggacggcaggcgatggctgatacttacgaatgctcgatcacctcaactccgccaactctgtgaatagcctcctcgagagtgaactttggtgacatgccatcgagcagcatgaactcaaaaaggtcgctcggatgctcgtgtttgaacagaccttcttgatgaagactaatgaacggataatgaaggtgctggttcgggacagagcgtggtaacggttggagcgcaggcaataatggtggaaggattgtctttggggatttaagggcatatggccggcgttgagagctcccggccgaagatggatatggttcaaaccaagaaggatgatgagtcgagtatggttgatgagtaaacgaagggagggaagaatgtgggtaacctgtcggaggcggcggtgggtggtggtcgtgttcagaacgggaggcattgcccgacatgatcgacaagctcggtaggtgcatcacttttgattgggatgtttgattcggattcaatcgtgccaagctttgttcgagaagcgaaagcttccgtctgagctccactggaatgtgaaggaggttttatatttaatcatcatcatcgacgacagaacaagaaaatgagtgaaaaggttctcgggcgcagcgatgccggcgaagaacggatgaacgaatgaaacaaacaagataaagaaatatatattcttacgattttcctgttcgagctgtctgtgctccctagtctcgttcggttcgtctttcgatgtgtggttggctggaccgagagaggaagaggaggtagaagatacctcggtagctttcgactttgaattgctcatgtctttcgattcctttttccgagacgtcgcagtcggcggtgtgatcgctcgcttgaatggtccttccagatggtcatacgtgcacagctggtggatttcgtttggatctggcacaggcacaccctctggcaagtttgccagataggatgcttgtactttttcgcatggagaacagatcggtcgtttgctatcacacttgagttttcgcctgagctcgggattaggtcaaacccagagatagggagcatgagcggatgagacggatggcatgaatgatcgtttgcataaatagcacgtacctccgacatcgctgttttccaagtcaatgtgtggttcaggccatagtgaaggtgtatgaaataaagaggcgatcagctgagccggagttcagggcgacacgacaaccagacagagaggaaggatctcatgaaatgacagacgtccagatacaattacagataacggaaacacacgatgcgagaacgcggagaagtaacagaacatgaactcacatgacaggcaaagtttcttctcaacgctattctttctccttttggcttctcaaccaaagaaagatctttgtcagaaccgatgtcgtcgatgctcgtacgggcgctacttaacaactggctggccgcggaagaaagggacgtttgatcggccgatccaaagtgctctgcgaatgacggataagaataagatgatgaggacgacgatgacgaacgaggactcattgcgagtatgtatatatatgtgtgtatgtgtgcgtgtgtgtgtgtatctgtctgtgtaagagagaaggagagaattgccaggagtagaagagagtagcgagaggcgagagagatgggaggaaggcggtttgggccgacaaagacacaaaggctggcaggcagacaactgaagcttgctagctatcgacagactctattctgagatacaccgcacgcagaatagatggggaacgagaggttgacctccaagcgaagaaaagaaagccgtcaaaccgaggaaagtcgaagcgataagactgaagacaagccggaagaacgagaaggaagggaagagaagaacagaaagtgaaagagaaaaaaaacgaagagaggacgtcgagagacttggccgaaaggaatccggatggccggctgatgaaagcaagaaagaatagaaatgagaaaaagaataatgacgagatcatacaaagtaaaagggaagaaaacgaaatcaaaaaagagcgagaagacacggagaaacgagcgaacgagtggacgaacgggtggagagtggaagccgtttgataccggcgatctcgccgagcgccaaaagtatgccaggcagcgagatgttattgaccgacctccgttatccggtccggttgaacgaggaacgaaactttgtttgagggtatcagactgcggtcaggccattcgggatttatgttggtcgttttaaaatttgtagccgttctggtttttctcctctcgtgctctcggcacggatatttggcggattctgtcaggggcggaagctgggccggtcatgggaaggttacatgtcgtgtaaccacacaagggctcttaggtatcaggaagagaagttcaagctctcgaggctgggtaataggatttatagagccaataggattaagtactgaagatgaagcataggggaacatatgcagaggaacaagggaacagaaccaaggatacggaaacatggaagggtagaaatagaagtaacgaagaactcaagatcagaattcccatctagaggggatggagaatgcccgtcttatatatgggtcttggacactatgaacatgatgttatagagcgctgaaagtacagcgtgttgagaccacagtgcactggaagtatagtgcgccatgaataggatgcgctgaaaacaggatgcgctgaaagtatgggaggcaggagtagtagaaatcagaggtctataggtctccgcttgcgagcgaagtgtaactcgggttacatccctaacagatctcgccggataatatccgaagaaaaagaccgtggccgcgcccaaacatataaggtttttcattttttttttgatccgaggacgcagttttctttctatatgacgattctcttcaattttataccttttaaccctaacttatcgcgcttagctatccgattagcggcgaatttccctctgtccaacagacggagagagacaagctcaaaccttaaactccaccaagccatactcacacatacatacaaacaaataaacaaacaaaatatacatgctgaggcttgggctaacgaaaaaactccataagattggttgtttcatctgaattattatcacgtagagtccaaatgaattgagtcttttagaaacatcatccaacaccaacaggccatcgagacatatatctacacaagataaatactatttatacacacgcactcacacgcacccactcactcagaatattaaaaccacgcgacacacgcgcatatagcttgtacaacggatgtaatgacagatgaacaagagggatcccatgtgtaggcatccacacggtgctatctccctctactgatttcatttttcctttctcttggcaaacagaggcagaagtagaaatgaaagaacaaggggcgtagaagaaaaaagaggagaagagaaagaaaaagagcttaataaatcaatcaatcttgggaaaaaaactcgtaatcttttcgggcttcacggccaggttatcctgaatgacagcgttgcctcttgttatcgtagtatccgccgcctttgccgatttcttttttcctttcgatccttttgatgaattcggctacgtccgaacataaaacaaatcccgtccggattaaccgtcgattatctttatgatgatggaaagaagacgaagaaagaacagaacgaatatataggatctcaccttaatgacaacatcctgtatatctccgtcgcctttctcctgctcctgctcctcatcatcatccaagacgatcacctcatcatcctctttcttcaggacaacagtctttgaatctctctcatccagaagatcttctcccgcctttcgtttctcagagcgaatggcatctgtaggttccttctttatcctttcaagaggcgatacccgatcgacccggtccgtttcttgctttcgaaagaaagactcgatcccatcttttcgttcggacaccggacggatgaacgaaggatcttggtttcccactttgcctacttcaacagggaccggatagctaaatgcgaatccgaaaagagtaaaagaaatcccctcaacggaaaaccccgcgcgaagtgaaccaaactgtaaacatagagcaaaaagaaagaagcaagagcgaaggcaaagacagaacagaggcaaggaaacctaccaggctagatcgctttcgttccttccaaatggtttgagcaacacgcccaacgaaccatcccacttgctctgcccaatgtttgatccgggctcacaagccaaccagctgtttatctcttcatctgtccgaagaagacatggcattcttgtatgaagaaatgccaatcggggagacgaccgggttgtaagaatggtgaatgtttgaaagggagtgtccgaaccggtgaatatgcattcgtcccatagaccagcaagcatcaacattgggggctcttcatctgcgccggagccgtggtctgtcttaatgtctgccttggaatcagttggttgtcttccttctttaggagacggtgatggatttcgggtgtagtacggcgctttcgagcctgtgcctctgcctcctttgttgagccattcgtaaaaactatcaaatgatcacctgctcattggtcagtcggttatctgcagaagaaggaaaacgaagatagaggaggcctgaaagaggctacaaaagcgaggagagagcgcaaagaaacaaaggacgaaagcagaaacaagaacaggacagaacgatgaagatcacaataacatcacgtacccttggacaggaataacacatcgtttcgaaggagcgagcgacatccagagggccgaacgttcgctggagtcactattgttgatccattcgttcgcacacacacacacacacacatatatgttattttatgaatttatgcacaaacaataactcagccaacatcagcaactgattgaacccggtatcaagaacaagctctggggaaagtagcgtgagagaaagagaaggaccgacatgagggtctcacttctggcgttgatggtcttcagaccgtcggcataactaggttgttgtttcgtccagtgaggtactatgccccagttctagttaagcagtatagatcgttcatccagttcggcccaaattgtcgagtagaaacaataaatggatgataaccggaggaagaaaaaaacgtggtccgaggaagtcagagaagagataccgttcaggcgtttaggcgttgggtgttcaaatagaaataataacgtaaagttagttcgggcgagaaaagaaacaataacaaacacaaaaataaacaaaatagaatgagagagagttaaatataattagtcgaccggacaaaccatgactttgagcacgtttgaaccggactctctacggattacagtggcatctgaccgaggcggcacgttgtatctttgtatcatgtataaacgtagatctcacttgtcaaacctctccggactatgaacatttgtctgagagactgaggtgatggcgacaagatctcactcaccttggttggacgcggtcttgttcagtttctgttccccatcgattctgcatgaaacagtcaacaagttgcgattaacaaagatatacaatgtattcaaacagaaccaaagcaaaaccaaagtaaaacaagaacaaagtgagaagaactcagtaaaaggagaagaaagaacagatgatcccaacgagtgatcatcaaggatgttcgagccgagtagggatcgatagagttgataattatatagttagtaagattttagtttccagtttttctcttagttgcttcttcatatactctgctctatctttttctccttgtttccatttttcttctcgcactttatgttttgatacaaacgacgccaagatagaaaagcacctgtctgggaacaaacgtacgatgtctagagaaggatagtgtctttggaaatgagggatatactctgatggctatttagcatatagattatttgttatcaattacgtcgataccatttcatgatcgacaacggagaagacgcgtcgtcattgtcagtctctatagaattgaattcttcttagataatgaaagcaagacaaaaagtaagaagaacttgcagctagtgcctgagcgaatcggccacacatcaggagaaccgaaacggaggatggtgggggctctttgtcaatcggaggaaaaagccagagaaaggacagagaatgggtagatgaggagaaaagagagtcgagaacattcgggacgtcccgaagtcttatgtgaagacgatctttaacatggcgggtaaactaggatatataagggggtgacgaaatggcttgatcggccgctgcgcttcgtttcacgagacattccttcctctttcccttagggacgggccaggcttccctcttgccgattcacacgccgggtcaccttcagggcggcactcagacatcatcgcgcggaaagggctttgggagggacaggagcagggcaccgagcggatcatcaaattcagcgatcgatcactctatgatttcaaacactgttccctttccttcacatatactgcagagttctctcctctcgttccgcccatggcctccagccgcacgagcgatttccgctcggacccagtttgcgtgttcccgatgatgcggcttctttcttcgtagctcttcggtctttaaaacgaatatagcattcattttttaatcccttctgtttcacttggcctcctttccttcttcccatcctcatatcttgaacttgccttcagcactgtgatctagctctttatttccttcaacacttcccgttcggtcgactcgttctttacccactatacttctctcggctcattcattctggcgtttgcgatttcattcgtctcgctcggtctctcttgaaatcgtttttagggatactcttaaagaaatcagaagaaaggatattttcatttgaacttgtgttctttgccttcttctcttcatccaccaccacctcattcttatctctgttgtgttcccatgtcgaaggattcctcccacgctctcttgtcgcctccaatgactcctccagccatccccaatcagaaccaacctccgttgacc

SEQ ID NO: 1040 - DNA, 376 bp, Xanthophyllomyces dendrorhous
gatcagcccggcggtgggcatcctcttacccgtcacacccacaaagctcccaacacaccggatgtctctcatctcgattttacagattcgttcttttccggtaatcccagagcctttcctcagtctccccagcgaacgaaccgacagtcggacgatgaaggttcggacgatgcgctcgttttgatgccctcaaggaaacactcgttcaaggcgacttcgcccgcgggacaaaccaagtcccaggcgacgtacttcaccccggccagtcctaacaaggactttgggccgttcagtttcgcggaaaaaaagcgtaccgagagacttggttctgaactggttagtttttcattcttcgagtgcttttttaaaataaaat

SEQ ID NO: 1041 - DNA, 14761 bp, Xanthophyllomyces dendrorhous
catgactattgttgatcatcggttatgtatcccaacctcatagccgctatcgatggcaggtcatttcagtcgaaaccaccgaacgccgttttcaacattcatctctagaaaatacaggaggatccttctcgttgccgccgtcatctttgcgtttatgtacgtatcatatttccttccttggcaaaacattggcgatggcgcctttgatgtatctattcacgcctgacactcttcttccctacagctttgtcttccgagctcatcaggcgtctaactcgtctcgaacgatcttacctctccgaattccgttctccgagaggaccaggctagctccgatatcggccgcagcgttacggaagagaccaggatcggaggcaaatagatccaagcagtcgcagcagcagtcaaccaacgagaagtacatctggaagaagaatgaagagctcgccggtctcatcgaggtgtgtatcttatagggttctccctttctgtgtgtcgtatctctagcatcgactgatagagatcatcctcgcatgtttcatagtaccttgcctcagcaccgacggagcatgccttgcccccaagtgttgataggacggtcgatgccgagttggttcttgattttgaccccctcctaacggctgatccggaccgagcgatgagagagatggtggagaccgtatggcgggaacgagtagtagtgttgctcggtaaaggctacggaaaccctcgaacgaaggctatccaggcgacactccaagacatgaacgtcatccctgctcctgtcgtcatcgaggtcgaccgacgaggtgtgtcttgctttcatataactagcccaaccaacatcgcctgaccccgttttgtgcacccttttctccttctcctttttacagccgactctgaccagttagtcccggtgttgtcccggttggtagacacctctatcgacgagttcccagtcctcctcgttggtggcaagatgatgcacagagccgattttgaagagagtcgacttcgaacgttgatctccaacgccggtggttctttccgagccgtcaagaagaagaagggcaagaagtaatggtcttcattccctttgcctttttctttgcccttctgttttcttccttcttgctctctcttcattcttctagtggtgcttgccgtatctctccttcttatttcggatttcttttcaatctaaacaattccattcaatcattcccgtcttgctttcaccttctctatcttcctgttctggatctatttgtttgcttttcttttcgacgttatctgctctatagatgttgactttgctcgaagtcgttctccttctcatctcgcgtttgttgtcttcctgttccttcatctctctccctttcgaccccatcttttttccatatctatctttggaatcaattcattccatgttgttccatcttgatattcagtatatctctttattctgttctgttctgttcttgattcgtccttttgttcttcaaggttcaacgtgaaggacatcaatatagaatcgcaaatgcaaacaacgacaaacaaaaagacgtggacaaaagaaagagaaaagagagaacaaagatgagggtgacgagagcgagaaggagaggctgaaagggaggggacgaagacgtgactaagcagggatgatgctgatgatgaaagagaggtaaacaaaaggaaggaagcgagaagagttgaggaggcgacgcaactctttaactaattggaggagggaaggaaatggaagcaaaggaaagaagagaaggaaaggacagaaagtaagaggatgaatcgattggtgaaccgttcaagcaaggatatacaatgtaccactgatcaacagagaaatcactattaaaatcaaatagaaggaaatttggggatcaagggattttttccgagaatattcgtctttttttttcgtcacccttgtgttccttacttctcttactcttgctgtttttccttcaaatcgtatcagacgagtcctctgctcaaaactcgaaaagaagcgaaggaacaaagaactggaccaggaaaaaaagacccagaatagcaatattttaggaaacacacgcccaagctcatagtgtcagaactgagcgaacccgactcaacttcaggagaagtctcgacgtcaacgacaatcaacccgttcggcctgcctcttcttactcgaccacctcctctgtatcgcggggtgttcactcatcctacccagacgatcccggccggtcagacgatcgaggtgtcaccggtgctcgtgcttgaacctgatgaatgggagaaccatggaagaaagacagtgctagatcattacgcgtttgtttggggtaggacaggcaggatggctgtcgcgcttggcctgggtgagtctctgacaactttttctttctacataaggatccgaacggagagagccaaacggacttgaaccacggagaaagtgtaagaaaaacaaaaacggataaacgccgctgagaacctcaccatgacgtttatctccttcatttttgtcttctctctaggctcgctgtttaaccactcccctacgccgaacgtgtccttcattcgttcgatggaatcgtccaccattcgatacatcacctgtgtaagtctattctctcattccctcacatttgttttgcacgtgaaggaaccaagttgctgacaagacctgtggagaccttgctttggtttgaaaatatacttccgtgtctttattcatgtaagaaaacgatcccaccatcgaccgagctgactataaactatggcccagaagatgcgctctggtttgagccagtgtattcgtctgaatcatcaccaccgtcttcttccgattgtacaaattctatagagcgcaaagagggcgggggaagagtacggggtcgagtgtaggttcgccaaaagacgaattcctcgcgttcctatccataggagaggagcaggaggaggagcgtcggcagcagcagggtggacaacagaagtgcgctagatgatgcagtcaacgagtcaacgagtcaacgagtcaacgacaaaaaagcttaatcatcctatacccttcatcttatacgcacgtacgtacatacatagacacacatgtacgcacaccttatacattgttaagcataaaacacggatcatctccgatcggaagtatccgaccagctcggcatgtttgtctgcagatcgagagcggtccggtttcgagcgaacacagtgtctccattggggatgagctctcttcactctctgctacttcagactttgctggggagagcagagggaaagggacaaggcacagaacggacatggggcggacgagcggttaaaccgtaaccaagaatgcaagacgctggttacataggcacataaggtatgcatacattatcagctgaccggtaggactcctcgactgtacgcttagagaagaggatagttgaaaaaacgatatttaaataatcttttgggcatgacacattcaggtccgtttttgccggccctaacgcacccaaccgggcccggaccgattctctcacttgaagaggtcatccgggcagacgacaatgcgcagatcgtgtgggccacactctccacagggcctggaacgttggctatggttacgacccaagcaaccagagacctatgcgtatcattcgggttgacgccatctctatgtgtgtctccgagcttgtcccttctcgctttctcttgctcacaccgctttctgccttactcctctcactcccttgtttccatcttgtgttcctttgtagccttcttgtctttctttaccccttcggccttttctctgctctcctgccttccatcatctcgaaagtccttcgtttacaacgctcgcatattacatatcaacaaacgctctgttcattagtcggtcatataatcctattcttaaaaagtaaggataagagaaggaacagaaagagaaaggagagcaggaacactcaagagaacatacgaggttacatactcatattcgtcgatcgtcgatctattcatcgcttgaagcatggtgagtgtctgtgtcgacctctaaccctttttccagttccacccacctgactttgctcgcccatacccagacctcgacctcgacctcaattcttgcccagctgctgttcaagcacaagcaaaagacatcgaaatctctggacctgtcgtccacaccgacggtcatattgtcacccaccgctgcctcgacatcatcttctctctcctcggtcactactagtcctccttcgacctggaggaggcctggtcggatggactaccgtagggaatctgaagacgaaaaccgaagagggcggtcaggtgaagttaaacttctccgattcgcttttgtaagttctcagaacagtctttacttcactttttctccttgtctgtggttatatgcgccgtgaagtttctccgagttacccatcttatcatagattgaacaatttcctcctttttcgtttcctctttctttccttgtattcctccctgtaccccctcccacttgtctacgctcgttcgtgctcgctcacgattgctgcttgctcagccgacagcagaacaaccaacgaggcttcgatcatcatccctcgttcactacgatcaaccaattgttcctcagtcaacacccgcttcctcccggacctctcaggaacaattccgaatagagatcgtccccgtatcgggctcgccttcacccgcgcctacacccgtgtgcgcttcacctctctacccaatatctccccttctaccggagagtttgccagaaatcgatgatcaccatcatcaaccggccacacactcttacaggtactcgtcgacatcgtccagagattcctgcacctcagcatcgtctactagtcttctcgaacgagacgacctgtttgattctggggacgatcagatggattatctcatggaggtagacgaagactctcggatggacattgaggaatccaacttgagtgtgtctcctactctttgtcatctcaacctgccctcgtactcatttgctaatcctacccgtccacctatcaaacagactttgacccttctactgcatataccaaaaagagcgctctgcccgagctcaaagatacacacgccggattgctaagatctcctcagagtagaccgaccgaaaagaatcagctcaggcgagtctcatggtggacccattcgtagtcttttccttctctgtcttgtgtgacttatgcattcctctctacaagttccttcctttcttcgctccttgttccatattgccgtctgtacaacatttcctttctcttgcatccgtctcgacaacccccatttgctgtctcgtcgtgttctgaacattctttacctttcttttattgtcatctgtcacccccttcatccatcacccgaggctcacttgtgttgtaatcgtaacacaaatccatctctgctcatgttttgtatttacttccccaccgctctgttgctcaaccaccttttgtacagagttatgcaatctttgtttgtcgtttcttcaattgtatggtcacattggtagatgaacatgatgcatttggatctgctgatctggggggtgggaagaatgccggtatataattcacacgcaagatttcactgattttcagcggtgcttgttgaatttcaggaaaccgtcctcttgctgttaattcgtctgtccctgcctatcagttgtttctctcactttcttaatccttcatcctttacacatccttagacagacggaccgtgaagccaagaagttcagaagggaagacaaaccggacaagaatccgcagagaagagatcaagaacatcaattgcaatagggacaacaggaattttaaccaaaaacaatgtcgttcttttcgcctgttagatcggtctcgagaagggtctttgggaatcgtacgtacactatcttcatcatgactgctctgtttctcttcttctattctctctgttctctttccgttcagtacggcttgggaagagaaagagcttcagcatttctggttgaatggaatctagaactttgggtgcgattgtacagacgctaacttttcatccttctcctttttcttttttctattctttttctttcctctcggaacgacaaaaaacctctttcaaaccccaaaaacactcgaacgcgattcaaacgaatacggttataacgaaacagagattcagctagccagacaggttcatgcatccgcatctatctccgcccaatcgacgaacccttccttacctgtagactcaaacaacacccgaccttccaacaccaatgccagtgtcggttctccttcaggggtgaacgctgagccggtagtaggaaatgagacggatacgatcatatcggatagtctggatggggcggtctctggggacagaccggctggttctcaacaacaggggcagagacagaaggaggaggatctgccagaatggcaagtcaagagagcaggacagtatgaggatcgagagatctgtgagattcctttctttctttcttctttcctttgtttgcatttcatcttgttcctatagctgattctctattcctccctctctttggcaaaataaaaataaaaacaaaaaacaaataagataaaacaatgagatcgtttggttctttccagacggattcgacctggcacccgacccattcactttccaaaccgatcaccgcgtatcaagctacggtttcccaccttgtcgccgccgggactcatatgggacactcacctcatctaaccagaccgtcctaccaatcctatctcgccggcagacgatctgggatagatatcattaatctcgagcacacattgccttcgctgagaaaagcttgtggtgtagtaagagatatcgctagggatgacggagtgatcgtctttgtaggcaagaaaaagattacgaaaggggcggtcataaaggcggtagagaggatgccgggggttgctcacgcggtcaccgaacgttggagacctggaacattgacaaacgctcattctatgtaagtttcgccgcctttgtttctgcttttgcgtctggtgataaagacttattgggtttcttcctatattttctttcccttctgcctaaagcttcggagcggaatcagttatctctggagcatacctaccagatctgatcgtcgtgctcgatccgagaaacatggttcatatcattaatgaagccaacaacaagaacatccctaccttgggtgagtttgggattagctaaggaagttgaacgcgaagaaagacaaaatgaactaactcgggccaactgacaaattccgggactcgccgaactattcttttgaatccacttaggtctggtcgattcggatgtggaccctcgattggtgacaattccgatatacacaaacattgacgttcgtatcttttcaccctttatttttttcctctttcttttcatttctcacttgtatacaggcatatctaaaaacacccatgttataacttgttttgtttgggtttagtcggcccgatcgatagaactcatcttgggcgctcttggccgagcaggtcaagatggtatcaaagaacgtaacggagagaagccaggatcaaggttcttgttgccccatcatcgattccaggccaagatcgataggaagcgagaattcgataatgtggagcagccaatcgattgggatcaataaactcctcaagtgtcggtcttctccttcgcgagtgggcaagttgactggttctaagaatgtgagattgtgggaagtagaaaaggaaacagaggtggattataatgcattggtttccatcctttttttccaaaaaatctggatctttgtcctgtctcctttggtgtttggtcgagggactcttctcttaagcgtcgagaaggggaacagagaggatagttgctgttgatacacccattatacatacattttgtgtgagaaaaaagaaaaggggaagggatgtgggaaaaagtataagggaggaaagggagacctctgaaggattgcaacctttcgaggacatctaaaagtccatgtctcccatgtagcccacttcctgtacgcccgacggcccgtttccccagccgcccacatcgtacgctccagcttgaccaaccagacttgctgagctaacaccaccaccactaccgacacccatactaccacctgcgccgatagttccaccagttctaacctccaagtccaccctggccttctcggccttcagctgttccttcaccttcgtcacggtagcgagaagggaggtgcacgcctgacgaagggcgacgacaggcgtagaccgagctgtcgtttgaatcttgagcagaaagtaaggctcgagtggatggggaactttgtaacctgcaaacagcacttccgagtttgccagcagttgtcttttttttttttcggtttgaacgcatttttgagtggccgtatccggttgtgagtgtgattcagagggaaagacaaagaagaaaaaaagaaggattggtgaggtctagaatcggacgcgaaaaagaagaacgacgcaccctcgaatcatattagccagagtgtggtcctgcttagtgatcctcaccgtcgctgcattcgggatctttgtgtcttccgtcacgtccagactgattcagagcaagcgagagaaagatgacgacaaggagagcaaagaaagaagagcgagacagaggatcagtatcaggtctggaagaaaggattggaaacaattagaaacaaccagcgtaagaatgatacatacagacgttcaccatcttctgtactcaaccaccagtgctccgtcctgttcggtgtgtttgtttcgttggctgaaacggcaggcatggctggtctatgagagatctcgttggtgcgtgttggaagatggatggacggagagggaaccaaaggtagaagagttgagcacgaggtttggccttaatcaatacttaatcaaatcaaataaattcaagtatccatcttgttgcctcgaccaatctcgtttggtttaaacgtctaaccttctcctacaaacattcttgaaccttacactttgtctcttcctcatcattcagcatggctcaccttcgatcctgtaagttctgggtattagatgaggtactgtgtggatgtatgagtgtttatgttcttgttttcgttcttgtgtggatactaccggggtaattatctggcccattccatctctcgcttctagtagccgctgctcctctaggccgttcagccatccctttcaaaccaatcagcctatcccaagtgagtctctctgattttactactacatagatgtccgataacagtttgggagagagaacaaacgctgatgctctcgttcacatcattttgcatcgatcgcgttgtctccggggccccctcctttattgctcatcgcttctcacctctgccctcctgccaaaatatagagaggtatcttcgatgtgatcgttaagaaaaattctggaaaggtttgttgattctagttcgattgtcctacttgccaaatttcgccttgggtcttccagaagcgacccacatgtttccttcttttatctattcatcgggagatggccgatccgacaaggtccgtaggaaaccgatgttctgacgtctctttttacccatctttcgtcctcagcccatcatccgatatggaaccggaggtcgctcgtcagtatctggccatacggctacagtattcggagcttctggatttttgggacgatacgttgtctccaagctgggtatgccatttcctacctcgcccgaagggaactacagctcatcacgacaatcatctcttccttttgcatcctcttctttggtccgtttcactttatagcgaaggctggtactcaggtcatcgttccttatcgtgatgctgatgaagtacgctttctccgagttactggcgatctcggtcagatcgtcccgatggtacaactttccgtcctgtctcttgcgtttgcgtcaatgtactaaaagtatacgtttctaaccggatatcactacacctatgcggttttgtgcaaacaggagtgggatattcgaaagcctcaccaaattgaagaatgtctcagacattctgacgtggtgtacaacttggtcggcagagactgggagaccaggtttgttcgggtcatccgtagttttatgctggattgaacttgagagccggatgttggggctcattcgtttttcgcattgttttcgagcaggaacaataaatttgacgatatctttgccactgggccaggagagatcgctcgaattgctaaagagaacaacgtcgatcgattcattcatgtctcgcatctgaacgctgatcttaattctccttccagcttttatcgggtgcgtgttttcaagtaacctccaggagtacaacttgatctcttatctctgttaagtgtgcccttgaatcatcttctaggctaaagccaaaggagaactcttagtcagagaggctttcccggatgcgactatcgtccgaccgtctggcgttttcgggttcgaggatcgtctactcaaccaggctgcacgtgagtgttcggtcatataacatccacatgcggcttggaagaaccactggtttatatttgtcaactctttctttttctctcaggatggcctttcctttggtgccaaaatggtggaaagactcagattcggccggtccatgtatgtgattcttctcttgtctgtttggattaccgaagatggttggtgtagctgatcctttttcatacctcagttcaccaacctgtctcatgcactagtgaacctgatggatgccgaccactcgtcccctggtttgacactcagtctgcctgggcccaagacgtacactaatggccaactacttgaaaccattcgaacgttcaccctcaagaacccatcgctccttgaggtctcccttcccaaggctccgcttcagtttgtggccggaatcacgaacagggtactatggtggccgttcatggacagagataagatcgagcgagcgtacatcaacgacttgacggatgctgatatccgaatagccaagcagggtttgagcgcggccgacagttggagggtttgcgggttcgagcttgatcagctagatacaattgaggagcatgcaattaagtatctgaggatataccgaccctagtaagtcttcacttctgtatcatcactcaataaggttgctcctccttttattgacgcggtttgatggggtcacccgtttcctcttcgctcctacagtgacagggttgttgaaccttcgaccgttggatccgtctacaagaaccaaaagaacaaggcctacaaagtcatcgagtaaaagaagctttgatcttgcatcgtctacttttttctttccccctcgtgtgccactatattttctgccttgttgttttttcttttcttttcttttctttccaattcttcccaaccatcttgttgttcttcttttcaccgttgtcatcttctactgttccttgttgtcttttttccccttctgttcagacaatccttctttctcttcccttgtgttggttgtaaaagttgttgagatgcgatgtttcccttgtatgctccggtgactaaccaccgacgttctacatgaagcttctcgaaagaaaaagagggatcttgattttgatcaatctttggaaagatctaccatctactctccaaagaatctgcatcgcccaacgaataggaatgtccggccgatacgttgatctcccccgacatgactttttccaatcagacgaaacgttctcgctctcgatctacgtgaagaacttgaagccggaggatgtgtctgttgcgttcagagagcgatccgttcgtttttgagcttcctcttccccttgacgcgtcatgcttgttcgacaaagaaggaaaagactgatatctcaaacgtctctttttttcttttgaatggatatgttgggggcgaaaggactgatttagatcaagttgattcttggaaaggacacgtacgatttaaacccgctctcacatgggatcgaccctgaacggtcgagcttcagagttgtgtccgtcaaggtcgaattgacgttggcaaagctcgataagggagtcagatggttggatttagtaggtgacgaagctgtcactcgtacgtccatcttccttttgttgggaccctgctcgtcggtgcttgaagtgaggaaacaattgtctgtatagctgactggttacttgatttgggatcctgggaatataccaaaacgggacatgaatagacatgtcggcaagtaaaccgaacgagcgatcgtcgagtgtcaaccctgcaaacaagccgaagaaggattggtcaagagtcgtcgacgaagagatggagagtttgaagaaagcagacggcgccactgttcgtgctttctcttcttctttgattggatctactttctggaggtctccccaatttgactgatacaaaatctgacctggcacacatttactgaaaacaggaagagtcagacgtgaacgaactctttaggagcatatatgctaatgcggatgaagattcaagaaaggcaatgatcaaatccatgcaggagagtgggggtacggtgtttcctttttcccttttcctctctttcttgtgttccaaagctgagcgcgcgattgtgtttcaaatccttacaataaccgacccgcatacgtatacgcacacaggaacaacgctctcgacaaactggaaagatataggatcaaagaagaccatggtcacgcctccagaagggatgatcgctaaaaagtgggagcagtaaatggggtgatcccagagcctgagctgtggattgtgaggatatgtatgagatttcattggtatcgttcgtgcgctccttctcaagttgagattaaagttcagagtgaaaggagaggtaggaaagctagatagcagggcacaaggggcagaaagaaagatatgaagtacatgcgatgatacagttgatgtacaatgaagcaacccaactcgacccgacctgagctgacctaacccctgggttgacattactaagggtgttctcattccgactcttcatcttcttcatcctcaccttcgccttcttcactagaggccatcgctcgagcggcctctgtctgcttcttggactttttcccaccccggcctgtcttctggtctggcccgccgctgctttctactgggtccggcacggtctgattcaagaatcgtattcgacgcaagggtatgtcagaaccaggaagtgaatgaagaaagtaacgaccgggaaggagagagatgtgttgagaaggagatgcagagacgaacggaagcagtatcgaccaggaaatcaaacatgggcgagttcatgattgtccgttttctagcaggcccaaacccccaggatcgatgaaaacagaaggagaatgaggacccaagtgtaaggaaaaggaaaaggtgttcagtcagagaagaatgccgacaaaacaggaaagatgaaagaagagcaaggagaggaggttgaaaaggacagacagatggtagggcatgagtttctttcctttcgtcttggaagcttcttccgacgcggcagagacaagggaagccatgaaaagttcgagcgcctttgctgttgttcgaaaggagagagcccgggcattaaaaaaataagtaagaacgatagacatacgtgcatacgacgagagcatagaaggccttacacactagaacaggcgtggccatagcaaccttgccgacgtcctcatctgtctgcatgatcttttttatcctggcctgaaggagaaagagacgagccgaggtcagcaagacaagctcgaggcgtaggtgagtacaaaggagaagaggagagaaccaaccaccggaaactagaggaaagaagagaaagaaagataaagaagaacgacgcgtcagcaaggaatgatccgaaggaaggaacatgcactggtcaagaacgggccagacctttgtctgctttgttttcttcatgagttgaatggtcggaatcgtgccgggcagactcaaaggagagtctctttgtgtgttgtttgaagagaagagctcggagagaaggagggacgacggaaacacacgcagaggcttgatgggtgggtgttggatgtgagcggaggaaagacggctcaaaagaaaaaaactacaaaattcgccaaagttttctagtattttctctatatttcctacctgccttggttcatctctttgttctgttcttctctgcctacgagttctctctttgctcttgcatgtcttgcactcatttctgtctgtctcactgctggtgtgtgctgaaggtttcgtgtgatatcaagagatccagcagttggttgaattgagctatgtctactcatacatcaatggtagtctggtcgggcgcgatctcaattttaccaaaatatcctgcaaggccgttgtcggtttgttctcgggtatcgacagagacgtgcacatactcacaaaacgttctttgctcgtcattcttatccttgtactccaagaaatgaggagaggaaaggaagaaaaagagcgagcagaagccatgtggacgcgtcgagaaaatcaaaaagaagccgacgcgtttccgttgggagccaaaaagttcattcccacacatacaccctgcacctcgtccatccatcctcgaacgatcacacccaccttcccatacactcacg

SEQ ID NO: 1042 - DNA, 33998 bp, Xanthophyllomyces dendrorhous
cttattttcttattttcttttcttttcttttccgaaatagaaggaaaaaaaaaacccatggatttttccctggaacttcatcacctcttctccgtccatccctcacttccgcctgtctctttaccttgggtcgatgtgaagaatatgaaccggtcaaagtcgtccgcacagatggacagcccatcgggatcactctttccgccgttgtcggctagtgtagagaaaggttcgtctattgttttggctccggccgggtgaccggagccggttatccagaccgaccgacttcaagattcggtggatcatcctctccgtttcttatcctctgccgatatgttagattcatcttcgaccacatcgactggcagtgccaccaccggtgctgcctccactgtgggttcgatgaaacagatgtcgattaaacaaaagccaggctcgaacgcaaacgcgagtggaaacggtagcggcaatggaacgtcgactaccggaaagtctggaccgttaacgattaggaagcagaacgtggtatgttctggccatctcactttacatatcctctctatcttcttctttcctcttcttggatggttttcttcaattgtctgaatcattcctcgtcctcttccctgtctggtccatgtggtctttccgcttggctcggtttcggtctggatcttcgggctcatccgttggatacatgggttactaggcgtgtgatgcgtgcagacgctcaaaggtttggcctgatttcatctcacttttttttcctctccttttgttgctcaactccttcgcttcccggatcaagtgatcgagccggccagaacggaggatcatcgagagcgattcgaaaaaaaagaagaatgtttggttgacgtgttcccttgttctctgttgcccttcatggactttgcatctttatttcaatttcattttcaccacaacccctcaaaacttgaaagatccgttgtgtccggaccgcgggagtcgacaaagtgagtgatcatctgaaatgtttcaatcgagaaatgttggctcatcaacatgcttcttatctcttttcttctttactcctactactttgaattcgtatggtcgtgtgggtatgtgcctgtggatggggtctcgcacgggtatagtgtgacatgtgtatgtcaaagaatgtggtgtgcacgtaagttctacatatccttggcccgtctttctactctgatccaacaattttatcttgccgcgcgcttatttcctccttcttcttcctcttcttcctcttcttcctcttcttgatcctcctccagagctcactatgtcacatcattggcggcgaaggaacggaaaaagtcaagcgggcaatcagcaccaaaacaaagagcgtccacagaaaatcttggacaggatctttcagtacatcagaaacaaaagaaacgaaaagcaaccgaggccgtccacagcgaaggcgaggacaatgaagaggacgatgggttcgtcctttgcctatctattcatggacgcgagccttcttcgcagagcccatagctcatgtcacatatccctttcttatcctttctcgctcacagatcctcagattcacaaacagagcatgcgttcaaaaaccagtctgtcttgcattctaaatcagttcctccgcagaacccgtttccatcggaatcatacgcctcttcctccggtgttgtccatcctccctccgtcttgtacccttccaatcgatatccacagccacgccctcagccacactctcaaccagttttccaaccaacagctttcacctcgtcttcatcatcttctttgcctccaactacagcaacattggaggcatcaaatataccaagtctctctgcaaactttgattcctctcgtcacctctctgataaccttcaattcatcccaaccaccaccacctcctccttttcctcttccaaaagaactcactctatgcatccgcctgcatctggttcaagtcagctctcccatccgaattgcgcaatctctgttcctccctcaccgctgtcaatatcgacagctgccaccgtgtcccctattactactatgccagcatcagtccgattaccacaatcgatggtcaacttgttgctttacatgttctcacccacccaggttaccgattcggaacttgactactcggatagcatggcggccagtctgtcgacaaagacggcacagctcctcaaagataagccgacgaaagctcatctttccctgaacgatccggcgctaagaatagagtgagtgcctttgctctctttgaccactctttctgtcttgcatctttccttcgttgttggatttgacatgcttcctttcgtcgttctgcttcccttctacccgaaacttcctccttgaactacccagactggcaaaagatctggtggagtcttacatcatgatagtccaaatcagggtaccactcatcgaccccgagttcatccggtctcagctcgatccggacgagtcaaacaaacattcatcaaacgtgttgatggctgtcgtcttggcttatggagcaaagttttccgaacatcagatcattatcgatggcaagttattactttttttaaaaaataaatcttcatggacgtgatttatggactggatcacggacataggtttgaatatgagataggaaaatcgatcatagtgttgacttcgcttgatgggtgtcaaccgggtttataaagatcgagaagagacgacgttgatgaatgcccagagagatgggagagagaccggtcggatgaaaagtcgactcgtcagtctactcacagccagagcacaggaagtcttggaaacccatcggatttacagggtcgcttcgttggagaacgttcaggcggcgctgttgatggaaggtttagtaaacagtgagcccttttctctccacatagccctcatcatccgttcatccgtccttgttatgtttctgatcgggtctcgatcgaatccatcattgctcatctgacgacgtttttgtctatcttatttggcactaaagtaaaaccggtggcattaaacaaggagaacaaagcacagacgagactgttttggacgtcggttgccgtccaacatttgaccaaacttcgatgcaatcataaaaagacagtcgttgcccttcaaagcgaattcatgcgaggaggttagtttccagttttctcttgcgtttcattctcgttctgcttcattgaccgatcctttttgttcctggccttgttctttttctctcttggtcagccgtcacgattgcttggtggtcagtttgttttggtgatgcttggcatgcaacctattggcgaaccaagccatatctgtatgtttcttctttcttttttcttttgaatttgatctggaatatcatcgtttccatcattctaaatacaacccgtttgtttggttgtttcggtgatgtccatacatttgtgatcttgggtgcgtgggagagtagacaggacctggattacaataatcatccggtgtcgctctcagataccgaaccggcatcgacgcatccgatagaaccacatgtaggttttcttcttcttttgaatacccatcctcggtccgtactctccgtcgttgtactcaactaactcaatgtcaatctcaatatgtgttctcgaatgcaaaagcaccatgttttatatcacgctacacatgctctctcacagatctgtcgtcagatgtatcttgacctgtttacacccgacaaagaacaaaagggaatcccattagatgctattcaaaaactaatcagttctcttcaaaactggaggtcaagcttcctgagtaaagtaggcgttccgggcggttggccggacagttgggattttgtagccgccgtcttggcttgtaagttccaatcatgccctttcggtatccttccttgaacgacaagacttttagggaagtcaagtctgaagcggcgtctttttcttccttctttcttatgataggctttctcgattccagctatcatgtgtatgtgttgtttctgataaggtcgtgatgagaaaaactccacgcagtgcttacacttgccggcaattattcccttgcacacatttgtagtctttggatccgtctgtatgttgccacctgttcgctctcttcattcgtatacaaagcacgcactcatacatcgacgatcctctctcttcccaacatttttcttcagtatccgagcggtcgaagatttcggaatcagagaggaacttcacgccaagcagatcggggtcctatcagacccaaccattcaggtcattcgggcaatgctttcgtcagagactatgcatgctgctaatcgaatctctgctttggtgagtatattctgcgtgtttgtactaccgttacttacttgcttatcgcctttcatttgaactctttcttttcttttcaagtcggccgttttatctcaaaacggatacctccgtctggacccaaatgtgctccatcatccgatcgtcgaagcaggtatctatctagcgcaacacggttatccttcttttcaatcttgcgtgactggactaagacagtacggaatgtcctacgatgagtgctacgacgaggcggacatgatcgtaggaatgtacgagcgcgcaattagacaaaagccaataacagatgatgacaacagcaggaaggagcgggcgccggaggatctagagttattgacagatcatgtatcaagcttggtacgcctatgtctccttcacttctctatgctttgtctatcatccattatctcccatgcatctgttctcggctgatcctctcattcggggccttgctggaagtagaagcctagacaggatgttgtggtcgacgacagcatgctctccgaccggactatccagtactttactggccattcaagtttggttcgatctgacaagttcatcgaaaccccggacgggtcgattgaacccgaggctagacaaaccagagtctatttaaacacagatccgaagctgtatgcccaatcttatacccaatcccagtcccagttccaatcaagtcccatccaagaactgtacaatccggtttctcagactcgggctcagatccaacctcgagctttgtctccctctcggtcgcaaacccagactcattctcaacccgtaagccagcaggccccatcactctcatctcgctcgttccagagctcgtatccccgtccaccatcatcgttgaacgggctctattagagaacggcgtgttcgtgtatacatcttaaaaaaaagaccaatatctttgctttctcttgtcctttcctttctacgatatctttatgtttatatagtctatgctttttaaggccttttcttcgtccttctaatgatccttcttcgatactcgtatccgtacacgcacgattgtatgttcccttctctccagttgctttcgtaccctgtgctgaacgagatgccggtcagcatggcgcagtcggtttcttggcagagctcggcccggtgacgttaactggccatcaactccatcatctctttctttaatcgtcacatacagccatcgccaccgactctcaacaacgaccatgctaaagaaactcatccggaaggcctcgttgtcttcaagctcatccgatcaagccgataatcatcgtcgacgatcccaatcgtcggtcatcagctcgggtggcatcccagaatcaaccactcagcgatacgctcctcccactggtcttcctcccccttcgtataacaactcggtagatgtatcatctggatcgtcaaggtccgttcagaacccgttcgaatcagacattactaagccagtcgagcagagacccattgcgcttgccgaaggagaggaagatccgttcgatgtaggttgtcgagcgtctacctatatatatatttcatatggcggctatgaacctttggtttttttttaactgatttctctgcactctggcttggatataattcacagtttttgaaaaggtttgataccgtctttttgatcgatgactcaggatccatggctggaggagtgagctttctattttcgtccagtaattcacgttcatctgtctgtccgtctgaccatatcatctctgtttgtgttctcttcaatgttctcaacaaaaagagatggagagaatgtagagatgctctggcaagcgtggtctcgttagtcatccattggtctctcttcttatgtttcgcgctctctgacatcaacttttatttctcatatccactctctccttctcccactatacagcactgccgctagatacgatgacgacgggttggacgttcactttctcaactcggctcggatcggtcacaatctaaagagcccagcccaagtgctcgccttgtttgaaagcgtcagccctagaggaggaactcctacggggacccggttagagaagctgctgaacgatcacatcagtctgttggaacgttcggctagggatggaaagtcggaggaaatcaaacctctgaacctggtcgtcttaacggatggggagccgactgatgatccaaggagcgtcatcatcgctgccgccaaggttggtctcttgttcgaactctactttctttccctgtgtcgcctataccaaacctcgctgtcgaacatagctgatgcctcatcgtcggacgtgatctacggcaccggaccatgtgtcctttggcagaggttagatagggggaactttccattagctgctcttggcatctttttccttcagatcggtaacgatgccaaagctaccgaagcattaaacgaactagatgatgatctaggatccgatatcagagacatcgtcgacacctgcccttacaaagcagggcagagactcgaccagggttacatcgagaaggtcttgatgggtggggtgaatcgtcggttggataggaagaaagtctgaagaatttcattcccctctccttcttctccctctctcttgtttttcgatttctcttcgctctcttggtatttcctttgtttcccttccatgctcttctgcctctattcataatgttagtgcggtttctacgccttcctatactcttctaatcaagccattacaagctaattctggttgctattctcttgaattgatatatcgatcgacagaacgtaggattctattcttcagactttgaattcatttttctccacaacatgactacatgaataatctgacatcgcttctgtaaaagcgaagaggaatgcgacagccgatagaatacacgccgaatgagcaaatgttagagcaagcatctactagttacctattttgaagtatgaatttgaagtatatggggattgatttttgtatatatatatatatggaaataagacatctatggatgagtgaatatgaaacacgatgagtatgagaagcatgaacgtgagatggtagcgatcgcgttggggagagagtaagaaggccaaattacgcatcgcccgctacggtttgtagcgtctttgctatccttgattgtgctcgaatctagagagaaaacgagatcgaacagttgagttcaacttcgtggcgctatgatccagagaacgagaatgaaagaaagaggacagactctaggaccgtagtggaacagcacaaaaggaatgatacccatcaaggcggctagacatccaaatatcgtagctgaccatcgaggattcaagtttcgatacatctttgaaaggaaaggcgtcaattagtccaaggagcgtgaaaaagagataaacaagaagtggcggcttacaggcgtgatgaatagaggaaaggcgccttcagacaacaagagacagaacccaagtaagacgggtcaataaatacgaaactgattcgatattcgcatccccaaagaggatggaatacttacctccgaaaatgtttctggagagactttgtgctgcaagcgcggatgaagcgtactggtttcccaaacaggccaagaaatgtaatcgtgagtgattgaatcagagacaggatacagattcgtagaagaaaatctcgatcacgtacgatcaggtaggcgtctgctaggtagctatttgaggtcaagagttattggggtcaggagaagttaacaaaagtgaatacgttcaggttcagaagaaaagacgaaggttcagaacaggagatcctcacttgaatacagagagactggtgagaacagcatacgaatgaaagacatcaatttcgtgcacaccttctttacagcggagaaaacagaacgcactagatcacgaaaaggcccaagatagcgaccgtaagtccaacgatctaaatggaaaataaggaaggaagcgtgagattgaatgagtatgaatcttttatcaaacaaacaaccgaacaaaaagaacggacaggtccaatccagtggacatcgggatacgaagtctatgtgaacacaccgaagacacaacaaagtaccatcagtcggtctaatctgcatttgaagggagaaaagataagagaaatcaaagcagacacgagaagagacgtacccatccaaagatgaagcaaccgatagcaaacaccatgccggacagacatgcaccgtaaagtcttgcctccggtcctctcgcggcaaagtttttcctataaggacgacatgttggactttccataagtgaacacgatcaagataagcgaaaagaaaggggatgaagacaaacttgtagagatgatcttgataaaagttgagaccgaatcccaagaaggaagccacactgaattccgaatcaaatctgagtcagtccccgtgtttccaattaatctatcaagagatgtacataattctggaagaagaagggaacttacaccaaactcagatagaccaagcccatctgaatggtaccaaacccataaagctgctcgaacacatatggaatagcctccactattccatatagaataccccaaacaaagctgatccagagggaaaaagtgaacacaacgggttccgtgaagagaaagacaaggggcctcttgagggataacttgatgagctcgatgagggggggtcgagtaagctcagaaggagaccgatagattgggttgttggtctccttacgtttcttccgagctaatcgggtcagcaagacagtggctattgattcatatattcgatgaagtattttggccatcagttttcgagacggatgagaaacagcgaagggagggagtctcacaccgggtttctttcatacagatgagcatggccgggatcaaacctcctcctattaatctaccattgaggattatcatacgattcagcgttttaaattctggtgctttatatcaacatagaaagcgaagagagttccttacatcaaagtgatccattgaatccacctccatccgagtttatcatccgctgccacgaaggacatggcgaacgcgcccagtcctgttccgccgatggcaaataaggaaaagatgctcataggaagacctcgcctttcggaaggagagaacagagatcgtgatgtcagaatacaagagaagaagctgtacaaggggccgtaatgatgattgatggtaaacatactctttggttttccagatatcggtctgaggattatgtagtgaacagatcggaatcaaaccattaatccctggtgtagtcaaatcaaatgtgctcagaagagtagaatagacgcactagtgatccgccgaccatggtactgcctgtacttgcagcgcatcttttgcaacgtgtgtgtcaacatgctgcagacgacgatggcgaaaagaacgaaaaaaacggtagaagagagacaccaacccttgaatgaatcgtgcaaccagaactgtggccagactgtttttgattcctcaaaagatgtcaatatcgactagaaagcaaagatggttgaaagaaggaaaaaggggaaggtaaggctgactaacttttgagcgagggcgacagggatagcgaacactttggcgacgccgcggccaagacggaagagacgagccaagccacacaagagacaaatcaaggggagacgagtgttagattgaaggaaccatgtcggtgaggacagaggtatacacttacgaacaaagaggatggctgagccgatgtagagagggtttcttccccattcctctgagaatggagccaatatcaaaggggcgaatgcgaaaccccaagcatagctgttcaagcatagtcccaactacagtcagctgtcaaaggactgggctcaaacagtcagtgagtaaactcacagagcaataccgaatgcggcttgcaatgtggataatcctagttcggctttcattccggtgattccaatagcaaaagaggacaagttccacgacgccatcatggtgtacgtcactgcagtcatagtgattgcccattttctatttgatccgtttcaacataacgatccggcagattggatttcataacagagaccaggccggtccaaacgatcggatgtcaacacgatgtgcattgatagaccagagatggagattatgagcagaccttccaggcgaaaagttgaagggatccctaggatcgtcgacttcaaactcaacctgtttatccggcgtccaccgacgaaaacaactgagtgagtatacggtcatacctgctatctgctccgatcatctcggcatgctgttaagttcctcctccctacactcaccaagatgtaatcttctttctcgttcacatctccttgtcctgttctcgtgtgttgtccgctcactcgagtgggacttgaactgttggactctaaatcggaatggactaattgctcttgtaagttcggcagtagttgactcatctcgacgattgctgaaaacgctcgtccttcttttctttggcttgtttctttaaatcgtctacgtctcctgttgaaaacgaaagaagaacaaagatacaagaggaaaggaatgaatgttggatagatgactcggcaaaccgaattctcttaatctttctggcctccgagtaggtaaagaaaatcaagtagataaatatatgactaacgtctcactccccagagtagccaggcttggacgcgtccggattcaatcggccgagcgatcgacggtgccgagaatgccgagctcggtgctgctatcaccgatgttagccgcgggcgatcgacgcacgtgtcgtcacgtgatctagcgatcatcactgacgcgcgacgcgtcttcttcattgacgcgtctggaattgtttcagtctgatctttcttcttgtcttctcagttcgatcaaattcacatctggctcaacagattccatccaccaacttgctcaatctagtcaaacatgcctgccaacttgtctgggatctcccgaacgtcgcctttgcaagtcctttttgaatgtatcgatatggctcaagaagtagaatcatctagttcgctgacaagctcctttcattcgaatcactcggtctttacagaccacctctctactgttcgtctcttgcctctttctcaattttgcttcatcttgttgtcttcacaggctgactgacggtctctctctctggatgacatataaatagactacttcttctccaaagtcgaaccgacattgtccttgcttggcgcagcgtacgctctcttcttcccaggagcgtaccatgataatttggtccattatcgagatcatatccttttaggtgacaaaggaggtggcctccgagcgaccatcgtcactagaagtctgggaaattgtttgtccaaactgcttgttcttgtactttggtctctatcgcagataaccatagctctcatctgatcgaccttgcctcttcctcttctccctctgactgacgtccttcctaggttatctcttattggcgatgatctcgttcttccttattccgaccctcacagaaaacttggctccatacccagtcattcacgaaaacatcctggtcaccttcctcctctgccttgcagcatgtgatgtcggtctcgctatcctttctcttcctcatatcgtcctagacttatgacctactaaccgatcaacctcttccctcgcgcgcgcacacacacacacacacactacgtggctctctcagttgacccacatctatgtagtagcttcgcaccttcctgagacagtctacgcttacccatttaccaaatggtcgttcttggtctggggaaatatcgggatcacggctattctctttcttgttcggttcgttcatctctctctactcggttctccttctttctgaactgatctcgggttctaacccttgtttcgctcacaacgatgacaatctacatgatcatcgccaaccaatagatgtctctggtttttaggctacggacgaccttactacgggttgggtgattccgaacgaaaacgaatgaaggataaatcagaacaacctcgattcggaggatctcttcgaccaaaagatcgagctgaatacgagagactcaaggttggaaatcactctagtggcagttggagtaggcaggattgatctagtctcttaaagatgaaatccggtcacacttcgcttgtgttaatgctctcctacatacaaaatagccgacaaacgaaggaaagaaggcttgatgtggaaaggaaacaacacataaggatagacatgtatatcgaacagatttcgaagaatatattgctcgacctcaaccatcgtccactctttcctctctctttgcatctgtgcccacttaataatatccagcgagttgatagagaactgccaaaaacaccaagaagagcacagcaaaaagtatggcgaccggggtaccgtaggctgcgatgatacacgagacccccccccacaaaaagtgaaaacacaaaaagccaaatgataagaaacgcaagtcgagggaagagaagacaaaatacggcgccatctcaagatttgcgctggagaatatgaagaaagcacgagataaaggaagggacgaactggcatcgaaagtctctggaacggtgatcacccgaacggtgttatccgcgcttcctgaacaaatcagatttccagaaggattgaagcgtaaaaccgtcgggggcagagcatgggctcgaaggattcgaagaagaggctggtcatcatcccaaacttctatgtcagtagagactcaagaagaaaagtgtcgcgagaaatgacagaagtccactcacagcagaattagaagtatcgacgattcctacgctcaagtccgaacatccgtacgccaacattgtccctgatgtgctgttttgcccaaatccacataggatcaagctaagtcagtgcgcacgtcctaaagatgaacgaacagacagagacagacaaacctgacgtcacagacagtgataggttttccagccaacactctcgccttcccgactttccaagtttcttttgaatcttcctctactggcaccttctcttccttcttctctccctcggccgtcctagaagtggcttcagtggaagcatcgaaggtacagatgaaagctcgacggggatcgcctttcttcttctggatgggtgcgttgagaagggcaaagaactttgaggaggttgggcctcgaccaaacctgaactcgagtaaaaggtttcaaatgagagagtggtcagacaaaaaaagtcaagctggcccagaaagtaaaccttaagcggagggacacactttccacctcgaaacgtggacttggcttcaatcttgatggcatcccggctgatcgcttctatctctttcggtttggatatcgatccactaggctgtccttgccctgtcgacaaagaatacacatgaactgtagtcgatgttgtaaccgcgagcttaagaaaacaaaagatccacagttgcccaatgatgttcaattttaaatataccgattcgatatatatatataaacactacgttacggtcgaaaaggaaagatgtgaatagaagacacgtacccgggaaccatcatcactaaagtccaagtcataaacgtctccaaagccgactctgtcgaacgataggcgttcataagcaggttcaagagatggaaacgagagaatcgaaacctgcattggagaaaacattcacgccgtatgtttagctacatacctctgttaaaataaatccaaaacagaaggaatagaacttaagtacagacttggttgtgtgatgttccaacagccaacaaagacccattgcgcgagaaagcagtcagtttctacaccaagaaaaggttcaacaggagtaaaatctctagtcaggcttcgagacaaaatactggtatacgaggacttgaaacaacgaaacatttccgctcacctggtaagggtaatcttctctctccgaatagtcggccgagaatgttcgggtcgagctcttcagctgaatcctaatcacaagaggaaacatctttcgcatcagtctatcattgaatgttcaagctgatggactgagcaaaaatgtctgtacttttcatcattcaggtcaaaaaccctgcaatggttgttcattccatttcggagttgagcgggtgcagagttgattcccgccgccaactctttagtctactcatccgacgagaagatttaaacagtcaattcctgagctctaattacaggctatcgggtctgaacatcgaaaatcgatagacgacaaggaaatcagaagagcgaagcgaacctttgggttgagagctaacgtcataggagcgtcttcctcagcttgtaattcgtattcgtccagaacatctagcttttttgcctttacatcaacatggcatagtttctgttactcgtgtttttttttaggaaggcaagatggttcccccaatttatggaatcatcagctcgaaggtaacagaacaggcgccatcaatacaatctttatctaaacaccatactgaccagtttgtttttaacaccggatcgagttgctccaccgcccccacctaggactacctgggagtcggattggaaggcgatagagtacacagggaagctgggagtctcttgagagaaatgctctgttcgagtcatcgtttgtaaagaaagagaacgaaggacgagtgatgagatgatggttgttgctattgaagatgatgacgagaatctcgcgacaagtttatcgtcaataataatgaaatacattctctagtaaaccaaaatcaagaacaagtaccgcctttgatcccacgtatcatctaccatccatcatccacaaaggaagtaaaagatatctgtttcgattgatatgcctcgacctcgatcccgctctcgctcccctcctagatctcggcataacagtaatggtgatacgggctatcgacgaccttcgcctccttcttcccggtcaggatactcctcccgacctcgcgactctggatctgatagagatcgaccggttggtcgatcaaacagatatacgagcgaagacagagagaaagaaagagcgaatgacaggagacggtatgatgagaaacgagataggagcaggagtccctcgaggacgggaagtggacccgtaagtggatttcccatttgatgcacaggacacgagattagaagcctgtcgaaagccgactgatagatctggtatatgatcggttcaaatcgattccctccttgtgataaacatccaaatcatatcatgaatattgggtgttgaaccacatacagggtggtccagtgatggctcctccttcgcccaaacgcgaagccccaaagcccaattttgaaaactcggggtaaggtcgtttcctattttgtccattgacctattcccagaccatgttgacacgatggttctacgatatcttctgattgttctggtcgatggtcatcctcgttgacatgtttcgcactactagcttgttggcggcagagacaaacacgacggcaacaggtgcgatgctgaaatacaacgagccgccggaagctcggaaacctacattgaactggagactatacgtgttcaaggggaaggagcaagttggtcagtgtcttcctcgttaccttatctttgttcttttttgtgggtgatgaagggaatttaagtaaagttgttgtttgcatcgtctcgctccggatccagatatcttccatatccacagacaatctgcatacttagttggaagggatagcgctgtgggtgtttatcctgttgtgtcgtctagatttgacagctcctcactctcaggttgttttgacttgtaccgttctttgcaggtcgtggacattccttcggcccacccgtcttgctcgaaacaacatgccgtgattcagttccgattgatcagaacgagaaatgaatttggagacgaatcctctagcgtcaagtaggtgtcacctggagtttgttatcctttgtagttttcttctccagtgttcagacctaactaacaaggttgtcttgattggggtcctctatccttcttcactaggccttttgtgattgatctggactctacaaacgcgacatttgtcaacgaccaagagattcctccttcgaggtactacgagcttaaggcttcagacggttagtctatattgcactatctcgcctctctggtttggagataacgagagattcgtgctgatcgcttggatgtcgatccttgcttatccactacccataatccatgcgtccatagttctcaagtttggccagtcgacaagagagtttgtgcttcttcacgaggaagctgcttgagcgtggggtgactgaaaaatcgattctaatgatctgtgtatgattgaatgatgtgagaattctttgcgatatatacatgtgtgtatgcgcatacatggatctaaggatgagcaaaagaggacagagacaattctctatttcacccctttcctctctttctccaacattgtcactgctcccgatcctccttctttcacacttctttactctcaacatgatgactctgtcaaaggtgatggatgacagagacaccccaaaggtagcgtagaagaaggctgtatgcggacattccaagatacttgattatctaagtgactcttgcccccttagacaacacttgtgtaagtcctcctcctcctccctcttctttttttctcttctctcctcacagaagaatcatcatcatccaagagttgaatgctcctcaggacagttcgatctctttctcttccatatacgttctcttacagacagtctgccgctcttcgatccaaccggttattctcaatcacactttcaagcaagatgtctggcgatttgattgcaaagttgaccgccctcgagatcactcccaaggtcatcaagcacgagccggtcgtaggagctaaagcctggaaggctgctttggagggaaaggacggagttcctgctgcctgtcagtttttcttagttctcttgtttctgtccatcgtgagaaatagaggacacctcgatatcgaagattgctccgtggctggggttgaggatgcggcatggtggtgatttggagggaaccgtcagtttggtccgagttggcgtgtacgatctaggaatgatattgactcgactctctcctctctctcccgtctttggatacacacagtcgagtgcaccaagactttggtcttcaagcccaaggtttgctctttcaaaacacgctcaacagctcccatcattctatctatcacctgagtgtctcaattagattgccttgaaggctgactcttcatgttcttgatcattctcaaagactgccaagaccgctactcccgttcctgttgtcattatcgcttctgatactaccgaaactcctaccgggcccttgggtaagaagctcaatgtcaaggagatgaggctcgctaacgaggatctcatcaaagagttctttgccgtcggtaaagatgatggtgagtgccccgcattcggctctagttcacctacttgacttctcctcgagttgtttaatgtactaacgagtcattttccttcgttgcattcgactttctatcagtctctcctctccacctcacttccgctatccttcctaaggtccaaactatcctttctgcttccctcgcctcgtcctccgacctctttgctgtccatgcctctacttctgccgagactatcttcctctccggagtcgagctcgccaaattccttcgatctgtcggtaaggaaatccaggaggtcgatttcgagagcatgaaggttgacgccccagccgcgctcgtttcgtcggctcctaggcctgagtaagcttcctttcctatactatcagccaaaccgcgccaaatcaggagaactcaccgcctctgggcttcggggtgtttcagaaacagcacgaacaggacggctgctcttgacaagaagagaagggatgatgccaagattgagggcgccgacgagatgtccattggaattgataaggaccttgatttccccgagtggtacaaacgggtaagtacctctttcttgatctatctgatccgtatgcttgggtttatgcttatcagacgcgctatttgtcatcatcttatgcttgcccttcgtggaatcaattcaaatatctctaggttttggtcaagggagagatgatcgagtgggtatacagattttccgctgttgaatgactcaagatactaacgcgcctgcgcgctcgcaatcttctctatttgcttagttattatgatatctctggatgctacatcctccgaccccagtcgtactccatttgggagtctattcaggagttcttcaacaaggagatcaagaagcttggagtgcagaactcgtacttccccatgttcgtgtccaactcccgattggagaaggagaaggaccacatcgagggtttcgcccccgaggtcgcttgggttaccaaggcgtaagcttcacactcttttctctctcccttttctaaaagactgctctagttcgttagtttcacgctgatctggattttccgttggaatctaatagcggtcagtctgatttggaggagcctatcgctattcgacctacgtctgagacggtcatgtacccttgtacgcttgcactttctctcctttgacttttgttgagacactcatatgaataaattctcttttctgcgatggttgatagactacgccaagtggatccagagtcaccgagatcttcctcttcgactgaaccagtggaactctgtcgtccgatgggagttcaagaatccccgtccgtgctcttattcgtacctattcaagttgccatgctgccattttgtcatgttatactaaatctgtgcatcttctttcttgttatgcgtcttgctctgtcttttcctctagagcctttccttcgaactcgagagttcctctggcaggagggtcacaccgccttcctccgacgagaagaagctgagaaggaggttcaccagatcctcgatctctaccgacgagtgtatgaggagctcctcgccgtccctatggttaagggtgttaaatccgagaacgagaagtttgccggtggtctgttcaccactaccatcgaaggtttcattcctaccaccggtcgaggaatccaggccgccacttcccactgtctcggtcaaaacttctccaagatgttcgacatcactgttgaggatcctgagaacgagcgagagaagattcacgtgtggcagaactcttggggtttgagtacccgatcgatcggagtgatggtgatgactcacggagataaccagggaatgattacccctcccagggttgcgcccatccaggtggtagtcatccctgtcggtttgaccaccaagacgtcggatgagatgaggaagaaggtgtttgatactgttgagaacctcgttactgatctccaggcgaaggatgtcaggatcaggtcggatgtcagggagggttacacccctggcttcaagtgggctcactgggagatgatggttcgttttcgttcgttgcttaaaatcaaggaagcggacggtctgacccattgttttttttttcttggtctgcttgttgattgtcaaacttgatttgtagggagttcctcttcgactcgaggtcggacccaaggatgttgagaacggaaagacgttgactgtccgacgagacactaaagttaaggctcctatcgatctcgctgatatcaccaccaccattcccgctctccttgagcagattcaggccgatatgtttgccagagcccaggcagagtttgccaagcgacgagttgtcgttgaggagtgggataagcttgtcccgacgttggacgccaagtgtgtggctgtgttgccttggtgtgaggagcctgcttgtgaggatgagatcaaggacaggagtgcagccatgttcgtaaactttcgctgcttttcctttctcttgcgcgcgcgtgtcacaatcgttgactatcgatttcaaaacgccttttcattacagtgcccaggctgcttccaaggaggctgtcgatgatagagttccttcttctggagctaagactttggctattccgttcgaccagtctgtctacccatcgatcgagggaaagacgtgccccggttgtggaaaggcttccaagaggtggaccatgttcggacgaagtcagtcttctttacactctctcgatcggcgagttacaaaaaacaagacaactgatcgctgcgttcgccacacatttatttatccacctaggttactaatcgtctcgggtgttactatagacaaaaaagaagaatggattgggacggtggttttagagggacgaagggaggcgacaagagtaacctcttcctcgagccggttgaggttttatttcctatattttctttctttgtttccacttttgctattcgatgtacttcccctgcgctccttgtgtcctctgtctctgtctcttttctctgcgctctcttatgaatgtactgtcgatcgatggaagacaatcaaacggatgagtcgtcttacctaaccccagctcgccttcaatgccttgtccgcagtcagacgacgttcactagatcacacgctatttctctcttttgcttcgaacgtccatcccatccaacagttcaaacccaaagatcatgctcgagtatgtccttcttgactcactcttgatgcctcatcaagtgctgtctatcagaacagcgcgagtgtacaagcaggtcgcttaccatttaaatatcacattttggcttaaatctttggtgacgaccctctggtcgttggatctttctgtgttgcacagccaagactttatatgttgttgcatcccactcattaattctgggatttactttatcctactcgagaacatcgtcagtcttcttttggtgttctcatgtctcttgatttctctatttaaagaaactcatgatgtgtctgtgatgttgggctttggggtctcggcaggtagtaggcattgttgcgggggtgttgacattggtaccttcagcagtagtaagcagtgctgtgccttcatttacagggtggatctttgcaatcctctgttttgcggtcgctgcggtccaggtgttaggacttttgggtgtcgtcaaggtatgtttctctgggggaattctttatttgcttgtgttatattctgttcgagtcgagactagctctggctgtctagcggtcagagctaaggttgactgcatagtgatattcatcgattgatcttttctcttgctcttgtgtctcgttcttcttgcgttcggatatctttctattccacaggagaaaaaaggaatcttcagagtttatacgatcaccaacattgtcgtccagctcctcgcgttcactgtggcgggtgttctgatcctcgtctctgggcttcgacataaaacggctgtcgctaactgccaatcagttagtccatccaaatctttcctattttatgttatgtagatcggctttgcaaaggtgagctgattccttgtatggcctctcagacatattatactacggattccgcaaattcgacaacgtcgttggcttctcaaagccagaagatctgcgagatttttatgattgtcgacaacagtttgatggcgtttgtctcactttcgttctgtttcgctctagttcaaaaattcgataagagagtagtcctcgttaaccgtcattcttctgcgatcgaaatagaggtctttggcttctgatgtttatcgtgcaaagctacttgatggccgttactaggctttacaggcgcgaggttcgggcccttcttcggctctttcgctcaaatagattggataggactctaaccgctttgcatcccctgtctcttcctttctgtcaaacgtagcaaaaagaggatcacagtcgatatttctcgtacgtctctatcggtttgacacttctctgcgctgaatattcatcccaaaatgagtataccttctgatcctcctctcgcgatcataatgcacggacaaaacacgaaatagaatgtactctactaaaggtggatttcccgaagaaccagagaatattcctctatctttccacaacactgatcctttaggggacgcatggaacacccgacagtcaaccgatactattcgacagtacgatgctggaccacctgggatgcgcaacagtggtatcagtgttgttgacggagagggatatagacgaccgttgtcggaggccaggtcgcatgaacaaggggtgtatgggaatcatgaggtgtatgatgcttatcctgtcgaacggggacacgaacaggaatacctggatgatggacggagggacacagctttcgtaccaccggtgggtggacacgacggatacggaacagaggaggcgatccatagagatcaacttcggcagcaacgagattagcaggctcatggactcactttcctcttcttctttttctctttcttttcatctatcggacttctttgattctcgttctttgcgcgatatttccaagttgcttgcatttgctttctattcctctccttctcttgattctttcttgtttcgccctccttttacctcatctactgttctatctattaccttcctcgggtttgctcgccttatttcgttcttgtctatccgccatatgtatccatcatgattattgccgttccatcaagcaaagagagggaagtagatcgatcacgttgcacagctttcagtcgtagaatcgcacaaccgtcatcaccaccatccttccttcttttgatggccgatgatcatcatcgtcgacatcatctctttcaccttctgtctgtgctctcccacatattttgctcaacatggacatggatatgcaggatgcgttcacccagcaacaacagatctgggctcaacaagatcaagcggcaaatagtcgaatgttgtgcgtttctttcctccagtccttctctctctctcaatacacacacatttgtttcgtgatttcctggtgttgactcggaactggtctatgattctggggtgatatccatggcttcaaacgaatcagagatctggtgtgtatcatggatgccactggatcaatgggtgtatgtgttcttcagcccatatatatatctactataagaatgtaaaggaagctgatagaaatcaggccttggacttcatctttgctttgggtgatctgactgctgtagtcttatatcgcttctggcaagttgatccttccttgctcttgtcttcctcttcgtctaccctgaccctgaaaaggagggttttatgttggtggagaagatatcccaaagtgatcgctgacggacggatgatctattgattaaaacatttacgatctttagccacgaagaatattgaggaggtaactgtgtttcttctgaaccatttgtctcctttcctctttgaccagattggtgcttactgatcaaatgggtttatactgctggcaaatgatatgatagatctgtacttcgatcgtgaactcagagaaactgtccaggccggatgacctgagagtgtccgtacgtatatcaatcatatcgttctggcactatgattgtacggccgagggcatgcgtacttacaccaaaagcatctttcttcatccaattctttttgtttctagattatctcttatagggatcacccgcctcaagatcatagtgttagttcttctttacatcagtccttccaaattgtgaccaacaatttgacgtctttaatttcttttcatgacccggtacagtacatcgtccggtatgttctcacctctccatatcagctttgtatcctccatgcaccttgatctttacgtaaacttcgaacccatcctcggtctttgtcaatccggtcggtacatacagaaccaacgcgttcacgtcttcaatcccgcttgtcaaagagcaactctcagctctctacgcttcgggaggaggggatggacccgaagccgttacggccgcaatggcggctgctcttgatgatgtagagtggcgggaagacgcggcaaagatggttcgtcagaagatttctgctttcagtttagagtgatttaacatgagctcactttactattggatgttcaggttgttctagtggctgatgcgccacctcagtaggtcgaatcaaatgctcaggaccgtgcttatgaacactaactaactctattcttcacagtggaatcggagagtacggggacgggtttccaaatggttcacctgacggtaagttaccttgtgtcgtaccatttctagatcagatcagtaattcacctcttgcactttttctattcttccttctccctttgtctctaggcaaagaccccctggttcttgctcgagagatggccagtcgaggaattactatgtttattgtcgcgtgcgagcctgcgctgtctggatacacatacggaaacgatctattcaaagcgctctgtcagattacagcgggcatgatgctcccactgacgacggcctcactcttgtcccatgcgattgtacgtttcgttgtcttttctcgtttcgctttcatccttcctctctgaaactggtatacgatggattctccaactctgatactctggtgtcttgtttctctcattggtttgctctttctgtgaacttgctatttacaggttggatcggcgctagaacacttggatatggaccgactcatccgagaagttggacaggctgttggagaccgactaaaaggtggagtcgagacagtagatgatatagctagagaattacatgagaaggtatatttctctcgtaatccttctttcctctagctgagctgctcgttgatcaccattctgccccatctcgacacaaccttttttcttctttctttcttatcactcttcagttgatgctccgaaatgaaacgaccaaatcgttgacggtagaaaatatttatcgggattcggaagaagcgacgaataacgtccaggtgttctcctcggctccagacttggcttcagcccggccgcatctgcaaaaagtaagctcgttctatatttagacgcttggtctgtttgtcggttcgatactgatctggctcttgaaatactgtctggttacgaatgacgttgacaatgaacaaaaggtgaaaggatctaggtaggacgtctatctcggaatcgtttaaggatggccaaacgaaagggtgcatgtgctaacctctacgatctaccgatcgatctcttccttgtcgttcttcttatacagatttacagatgcttatcttatctcgagatactcctcttcatcctccacttctggataccgtccccccatccctcctcgtcctagctcatctgtactctcatcaggaggtatcgtgccagctaccacacctaccgctttcaacccattcacctcttcctcttcctcttccgccagcaccagtaccagcatcccttcctcttcgtccttttccgcatcatcctcagcagcagcttctacgtcacctccatctagaagagtcctttctgacttcaaagccttcggtgctcaaccaaccacaagcgtcttcggcgcccctttctccagtccacaatcaggattttcacctaggtcagctgcatctgcatcgactccgagagggatgagaggaggcgacagcgatgatgatgatgacgataatgagatggagcaagatagggatgaggaggaaatcgaagaggtcggtgggggaatgttcgtaagtgagggcgggcagggattgaggttcggaagaggagcaattagctttgaacaggttcgtatgctgttccttctttcctggttttcttctctttctttcttagttcgcttcgtgcgttttacttgaacattaaactcaacggtattctgtctctgtctctctggtggcggctactgtcggggatgaatgggaacaggcaagacgaatcgccgttggagcagcttggaggtctagaggttaaaagggaaaagaaacacttcaagcaacttctttgtttgtcttagggagttttttcgtattggatccttctttacgcagataaaatcatttttcttgattcgtttctttggctttgatgcatgaatcatacggttgctccgaaggatcgccagtttctccttttatgtcacttctccaacgatgttcctcacttggttttcctttctcctttatatttaatgatcaccaaggcatataacgcattctaatccctattctctctcgtcgttctcctttgccttctgcttatttatcaatgcatgtttcaacctttccatttctctcttcctgtctctatgtctctttgtatcgagtgtggtgtaaacgaccttgaatcaactacgcataaatgagagtacgaatacccacacaggcaggaattattcggcacgatcattcgttgatctagtggattttctaagagcaggtgtgaatatttctgatgaatcttctactcgtctccgtttacccttgccttttccttttgctgtcaaactcggagctgagtcagaagtttcgcctgtcctctgttgaagaactagaggcgacgaatttgaatgagtagtgttgggtgaaatagagacgtgtaccgcttctgccgtcgtgagtggtagcgcagacgcaagagatagaggagaatttgggatgaacctctctgtgagatgaccatcctctcgtcttgactcatttgattcatcttctggtttgcccagaaggaaccttggtcgatcatcaacggatgatgggattacttcggacgagagaggtttgatcgacctaggcgatagagcctcgtgtttagccgtcgacggcagtgttctcgggggcggagaaggcgtgggtgaaagatgagaaggaagcgtcgaaatgaggtcacttgtcgtttctccaagtgacactctaagccccgaacgaggattttcaaccgagtcaactgggagtctctcttctggcgagatagaaggtggagatgaaggtctagtgattgagaatgataacagatcatctgttccgctttgacctgggcgtgagcggcaatctggagaaggtgttggagagatgtgtgaccgtaaagttgagaacacgatctcgccctctcgtggcagttctttatctagtcgagtctctgatgctgagagattctctccaacagcctcaacatttaaagaggggtatttgagtagatcagagttatcagaccgagactccgaaagcgggtcgatagtgattgatgaggaaaccgaatcatccattcctccaggatgcgcggaagtagctgcagaagaaggaaaggctaacctcatccgttcgtagatggtttggctttcttgctctgactctaaagagaggatataatccataggaatcgagtcaggtacgacttcggatgatgatctagaatggggggagttgtgttcttcgatgtcgatatcttcctcttcgatcgtctcctctttcgctcgttcttctatatcagttgctcgggaagctttccactcggcttcgatacgcaagattctattgctgatatcttctcgtttgtcgcccaattcggtacttctccagaatacatctcgggcagaatcgattcttgccctaattttagctgtcttcttcataggttgagccttcatttgggttgtaaaccagttccggggtgatacacgtcagtcgtcatcactccgagagatgaaggttaggaaggataactagggcatcttacaagaatttgctggacagccaagtctggatcagagaagaacacgtcggcgtaatgaagcaagtagactccacaactggaaaagtcatgttgagtagggaccttacctccatgaacgggcgattttctgattagtcctcgatagaagaaggaagcaagagaagagatatgaatccgactcacatccgcttttcgatgaactaatggctgaacatctgctccttcttctaaccggctagaagcgattgcttctgaacaaagatatcgggtcaagacatggcctggttgaggtctcgatgtaccaaatgagtcaaacagaaatatatacggcctgttgggaaccgccgtcatcattcatcaatgcacaggtgacatttttgaaaagttgtcttcagttgaaatgctggctaagatgagaagaagagggagagaaaaagtctgacgtgattcgttcctgtgctgcctccatttctctatcatcacctcttcctacctccgcatcggtcccttcggcaacctctctgatattcgaatcatttcttcctcttgttgatcttctcggagcgtatgtagaaacttttttctgcgctggagatgatttcttcgcttccttgaccgtttgatcagctagagatttggacaacggtggtgatggtattatggctcgaggattaacgatgatagccatgtaccaatgatagctagttgttttgggaagccgtaagtatagatcagcatgagagcaataaaataaacaatagaactctaaggtagagaaatctgagacgatcgggtatgaagccagagaaaaactaacttttcgttgatgggcacgaccagatattttttctcaaatagatcgaccttccccattgtccatctcttgacggtctcccatgggtctaatcctttccgagtcacgctgtttcatcgaatgacaggtggttcaatcagtacatacgtgagagtcaagatgcttcaatacagtgtgtgaaaagggaaagaaggagaagggcctacgccggatcagtcagcttcatgtacagaaacgagttgaagatatgcactttatctgcaagttctggattcctgatagtagcccggtgaaaacattctcttcattgggtttaaacacaatgacatgagttataggacagagaggcagaaagaagggatcactttgagctgaactgttcgtgtttagacatagaaggaggaagtttaggactatgtgcgcatcgacttacttcaggccaaactcgatcagcgtatcgttaaggtacccttcgtctacagtcgttctgtagaagtcagcacgggtgatccgaatttcacctcttccttgagatttccatacgcacatgctgtaaaccgtgttcaatctcttgttaaatattacgtgacaatcttaaacaaggcagacggaaggcaaatacaaaagtatacaaacgtgttttgcccatccgtgagcgatagagctgcactctgtttatgtctatatttcctctgctttctagtgtctggattgatacggtctgttatgatcaatccgcttctcaacgccctggaagcctgtctgatgggcctcgatgtgacatttacttcaggactcgagcgcgctgattgagcaagatttgacgaggacgaagatgagctgaattccgtctgatattcatataagcgtaatcgcctgtctgatcagccctggattgaaagaccatatctattggttgcggtttcacataccatgcgacctgagtcagctgacccttcctcgcggaggatccctgctctaacgcgttctctatcttctttggtggtgaacgtgaacggactggtgaatacatgctggtctgatataaaagagcgcgtttcacctattggttcggcgcgcactcttggaggggtagatatcagaacgggtgatggtgaccttgtgggcaagatgttggggtttggtggtggaggcgaaggggacgacgtaggtggatgttgcgttaagcgcagacgcttcgatgaaggagtcgacgagagatgtaacttgtttagggaagatgtatcgatacagaacgacgacagtatgcttatcagccgtgtcatcggcggacctatctggagagaggagagatagaaagtcaatgaaaccaaccgatcgagcttggtttattacacgctctgagggaaaggatccagccgcgtctttgtcgttctggctttgctctcttgacgggttctcgttatctaccgctctggtctttcccttatcttgggacaaggatgatagagcagaagatctcgaactcgactttgtccgtagcaaagcaccctttgtacaggaaatggcaaaggatttgggtatgagcataggagctacaaggaacgagacggataggtttgtgggagctaactgatttgctctttatcctagagagtgttttgtttgggaccggaaacttctccatcgtctcgtgtttctcgtacggtgttggatctgtccgtgctggctatcaagagggtaacagcagggaagcctggacgacgacgatgatgatgatgatgatgatgatgatgatgatgaagaagaagcatgacaaccgatctaatcgcgcacgtgattagatagcaaagcccgattacataagcagctactgcgatcgacttagtgtcgtcacctctttccttgagtgtttccgatccgatcgagcagagtcgattccatatcggatggtcttttattttctgatctcgctcttgttcgtccaaccatcatcattgtctgtagagtagaagcacagaagataagcacgtcagaacaggccgtatcccatagaaagaacaattttgccttctttaccttcttacccgtcaactcagctctattcagcccgactttactctgttctactcagccaatctaacagacatgccttccaatgttacctgggcaaagatccttcaagagtcgatcgataagtatcctaaagagaaaagtgagcaatcctttgtcccttcatcgtttattttgtgtatcgcgctctccttgcttactcagaccctggttttagccgcttcgattgcttctgtcgcatcgctcaacccactcaaacttaacaaccgatgcgttattcctcgaaagatctactatcccaagacgtcctctcagcccgtgttgatctcaactaccgacgcccgagcgtctaagacttcccactttttgaatgtctcgcccgctacctcgcttgtttggtggttccccacgcctaacactcagttcaggctcaacggtacttgcaggattgttcaggccggagagaaggactccgagtgggaggacgtcagggtcggactctggaaagagatgagcccgttcatgcgtgggacatttggtagaaaacccgaaggagggccaggtagtcatatggatagctatgagcagggcaaggattggccaactaagcttggagcggagcctgaggtaagcatcttccctttcaatcattctggctggacaagtgaacgatagttaacctcgatcatgggttggttaactttgataggaggaggataattccaaggagcgagatctcatcgcttatgcccgagacaactttgctcttctcgtcatcgagccaactctggttgactttgcggagctcggagtgattccaaaccagaggactgtctacacgctcaacgaaaagtcggatgagtgggattccgaaatccagtgcccctagatagaagattgctccatcttctcggacacgaaatgcaatatatgtatcacgtattttgatgtatgcgctgtattcctatgttatatctgtcttatcttatggctagagaggattgcattggctgttcgatgttcctgatctcacaaaaagtactctacgtagcgctcatacgtttgtccgtccacctgatggccatcaaaccctgtgcctcccacgcttgactctttcttgcgcgctggctcccttctgtatattcacgagctttcttcttttctataaatggcaccacgcgcctataagaagaagaaaaaggaagagaagagagagagacctcgagtgatgcaaaccctctctttcttttaccgtctctgatgagctataccttgtgctcctagaaagatatagtcataacagtggatacttcatgactatacatcatgttgagaagtatcatagggatagatcaccgtctggtcaaagtagaatacgcgaatgcacaatggtctgttagggttggtaacgtgataatcaatgttgatcgatctgaccgatggatacttcatcggaaacctcatcgactctactcccatcaccaaagaaaaaagactggaaggagaaaccacatgtccatacgaacatctgttctgcctaaattattccgaaagatcatcatgcctgccaaacgaacactctcctcgacttccaatgctgcttcacaacagccgccagcgaagaaactccatcaggcgaccctctctttcggtacaaagcccgctgcttcagcatcttctgatggtaccaagactacagcaaaggaaccgacattgactttatctaccgctggacctgcgtcttcatctcctacaaagccacacgctccgtctgtgtttacgaaatctaaagtatcaccttccttgccctacgagggtgacgtgaatgagaacatcgagaagctgtttcccaagttgaaagaagatcagagggctctggtgaagcttgaggtagagagtatgggaagggaatggctagatgcattgaagactgttgtcggaggacaggagtttttgaaagtgagtgggcgctcgagatcgatcgatcgatcatgaagaaaggctcatgacagtgagcacgctcgccttttgtttcaatctttgttgcttggggaaatcagttgaaggagttcgtgttgaaagagattcagacccaaacggtctacccgcctggtaagcttctcttcccttgtcatcatattatatcaatgagtctatctgtaactcacgtctttgttgtctgtagcccaggatatctactctttcacccgattttcaaagctgaatgatgtcaagctggtcgtcatcggtcaagagtaggctctcccctgatcattctacaagcagtctgcaagagcagttttattcagttgatattggtgttctggtcctttgggtttggctgtagcccatatcatcaacgtgagctaccttttatttccttctatctacacacacgtccgcatcttcctctataacacgtcctctgatcagtgaactcttcgaatgtctgttcttgggaaacctagcgagacaagcccatggtctatctttctccgtccgaaaggggatccaagttccgcctagtttacgaaacatctataaagagattaaggacgaatatccaaactttgtcgttccttctcacgggtaagttcctgtttcgacctctttcagcatgagaagggaagacaaaggagggatggacgactcagcagctgaagtgcctattctgtttctttaaacgatcgtagagatctgtcttcttgggctgctcagggtgtgctgttgcttaacacttcactgaccgtccgagcgaataccgttcgttcttttgaatttctggttgctcatccttggctagctgattgacatctcttgaggtttctaggcgggaagtcacgccaaggcgggctgggaaccatttacgaaggcgattatcaaagaactcgcgaagagagatcctggcaaggtgttcatctgttggggtaaacacgcagagaagatggtggatgcttctggagttgatcaggtttgccgtccttctctagatttattttcgttctctcgtcatccagattggtgttgatctttatcctcgtgggattaa

SEQ ID NO: 1043 - DNA, 1712 bp, Xanthophyllomyces dendrorhous
aattatacgtttgcgccgaatgatttgggggagggtacaaagaaaaaacatctgatccttcggtccgcacatccgagtccgttgagcgcgtcgagagggttctttggaactggccatttcaaactaggtctgtttatctctatgtctggttcgaggatagatggatggacggagaggcatcaaggagaacagagttttgagtttgagtttgacgacgacgacgacgacgacgttggtggtaataacaacgctgcgacgatcagaaggatctgttggaagataacttgaaagggcagttttgcgagaagaataggcgggaatgggtgatctgttgacctctctccctttcaagtttcgagaggaaaccctccgttcgtttacactgactccttatcttgtcttgtcttcttcttcttgatagccgatgaatggttacaagaacggtggggagaaggaggtgggatagattggacatcagtttctcagacaaacccagtacctccaatggtttcagagaagagtgaaccgcctccattcagacttccagagaaggatttgtcacccaaggaataagaaacagattgttcttctgttgttgttattgttgttgttttcctttcttcctttacatgtgtcgctttagtcatacatttctgattttgtgtcgtcattcgacggtcatagcaagcgagtatgtatcaaggagaaggaaaggctgtatacgatgaagcactgatgacgaaagaaagtgagacttctcgaataagggctctcctgatattccggtaggtttagaaatctcaatacgccgcaaggatacaaggagaaagagaacgtcttgggcgtcgtggaaattcagctccgttaaaaggggaaacgaaagaaataatcgctcactgtggacgactaatgacgtatgaagaacgagcgagactcgtttgtttccgactggtcttacctttcttccagtttgccagatggttacacttggctcacgtgagtggctgagacctccgaacggagagatgtgaagaagcgaaggcacgtggggatgtgcctgtccgagacccgacgcagtcggcttcgggatgcaggccgctcaagatcggcataggtcggcaagctcaatgatcttctgaaacgccagggatcccggtaaataaaaaagggctagagctctccggatgggtacagagtccactgggccagacatccttggacctattatcttacatcattttatgcaggacggaccttcccgcaaccttccatccgtcggactttttaaaaacgtcgatcgagaatttataacattttctgatcatttatttacagtataattctcgcctcctctgctacttggcgaacagcatatcaaagggggagaaagcagccagccattcttctgcccagagacgagagaaaaatattgcatccattcgcccatacaacccatccttcgagtggggccagggatagaactggctgaggtgatccgatatctgatgattttttcttatataaatgcaacatctccattccgtcctctcgtccctttttttctacttctttccagtagcaactcttgcctcgcttctgcttttcttgtcctttcgtcttggtcaaccttgcttttgttcctctgctccttgctttaccacctcttcacacacacacacacacacacacacacacacacacacacacacaca

SEQ ID NO: 1044 - DNA, 24764 bp, Xanthophyllomyces dendrorhous
cacacacacacacacaaactcagacggttactagcgtagacacatagaccccgactctatagatccctttactcagcgcgctcttaaaatcatcaccgtcacaccctcaactttacaaaaatggcatacccttcaatgcttcctcagttcaccaactctccccccgtctcacctcagcttccggcttctcctcggttccattctcctaagggcaactactttggatcctttggaatcccaagtactcccgctctgtcggatggctacgagtcgtcagattctgaatcttccggcccggaaactccccgtcttggacctaaggcttggtcgaccgcttttggagccaaccagacttcttccaggaaatcttttcctcttgcagccaacccagtcgatttcatccacaacattgatgacgaacaggatgacagagagcgacgacgacgaagacgaggactagcccacggatctgtatgtatcttcattccgtctctttctcgcttgtctcgcatactgatcgctcatcctgattggttcttcagaatcgaaccctcaaaacaatggccttcggaccttcattttccaaggcaaagcgatcccagttctcccgatatgccttttatgcccttactgccttcctggtcatctttaccttcaaccgagtcttccgaccaaattcgcccaccgatgtatccctcgagtcgaacccttcagagagagtatccgtccacagccgagcataccagaactcgtactttaacacaaagcgagtcgctcccaaccccgagaccgtccgagcgatcgccaagactcgacaggccatttccaagcgatccctcttcaagtgggccgatgaaaggtctgaactctccagcgtcctcaactttatcatcactgaggagatgaacgctctcccggccaacatggaccctacctcgcctgtcgacccagaagtcgttctcgacttcgatccctacacctccaccgctgagggacaattgatcgatatggaggtgtccttctgggagaccttccccatcgtactcgtctatcgatacgccgatgcctctgccaagaagatccagtcccaactagatcagctgcacattcacccggctcctgtcaccgtcgaccttgaagctcgatcggacgctgcggtcatcactcccctggttcaacgactggttgactatcctatcgaccagcccatgctctttatcggcggtgagctcatcggtggtttgaccgagatccaggatttgaaggagagcaagctcaagtcgctcatcagggcatccggagcaaaaatcatggttcccaagcgaaggagggccgatgatgattccgacgtcgaacctgtcaagaccgaggcggaactcgagatcgaggcagaaaggcagctcaggtctcaatacgaggaggagaggaagatggccgaggctgtcaatactgaatccatctagagatccttttcctttcttctttctttcttctgctttcttcttcctcttgctactttcgctatctcgtttgttcatctgcttcgctcaacctcactcgcttgcttactcgttctttctcgcatatcgtctttctatctgcttcaacacattgtttccctagttgcttttcacattgctttccatcttgttgtactcaatcattcgcatataccttcgcactgcatctgttttgctatcgctcgttcatacccgttccgttcccttgcactctagttcctttgtttcttgcttctgcttttgctttcgctttccttgcttttttgctctcgcttcttcatcagatttcttcatcccccctccccttgtcctctcatatatgcacatagttctaactatctgaatgacctggtctgatctgccacgttgtgaatacttggaacgcacacacacacaaaggacgaaaagaaaaagaaaaaaacagcagacaaagggatacatgggatatgagtgtgcaaacgaacgcgtgacgaatgcccaagggccaaagacgcaggagaacagagaaggacgcgcgtggccatctcaactgccctgacagaatgtatctcctagtgaatcaactgacctctttttctctctcttcctcttgtcctctcgttcttttactccctcctccaaatggacaagaaagtattaaaactaccactcaataagaaggaactaaaaggtatcgactcttcgagaagtcctatgggcacgacagacgttcataaagagaccatcattgcggatcccaatctggctcaagccggtacgacacccattactgtcgctcccactattacaactactacatcgaatcattcgggttgtttatcggatgatgacgattctcatgcatccacctcgtcctccacctcaaatgttgtgaccgagatggcatctgtttcatctccgctttcacaacggcagccagcccttctaccacttcagatgatatccacagctctatccatcggaccaacactcctacctccaaggctatcaaatctgatcaccgctctgtccctcgcgacaaaggtgtccctccgggcaaccgcgttctttatcgaagccattctcgaatcagctaggtattctaccagtctagggttcggtctgactagaagagcgttgatcagtgctatcagtagcgcgagaacgttctatgtcgtcaaagaaggtctcgattgggcaggcgagaaggttgccggcaaggtcgttcctgggctgaagggaagagatgacgcttttctgaacgtgttggaccggtacacaaacctagggatctacttgatcacacatactcttacattggcagagttgtttgcagtaagctctctcttctgttcgctcggcacatacatcgatctgaattcctagatcaaagagggagagtgatcgtccttagagctcatctgtcatcattcttctttctttgtttggggcccctttctctccgaccttctctctgctcaacttcctccttgaaatcccagatgtcgggcttctacctgacgttctctacgttgcacaccggtatcgccgccgcccaagaatccgtctcgttgtttgacgggatttttgggtccaacgagacatctcgagcattaggtacgttccttcttttaccacaaagtttttttttcctttcccctatcccgtttcgctaatcgagtgtgatattctcattggttatcgatgtcgcgcgcgggatgatggatttcttcctgtagcgagtatcgtcaccttggtcagaagagaattcggaaaggacgaacgatccaaaaagggaacaatctctgggttgacagcgttgacgaaagcgttgacggcgttcgcctgtcttcagaatgccacctggagaagaacggccggtagcatcaaacaaagagtgttcgtgtttctgttcctacctctctactcctttccatcttgatcttcactctgaacgttcagcttggaaagaagaaactgagatggatatcgttgtcttgttcattagattggttgattgtgtggtcgtaggagaactaaaacaaaaccttgaagacccagcttccaacacacaacaccatcgtgccaactctggatctattcaagcatccaaaggtccatcggaaccggtaaatccagtttcatcgccggtacattcatcccatcaacgacgtccatcaaggtacagcatcgatgaggaaccatcgtacttgttgacggatgttcggtccgtccttgcagatcaagaatctactactccgacgagatcggatcaacatcccgatagacctccgccagagacaaatccgtatgttgtcgagaatgaagatgacgaggatatcagcggtgagaacggaagagggaacagagaacaagacgatgaggacgagatggtccggaagctcagtatcttggtaggcgatgacccggatgatgttgtcgatacattccggccaagagatacagaacgcagacagccctggatcgagagaagggcgccaaagcggacgaggagcgacctgagtagagattcccatgaaggattcaagcgggatcgtttatcttctggagaagagtgggacgacacagaagatgtcgaagaaggagactccctatatgagatcaccgagcaaatcacagaacacatcaccgaaaccagaacggttgaacattataatccagagacctaccaggggtttttcggtctaggaaaagacaatgccagactcggttcatctccttcctcaaatcaaaggtcgatcggttcaaacatatttgagactccttcttctacggaagaagaacaagattgggtcgaggttgaagctacgttggggatcgcccctgcccagcctgatggccccaggaactcttactctcgtattagatctcgaattccaatatcatccgaaccatcttctacttcttcttcctctcccatctcatccacggcctcttcaccgtctacctcgtcatcttctagcacatctaccatcaagctttcatccgttccaattagtcaacctacaaacagacggtctatcgcctcgcaggcctacaatgacgcgttccagcacccccacaaaaactcggcaagagttcaggtgattctcaagactatcactcgaaagctattggagaagaaacggacagttcgtagactgccaactgaagagacgaacagaggagagtacatgctcgagactgaactatcggtcgaagggaaagatggtcgagcgatcaagaaagaacacgacgaaacgtctgatgagttggtgggtgagttgaagataaagaataggttggatccgatgactcctccgcctagtccagaggtctatcgggccccaagctctttcgataggcgggacagtagcaaaggcaacggcggcgatggttctcgttgggcagttgattgggagaacagatttaaccgagcgactgaaatggatagagaggaggaagaagaggtcagacaactgaccgcattcccgttagaccctagagcgcagatggaacaacattatccgtcgccttccacatcgacagattcgggcgaatccgattcatcgatgttgacgtcaacatccatctcgacgttatggccctcgaagtcccctcgctcctttgttgagtcacaatccgaagaaagggtgtccctcacgccgtcaaagaaggtcaagaggtgcccaaaaagcgcttgcgctgaccccatgagtgatggcagtctggaatcacctgcgactgtgtcaactcgttccgctttcgtcgacttggatgcggagctgcctagtataaataaactgagagttcaagacgatcgttctcagtcttcctccaacgcagaaacaccggatggtgggcgcaatggatacgtctctgatagttcgagcccaaggatcaactctcgcgcccatgttcgacatggcaccactgagcaaggtcataccaagacaaaaccgagagtccatctaccaccgcctttatcaccaagttccaattgtaaaacccgatcggttttaacccaagaatcccactattcctcgacaacccaggcaaatcctgatccagaagcatatcctgctggactgtttccgtacgatcatctcgtcagaaacattcacaagttttgtaggtattcgagcgcagcgtacggccaaaatttcttgaggatcttgggaatgggccagacggattttatgtttccgagtaccggaagataccatgccaactcctggggtacgtttcctttcaacgcgtagttctctttctgtgaggcagaaccatgggcttatcttttcttaaactctgtagcttttgcccagcacacaaatataccaatcgatgcgctcctactgtcctcatatgctgatccgaccccttctgcggcggacgagaaactctcgccgctcgttcattacattgctgttgaccatgatgctaaagctattgtcctgtacgtccctatttattcctcgctacttcctgtgtactttgaactgtgagcgcgaatgttcaagagctctttttgatgtaccttgtgggtttctgttcaatagaacctgtcgtggtaccctgtaggtccttggatttcctcctgttgtgaatcatccctactgtagagctcatcctattttcttatgtacagtggtctttcggatgttttagtggatttgacatgcgagtacaagccaatccctgtcgaaggcggtgagcccgatgggatctatatggcgcatagtgggatgctctacgtaagagatatctcttttcttcttgttatctaacgcaacattttcgacgaagcttatgtatcgcttatgtttcttcggatagtctgcgtcaagacttatgaacagcagtagcaccgttcatgaaacgttcgtgtcttcatcatcttttcccctgtgactttacttcgtgtctcctatcttgatctttgaaagatgaagcagcatggactaacagtattggcttcgaaatgagatttaggatcaagcaggctttaatcgactatcctgcttatggtcttgtgttgaccggccattctcttggtggtggggtagccgcgtatgtgtctctgttctttgctctttacatctgatagttgaaggcaactttctcacacatcttctcgacgcataattacacgtcgtatattccttttcagactactctccattctgtggtcctgtccttccgagtacttttcgaacaaccttgcttcgcacgaatccgtgggcccgtatccgccgatcggtactaaattcgtgaccaacatatcttccggtcttcctgctggacgacctattcatgcctatgtctatggacctccttgtgttgcttcgtccgatctggccaaacatacaagagatctgatcacctgcgtcgtccgtgagttttgtcaccttgatcgaattacagagcacaatatctatccaaacaacgcatttctagactaatgagcatatttgacctcgtctgctatggactctctcttttgtgtttctacagagggaaatgatattgtcccttcgttgagtctcggcacacttcgagattttcggaacgttgctttgacattgagcgacgaaggcaacattgctgaagagatcgtcggtcgggtcgtaggtatttaccaacgtcgacttcgcgaaaagtatggtccggttctcctcaaaggatctactcaacaggacaagccagtgcctacattgaaagccctacaagctgctgaacaagccgagagaccggaagttgtcatcacccgagaggaactagcgaagggccgaacaagaaactatgcaaaagacacaacgtaccaggactcgacgttaaggcctgaatatcccggtcctggcgaagccagagatgatagaatggaggcagaggatgaagatgaagacgataaaaagatgctggacgattggttcttttcgctaatcaagagtaagcatctcgttttgaccatgagcagatctgttggggcttcaaggacttgacacttatcgttggctgatcgtttcgtccggtatagctatgcgagccgatatggacaatgacaagctctaccctcccggtcgggtttatcagatggtatgtctattgaccatgttctgaatgtcttgcttctgatcatacactcacccgtctgtttttgttggaacgtgtataggaacattggacggtatttgtgactgataaacatattccaggatctcggcactctgtctcgccagacaagaagacgtccaaacataactcatctcataaggaagcccaccggattgttctcaaagcagtagaggatgtagagaagatgttcggagaatgtatgttcccttctcattattcatttctcttattgagaaagatctagctgaacatcttctttcttccttctgttcttcttcagtgacattctcacgatcgatgcttcaagatcatgtcccctccagatacgaacaaggaactcagctcctctatgacgtgagtcattcttcattatcacaacaaagtcgaattacatagtttgacaaacgatcaaccgtctggcgggaacctttgtcttgcgatgtatagggtctatttggaatgtggtagtcaaacctttctagttgccatcttctatcgtagtctatcttagtctatcgcctctttctagctctacttactcatgttacgctctctccgtcgcaatccaactagccttgttcatatatctattccagtatcctttccttcctgtctcccttcctctttcccttcctctttcccttcctctttcccttcctctttgaaccagaacatgtagtcaccgctgtatcttattctttcattttgttaaactacttgcacctaacactgtatccatccaattctccttgctgtattctctccatttacgttttgtttttaacgaattcacgacaaacccatggtaatgactttgttatctatttaagttctcgttcaaagtatagttctattgcttttactaagtcggctttgttcttgcttgggcatctagacgtcaaagaaatcaaagagcagatagattaatatatgttctgatcagatcggctcccgattgaaaggggagccgacggagaggaacaaaggggaagatacttacgagacagaaattgatttcaaaaatgataccaaatctataactcgatactgaaaacgtggttatttttccccgtttgtttattttcataaaaactttcagagtcaaggaagccctttgatgaaagaaaagaaagaaaacagacggaacacaaagaacggattgtggttctcactgttgatgaaagtcttcccgctcggtattcttcacgaaccgaagctatgtccatctcccgagcaagctaccgggaaaaggataaatgaatcaacggcacggatcaaaccagccgatttatcggatcccatcaaagacccgaacatgggatcgagaagaaaattgactaacactcttggttttcttagctgaaacgagggcgtcgtcactgtcatcctcgattccaactttcctttttctaggcttttcaaccgtctcaagtattcgttcgtcttcgaatagcccttccttgaattgtttcatgagtttcccagcccgctagtgaatatcgatacagaacgaatgcggtacatcagatccgagacgtcgtgaagagggagagtttcacttcctttgatcgctttcgcttttgatgttgatcactggggtacgaaacaagaaatagacgacgaaccttaatcatgtctttcgctaaaggttctgtcttatcctgaatccgctcagcctcttcttcgccgaatggctcatcgaatgcgattgcttgaagatgtgcattatacctggatagagctaggaatatatgatatatataggttgaaaatcaggtgatcagaacaaggatgagttgacagaccggagcttggacaccttactagggtttgggaactgttcgggtagatatcgatcatccttctggagtttcctgatgatgtttcgcatagtttcaacgtgcatctcatccgctgaacaaatccaacaacaacacacttgagcctattccaagaacattgaagaaagtagtatgagacctgcgagggaacagaaagatctgcgcgcaccatcatacgaagcgttttcctgagcctcctcaatctttcttggtggtcctctaatatcgtccttgaacggcagagggactagatggaacccaggtgctttgtcctgtctttcgtcttcgtcaaatgtttcctcctatgctcgcgaaagatgtgaagagagaggtagaagataaataggacgtgtaagcctcgatcgtaatcgagtcgaattgaacaaggttatacctggggaattagagcgcaaaagatgggcattgagccctttcggaagagacaaagccccagaccaatcttatccttctctaataatgtcttgttaagcgaggcaaatgttcttcgggagccagtataggtctgaagatagaattaacatagcagtaacgataatgataaggaacaggataagtggatatcacatgcgcgtttacataagaggtggtgatcacgtacatgctcgttcgggaaaatgaagtagctgtttttgatgttcatctcaaatgtcaagaatgatcggctcacaaaccctaggatacttatccctggtcatgtgtatcattcgccgggacagatccaatgaactattgaggcacgtacgttcacttgaaaaagtatttagatatgcaacttaccgggtgatatacctaaagacttgagttggcttatttcttccaatgaatacgttatttgctagaaggtagcaagaccgtgatgaagacgataattagttactctctagccaggaccaatgcgtagaacagaatgagaatagagaagggcacaaatagaagaacaaacctccggacgatcagactctgactgttttcctttccctctatcgacgatatctgactttttttccttttcggactcttcgatgagctcctttgtaccgaagcctttgtgctcaaggtagtcttcctgggctgctgactgggctgcataatctcgttgaagtggaggggctgggtcgcccagtttattatgtctaaacgtctgccgaaggttctccggatcaaatgcattctttacctatccgagataagaaggaggaggtttgttgacaacggacaagaaacttggagtggaggcgcagatgactgagtgaggaaaacctgagcactaacctctgtatctagcgagtcgtaatattcaatttgaggaattgcttccaagcagacttcgcctgacgcgtccgtcatctttgtagctgatttcttagcctggacgatatgcgcataccttattttcataccaagcaagaaagccctctctgatgagcatattctcggctgtagtattaccttctttctctaggaaaaagggggactatacccttggataccgataacgagttgtcttctgacctccctgggtgagcttgaatctccagaatctttcttgcctgaaccaatgatcattgggagagaaaatattgctcgtttgctagtctgacgaattgtcatctgtgccaagagctctctgaagtcgactaggccttcagaggccgagatgaattcggtttcgatcagacctgttgaccctatactcagattgggttctatccccggtggtgataatacgctctgagatggagaagacagaagaaaaggtggcgaacattaatgtcaaacattctagaaaacagggaaaagacaagaaagaagaaagatatcaaatgtacctgccagaataaatccacatcgaacaacttttcttcgctcccaagcaaaaacggcacaacgctagctcctatcgtctgaagatcaagcagatgcgtcttggcggccattacagcttgacgagcctgattcggatcgtctagatgcttcatcgggttgtcatcgtccgtgactaagaacactcttctagatcctgtgcggatgttcctgtgttcatcggtaaggatatgaaagtcagcagagagagaaagatgcgcgctaaaaaaacagaagggagttagagaaagatgttggtgctcacgctgatcggaacgctccgttacaatgactaaagagttgtcctggagaaactgatggttgatctgaagaaagaggagggaacgtctcctggaagaagtccgggttactttcttgatctgatgccatgcgagttaagttttccgggacatcagtacatcgatctcgtcatttcaagactagtttaaagatttacgatctgataaatcgatcaggtatttgataggctctaggtcgagcgaacctattgggatgagcgtatagatccctttggggtcggtcatgtgttgttctgtatcatccagatcctcgcgaggttctttcctctttgtttgaacagagccaaatgttccgaggcaggagataatcgtcagacccggcattcgtttgctacagattagatcaaagctagacagttaacaaaccgtgttgaaaatcacgaccccaactagatccgatggtgaggttaaggcttttcctttcattaactctatagcacacctcaacgagccttcgaagaacgaggcttctggccgatattgttctgctttggtctcttgatcttggtccgattgaggttcatgcattgtggacgaagcatctatacagatcagcacagcatctcttgaagaggccctgtactgtcttgcggttcgtgggttgttgttgtttttttttagggaaggttttgtttagtgagacctgactggcaagacaggaggggaatgagaggaagggagtggagaaaggggaacgggaaacatacgtcctcttccatgagttctatatcatcaggttcaccttcatctatccagacgtccgatcgtaaggccatctgtctctcttccttctttaccagtacagcactggccagtgatgatggtgatcaagttttccggaggtgtatagatgatggccaggccaatatacgaaagatgataagcgagatgagaacggagatacgcctcgacgcgttttaaagacgcgtcgagatctaaaatcgaacgggctctcatagcaagtgtgtccatagggtctctgtacccacatgatgagttttctcttgtgattacaacatacgtatacatatatatgatctagatcatcctaatgattccttttcttcccatcttcgttttcagtctttcggtcgactttacctaagggtccgaaagccaacctaccataacccttaacgagtccggcagcgcctcctccgagcatcactccgaaagctgcacaacctcctatgagtgcgattagaggtgaaagcacttctattatcgagtatgatatgcggtaaggaagtacgatggataggtgaaagaggtagccaattgggagggtgattgggaggagaatatatgtcaatatgatatagagcagtctcaacagggagagaaaaaagctgccgagaccaagaagggcagcaagtagtatctctagggaaggttaaaagagacgtcggtttgagtgatatgtgtcaagagagacgaaaaagctagacacttacgtttcgaggcggtcttggctgtatcttccgctgaaccctctgtcagagcagcttctataggttcgactttcttctgctccgtgttaaagtgttgacgactggttaaaaggcgcttctcatgggctatgaattctaccagatcatcccatttgtctttggcgggttcgaccgacagcgtcaccggtgggttcgattgatgggtgaccggagatggcgcaatgggcggcatggtcggatgtccggcggaggagacagacgaaccagacgtcacggcagccactccgttcttgatagctcccgtagctgtcgaggaagagaatgtccagacgactgaacacggtaggcagaaggtgtgagaggttgtgttgtgttgtgatagaagacaggcaaacgtcaaaagtcttccgattgtctatcactcactcagaggtacacaaaccgaccaggctatcaacgatttgaacctggacagcgatggagggtttgctcgtgccaacttgtgagccctacgacgtgttgcttttgctatcggcggtgtcgaggacatgatatgtttgctctagagattggaaagctacaaagatggaggagattatctcaactgactatctggctatgagaaagatgctggcaggaatgacgtttgatgtaaccaagcacagcatctgttcgcttcgcgcgatgtacaagaagctgtgcaaatagctgtgtacggcaacgtatctttcgatgattttatttagatccgagctatcgaagttttcgatcagatgccggcgatattcccggctgatagatctgagaccttccgggtgcactccggaccccgggacatcggagatggttactgattgtgtaatcaccctctaattcctgtgcgtctctccggtaagtcgttcgggatcggataaccgaaacagaaaatcagccgccgtaccccagattgaaattgctcgtgaacaggacggccatgaaaagcagaaaaaagaaataaataaataatatggacttgattgaaaatgtaatgagaataatatagtgaaaaaccttggccgactgcgtggactgagcgtcttttttacacagtcacttgccaccttttttctttctctcgctcgtcctttcgcctagaatatccccgcaggtgtttctcgttctctcgttaaagtgccttctttctttttctcggttcctttatttcagcgctcccctttctagttggtccatgttgaaatgtccggagggcagttttcgatttctcattcccgccggcggcccgaattcagaacgccagcccgggcatagggagattttgatcacgggcagttgactgtcacgggaccatacgtacacacttttcatgcccatgctgcaataatcattaacataccgcgcacagattggcacacggatcctacccgctcgttcaaagccgtggcctccctttcttctcggcatccttttcgtttgagtatcccatctttgcccgaaatcatcccgaaacatgtgcatctattttttcctttcatctatatcgccaggcattgatagaataaaagagtgagagaagatgtatattgtgtccgagctttatcttttgtctatataagctggcttgaccttcctggtctgccaaagaagcccctctcttctctaccaactcatgttgacatcttctgtcggacccaacttcccatacagggaagacggggagggagtctcaacgtctctctcctatcaacccaaatcatttaccctttgtggccaatcaaatcactgcttttgctttgcttccaatcagcgattctgccttttttaactctgcttcgcactcgcactcgcactcgctttctgttccgcatcgctcgttcttcgcacttgtgagtgtactcgcttgtcgtctttgcattccaaaaaaaaattactgaaacttcatcaaatttctcaatctgataggcttcaaccttgctttcattgtcatgtgtttcaatctgctttcccaaatctgcttggcttagcctacgaattatcttaaaaggtacggcgcctttctctatccttccctctcacattcgtctttactaacatgtacttgtcgttctatcaattcagcgctttattctctgcgctaggaaatttgaggcgctatctctttcgcttttgctttcgattttgctttgttctctttgttgcttcttgccctcgaaccctgcttggctcatttatgcttgcttttttcgctctgctttacttgcttgtgatattcgttttgcttccaccatcttcctttagcctaatttgattttttgcttttccgtctgcctgctttcattgtgcttatctacttctcgtctgtatcttggttctctttgctcgctttttgctcacatggcgctaccatcgtttcgcttccttcgcatttgttttctgcttttgttaccagtattatttttcgtaatcgaatttgtttctgttttagcttcgcaccctcgcattcgttcatctgctccttttgcttataccttacaacttgcttttccaaccttgctctatctgctttcctaatatgctttacctgctttatttgcttcctatctttacctaaaagttcctttgtccaacagacattatatgtacctccccctttttacttcttcacacttcactgtacatatttctcgaccttcgtcaatagccttatatggaccgaatatatgtatctccgtttaaaccaatacaaaagaagtgacacaaagaatttgaatgaggggaaaaaagaatacaagatacaaaacaaaacagaagagaactagatggttagagaagaaaaggtgaagaacggaaggggtaggtaggtgttccagcgcaataataaagacgatcattggataaggaactcaatgtgtagattttgccgcatcttattgtctaaaagaggaaagaataaagaaaataaagaatgagatgaatgatcggagagtgatccgatagagtgatcgaggaaacaaagatgcataaatacatatatgatacaacgggcaggaagggaacaaaaagaaaagaaaagaaaagagtgaatggaaattccatgagacgcttaaatcctgaaaagtgaagaaatcggggagaagagaaacatatcttctccatgtattcattcaactagccatggatacatatgtgtacgtattatctctgagaattgtatatattccggcttgatgagcgtcacaagttgacctttaaggttgatccttcagccggtctactcgcctgcctaccgaattgcacttgactagcactatccatcccccgaggacttgagatctcttggaaactagatggcagaccttattgaaatatatttagaatatatttagaatatatatttagaatagttgacttcagttacgtaagccaatgatcagtcaaaataaccctaaccttctcaaacatcaacacggtcccagccgacaaagcaatacgacatctcatctttcctgcctcccgcctgttctatcaagaacccttgtctctcttttcttgagcgacacatacggaagaagaatgagactaacacacacaagcgcattatgcgttactttttgcattactggtgtgatagattcgtttgacgaaggagacgaacgctgtactcttcataacatcagaatcattctcgccgacctgttggggctcgaccgaggcgtgttcacagcgaagccttggagaaagttcatcaaggtatatgatctggatgctctcactttctctctccatcccatcctcttggaaggatgtattcagtttctttagggctaggaaagggctgatcattactttcttattatcccttcgctgtagcgacgcgtgcttatacatatgaaggtgagtcccctttcacgaatcagtccttaaaagacaaaaggaatccaatccaactattatctcttattcatattccgaacaacttcaaggctcgttttgggctatgttcaccacttcaaacatcgttctcccatccctatgtgccgacagagacctcactgtgcaccctgaatccatcggttggtttcccgtccttcccgtcgtctctcgtctttactcttcaatctaacaaagtttcgacttatgctgactatatctatctcgttttttcgctcctattccgggagataaataggaacctggatctccagtctccagaccatcgaccgacagtccttctatcgggtcagaaccaactcccgacccatcagatcgttccttccttctcgccacgccctgtcgcgcccgatcctcttcactgacggtacagaccaccatcccctcgtgttcacgcatcgtcaaaaccgaaccaatccaaacggactctgttaacccatcagatcccacgtctagctgtctctcacattccgatatccagcaagccattcaaagggccagacgttcagaaccacgcgaccacgacctagacgcgtcagttcctataaagagaacagaagctcgggtacagaacatcatcctagatgtttgcaggaggatggggcagatatacccagagttgacaataaataataccgaagaggattatgaaggagacgtgaaggtgaaaatatcagagatcaaacgagggctggaggggtccaatgaagtctctggaagtgatcacgactatgatagcgatgacggcgatgacagcgaggatgaaggatacaaaggagatcacggccaaaaccgaactttcagtcccagaaaaacgcgttcagacaagaggaaactacaggacatgtcggtctcggaagaacaagaccgaagaagatttatcaagacacaatggacattggaaactgtacgcgttgccctatcattcctttctaccttctacttgttccattttgacccattagccctatggtgtgctgactttccttgtgaaggagagttcgatcgtctggctgactgaaaatcgttctacttttgttttccgtcgagtagcgtccaaagactcggacatgtacgacccaagaagagattagacaactcaaacggctcatacgtgaagtaggtgtccgtaagaactggggaagagagtttagaggaagagaacttgatgtatgtctgaaagaaaacatttctcttctaccaccgcttcatttcttacatttatttctttgtctgtctgatcggttgtgtccgaccgacgcgtcaacgggtttctcactctgttctcgatggcttttccccattttacaataacctctagttcaaatggcaactcggttatcttcagactattatacatggtgtcaagactcagcaaccaccgtacaccgtccagatgtatcaaaagctcagatcttctgaacttttagctcggaaagctgaacatgtagatacgccgacagaacttgaaggtagtattttgaacagatcggctagtgagttgtctctgtctttaagagcgggccatgctggaccagaaaaagcgatgaacgtaaagagttggagagggtggagatatatcatggtgtatgtttcttgcttctttctctttttcccgtgcaagatgagctctgatcgtactaaccatttcgaattctttgatcataagagacgagtacgttcagatcactcgaggtcttctctcttccaaccaggatccgacctcacctcctgttcaactgttctctatctctctttcctctgtgtgcattttagtgaggggaacgaactccctgatgctatctgggaagcacctgtccgtccctttctttgataacatgtgatccttcccaaccatttatcgcttgccgcttactgatcatcatcggtttgcattggtttttaccgccgacctttgcctttgaaaatgaacttacagacaaaacagatgaaggtgaattttcccttactttctcttgttatatacatgacaagattttgaggatgtactcacctcgtttgttctcacttttctgatatataggagtaggagacgtagattgtaaaaaagagaggaggaggttgctcaagtttccttctgaatttctcagtgttggatttcatgattttgaagtgttaaagaagagtggattgtgaattttagacaaaaaaaaactacatagatctcttcaaagctacaccaagtcttgacctcgcctgatgtcaatcaacgtgtccgagtgcacgcttccacatagcctatcctctctatttactttttcgaccttttcttgacaacctggtaacccttcttctttggttgcttctctggctgatagaatgggaacctgaaaccactgagcaacatcctagctctgttttgagcgcccaaccccctttggttggttataaagctgatgtgcatgcctgtcaacctaggatacacatccagacaagcttcaatctgtgggaagagagcgagtgctgcccgatcgagtccgaatgtgacgacaccggaggtggaagatacggattcaggctcttcctttgtctttagtggaagcatcttcacccctggccattctctaatccgaggtaggacaaactcggtgagactctctacaaatcggtacatgtcgtctcctttgagagtgatctttgcgccgacaggcatccccgctcggagggaccatgcggccgctccttttttacctcgaatgatttcaactccctgagtgtcaacatcgttccctgcgttcttgacctggccggtgatcgtcctgagagagtgaagcggtccaagcaaggaagccttcttgccgatagattctctgacaaacatgttgatcgaaattctttccagtcgtggtatcgtgtattcatccactccgtgtctcgttgggagcagactcgatcgagctccacccggttgagggtgatgcctatttgccgcaaacgggttagtcggatctttttcgacccacgacagattcggtcgaggcagatccggattgatagctattcgatgagagtatgttaggtagagcaagtcgtccgtcaggacgttttggtaaaagtctttcaatctgttcgactcaatcggtccttggaagatctcgggtagaggcggtaggggggtctcgtctttcggcgccacgacggtcgtcgccgccttaggttttggtgtccgagcggagagagtgggggtagtgccaaaagctgctcgggagaggacggggagagaggaggatgatacagagggaaggaaggaggagagcgagagggccgagcgacggaaggccattgctaggatgaagtaagaggcaaaggaaaagagagggaacgagagacggagagggatgcagcacaatctgtattgatgccaaaggtagatggaaatgccagttagcgagccgatctgtcaaatgaggcaattcggtttcaccaggaaagaaataaaacactgaaggaaacagcagacccaaaagggtttaggaaaaaagaaaaagaagaaaagaaaaagaggtttgatagacctcgaagcgagcgacagaaaccaagcgttctcgagagatctataaacctcaaagatgtaaacatacctatgagcgatccaccaagcgatgtgctatgtatatgtatgtgtatgccgcaggtgagtgagagcagagaacacaaaacacaccgacagtctgggctggttgatttgcttgtcgagagggaagaagcggacaatcaagagaactctgggtgctggcctggttacaaactgatggttacgacatctcacatcaggcacaagatggctacgacgcttaattaggtaagcaaagccgaatcgggtcctccccttgttccgtctgcacgtacctcgttcctttcccacagcctttactccttcaacacccatcgtctctttctttccttccttccttcctttcttcatccccatctcacatccaggccaacaaagagtacaccagtttatttagaagagagacagacacttctacgtttgattctttccagacagccagttgatgtttagcaaccagctaaactctgtacacaacgtatgtggtctctctttctcgggtgttggacggagttgtgcctgatatttctttctttccttccttcttgtgttcgtctgttgcatttcttctgctctctctgttggcgatgatgatgatgctgctatcctacttcatgctggtcttgctcccaaacagcctcacaggtgagaaaaaaatcactcatctacttcttccctttgatcaggcctatcctttgttgacatctgagctcactctctttttttcttcttctcttctctacctctccttccgctttctgtcaaacagaggacgaactgcccactccgcccctccaacagctatacattgagagcccttgacccaccaaacgcatttaacttcaacttataaacaacattcaaaagagctcatactggctatagccttcgagttttttcaaataaaaccagaccacttcccatcttcctcaaccttacccttccaccaactctcctttcaaacacaaacaaaaaagaacataaaacaaaatcaacaatgagcacctcaaacagattttctgctcttcaggtgtcgtcagactctgatcttgataccaagactggacccggtgggctcgactcacccgactcacccggaacaccctatgaagacgatactatcggcattaaggccagtaccgttcggagggagattgacgaaaatgtagtgatcgctgagggcgaagaaaagtgagtagactgacacttttgttgatatgtttttctgtacaacaacttactgaccgtcgtgcgggtcactgtacagagtgacattatacgtatgggcactcgtcaccactgctgccgtcgccggtcttcttttcggtatgtacacctcaacttccttggataatctgagcatcctgctgacgcgctaaattctttgttttaatgattaataggttacgacactggaggtctgttgcctgcttctctcatattatccaaataactaatttagcggttctgacagtaagatcgtctttacatgtgtcaatagtcatctctggaactcttgtctcgatcggtagcgctctgggaccagctgtactatcgagtggccagaaagaattgattacctctgctaccactctcggtgctcttctcggaggtcttgctgccggactttcgtctgattggatcggtagaaagatgtatgtccttctcttcacgtccgccgagggtcttgctctgtgtcttaccattcttttttgtctgatctacagggtcattgctgtcgccaatgtcatcttcattgcaggtgctgttggtcaagcctgctgtcacactggtaagctctgttcccgctaggatcatccacggttccaatcatctgtactcatgattgaccttcttccttctccctttgacagtctggtcgatgatcggctgccgatttgtcattggtctcggtgtcggagtaaggatttgcttacgttttttgtgttgataaaagtgctatcctgacgtccttctgtcaatcgtttcccatctatctaggttgcttcctgcgtcgttcccttgtatatcggagagctttcccctaccgttatgcgaggtcgatgtgttaccatgtacgttctgaattctttcggcattttcagtcagagtatatctactgactcctcggaactcttgatttgttttggaaccgacagcaatgtggtggctatcactcttggtcaaggtatgtctcgagagttcttcgttcatacatatgccatgtactggacgtggaagagaaattgatcgacgcactgttcctcgattctttctccagttatcgcctacgcaatcggagccgctttcgccgacgtgcacaacggttggcgatggatggtcgtacgtcttatctcttgagtttccactctcaggaacctatgttctctcgctcaaccaacacttctacactttcacttcttcacagggactcggagccgttcctgccgggatcgatcttattggactcatctggcttccagagtcaccccgaattctacttcgaaacaaaaaggtcaccgaggcggagagtgttcttcgaaagatgtacgctcaggcgactccagctcagcttgaggcgaagcttcgagtgctcgaggcgagcgtagagcagagcagagaagtcatccggaccacgacagtttgggacagaacaaggagtatgctggttgttggtgccaatcggagggctctaagtgagtttcttcttctctttactttcagttgccttcaagttggccaacttgagaacttatccccctctcttcacacaactagtcatcggctgtggattgcaggcgttccaacagctctgcggtttgtgagtcttccttcctctttctatgtgattcgggtagatcggctgagtccgctggctctctttctcgccttttcttcactatagtaactctctcatgtactacgtgggtgatattctctctttagctctggtaatctaccttcgctactcacctcgttcatgtttccctcttgaccgatataaaacagtcggccacgctcttcaagtctgttggatttgacaactcgaccgccactgggctcatcatcgccgctaccaactttctggggacggtacttgctttaaagattgttgacccggtgggaaggagacggatcatggtatggacggcgcctgggttggtcatcagtctgatcttggcctccatcagtttccattgtgcgttcttttccctttctctgtttcctctcggttatctcgttggccatcaaccgactggacatgggttgtgcatatatttctttgcagtcttgacaatgtcgaccggaggcgtgttggttgatggaacggattatcctaaaaagtggtcggcgttggtacttgtcttcatgattacctacacaatgagctatgcaaccggactcggaaacgtgccgtggcaacagggcgagcttttcactctcgaagtccgagggttgggaacaagtctttgcactgctactagtgagtgattctctcgatctctttcttctgtttgtgatcaagagagagtcataagatagctgatcgagacactgctgcttctagactgggctatgaacttggtgattagtgctacattcctctcgttgatggaggccatcacgcctgctggcgcgtttggagtctatgccggattctgctttattggctggctcttttgcttcttctgctaccccgagacgtgcgtttcctctttaccacttctttctctctgttttcaggacgaggtcttttatctgactgtgggctttacgctttgttttggttatttaggtctggcctctctcttgaggagacgttctacgtgtttgagaacgactttggtattaaacgatcccagatgctccgggcggagaaacagtcgattaagcaaaggcaccagcagcaagctgatcgggtttgagcctttcaaccagaatagaactaggacagaaactgttatatattttttgtttgctcttctagaggaactttgattttttcaaaagaaaaatagtataggaaatgctcgtgtaaaccctgtagttgtcatttattccttatcctttcctcatcctttctttctctc

SEQ ID NO: 1045 - DNA, 3891 bp, Xanthophyllomyces dendrorhous
ctttctctcttctcttctctattctttatatttcattcattgctataataatctttacctactcttgcgtttgcctctctctctctctcgtttagatgccctttgttccattgtgatagatgcgccgtatgcacgcgcccccacgcgtttgaaatcacgtaaccagatatgcaacaaccaccatgccaaagtaaaagagaacatgaagagaaaaggagaggatgcgggtagctcggatgaacccaacagacaggacaccggcgatacagagaagggcatgaacagagaacgggattgtcaacgggttggacactctatcatactgtcgctgttggctatgtgacaacgatggctgccttctcgtctgtctttcccgatgcgtccaggccgagcagaaggtacaacagcaagtgtgtatatatgtgtgtgtgtgtatctatccatgtctatgtctatgtccatgtctctatgtctctatgtctctatgtctatccatatccataaccacttccaaatcaagcaccagaacagaactgaaacaaaaccgctctgaaaccttgtcacgccgattgtcacgctgttacaatttttgttcgtcacagaaatccctcttacacccacagtcttacggtcaccacgctcttacaaggacatcttacagacctcgtcttacgcccgtataatggacctcgcccatctggatgaccccgctcacttccatccatctcctcatgatgtggaggatgagtcccatcatcaccatcaccaccaccatcattcccatcactcacatcatatagatcaggtcgtagacgacgtggatgacggcgtggtagacccgtcgacaggacagaccccgccttcaggttcaatcttgatcggtgagagccatccgtcggatgggttaccttcacccgctttggattctctgggccatcagcatcattcccaacaccactcccatcctcatggccatccgcatgcgtccatcgtggacatggatgacgacggccaggtcgtctcgggtgtggtcggctccggcgtgggtggtgtcggcattggagatggcggtcatgaagatctcgagggtccccaaggcgcttacccgatcatgggtgatatggttccctcgggagatcagtcgtctcccggcaggcaacaaggtcaaggtcaacaaggccaaggccaaggccaacaaggtcagcaggacggtcagcagggtcaaggtcaacaacaaggtcaaggtcaaggcgatcagaaccagcatcaacagcaacaaggccagcagtacgttcaactcgaacagccagataatggctcaggttcatccggagactacagatccaatggcgcgattaacgggatgccgaacgaggaggccacgaagaagaagtcgagagcttccagggcgctctacatgagagagtatagaaagagaaagagtctggggaaatcaccaggaggatctccaaagtatgttgcgtttcttctttctctctctctctctacaacagcttcgttcgctttcttttctccgagttcaaccaacccagctgcttagtacatccaattgatgtgtacatacatgctgaccctttcttcgttccgatttcttctttctcccgtagcgctaaaccggacatgcatcaaattcaacaatccaccccatcccgtttatcaaactcgttctcttcatcctctctcaacttgtctcatcaagatccgaatttactctcgcttgatgatggctcccccggactgtccgaccaaccatctcacaagaaacaaaagttgggaggccaaaacggcacgccctcgccttcgtcgaccaccggtggtggacccggtggggacggactcgggaacaacccgacagagaccccatcgcccggaagaaacccttactcccagcttgcgctctctatccagcaagtcgccaacaaggttccagatctatcagactccttcaccgatccactcttgactgcaggtgatccgtccggcggccagggcggtcagcaagaccccccgtacatccctcagtacaccacgttccaccatcctcatcatcttgacgtcctgcctttcccgagaccacaattcttgttccacctcgagtgtaggtttctgtcttcttcctctttccttctccgccttgccctggtataacagttgattaaaaaacttgcgcgcggtctctttctttctcatttccttcggtaggctacatggagacatttaggtccatcggcaacggtccttatggtgaacgatatagtgtagtcgtatgtctcttctcttgtctctcatatctagccgatctctaaacgccctgtctgtttttcgaaaatgtagttcaaaggaggacagttcgaaggtcctctgatgaggggaaagattgtgtatgtattcttttccttttccttctacatcttttaactcatccaagatcggatgtgaactctgaactcttcttctgcgatcgggtaaacttaggccgggaggtggtgattgggaacttgtggagcccaacgggaccgctcatcttgatactcgatacgtccttgagactaacgacgtacgtctttctttccctttatcttggttcttctcaccgtcattttactccctccacatttactgataagcatgtccggtgggaatcgcacacatatgcagggcgcatcgatttacatccagacaaaaggaacgagaacaggaccaagccatatcctgaaggcattgggagaagacaagtcgatccgagcgacggattacctgatgaggttgcaatgtactttcgagactggagaccccaaggtttgtctccctttttcttcttcttatgatctcctctttccctgttcctcaatcgatcaccaaaagcaagagatagaagctgacatggattctcttggattcacagtaccaatggttaaacaaagcggtatgcgtcgctagtgctgccagatgtggaaaccaaggtctgatcgttcttttctattactctgttttggtgtacgaattcgcactgatgcttgatccgttcgggatatctcttaatggaaactagtcgtctatgactgttaccaaatcctttgatcctctgctcttttcttgctcttcttcggatctgtcttttctccctgtctctttctatattcttttcttggtcctccctctttgtctcgttcgatgccccttctctttctctttctctttctcttgttcttgattgcgatcgagatcatcttatacacgaaacaagaaaaagagaacaaaaaacataacacttctttcccaatcccctttctctctctcttgtcttcgtcttttcttttcttctcagacgatcgctactcttcgtcggctattcttcacctatctatccgtcctttctgtttctttctcctcttgatacaataaattcttattcgatcgttcgatcttccctttccttctctcttacccctgtattctttcctcttctctccaaatcttgtcttactcttttcggatctcagacctctactccgacccgagccgtctcgacctgctccccttctcctttttttctttcgcttttcgtctttttttttcctttcttttttcgttccctttgtttccgtgtcctgcttttccttatgctcgttccctgtcgatgttaatgtcaatgccgataccgataccgatatcgatatcaacatcaacgttgggctgggctgggccgggccgggccgggctggactgggattaggcgatagggctagaagccgaggcttcgaggtccgacgatatcgaatgtatcattatcatcatcggcggcagcagcagcagattaacatatccatcagagcaaacgggacggtcggggaggtcgtccctggactg

SEQ ID NO: 1046 - DNA, 757 bp, Xanthophyllomyces dendrorhous
gtgtgtgtgtgtgtgttttcgattccgtgttctaagactgatagtcagaccgaggagagaaagaagagagaaaacaataaaagacaagaagaaaagaaaagaaaagaaacgggatgagagatgagagatgagagcagactacattagaatagactagataaagtcgaagatggaatgaacgtcgaattccgatcctcgagactcgaagagcgcagggaatggattccgaaggtgcaaaaaagctgaagccagaaatcaagctaagaatggacgacataaggaaggcaaaaaggaaaagacaataaaggggcacgatacgacaagagcgaagagaatggaaaagaaaagacgaaagtatgaccgagaagaatagagaaaacaaaagaagggaaaagaagagagaaagactaggagtatagcatggattcagtattcaatcctagtcataatcgtttttggtggcagtgctactgatatcatcaaacacttgatgatgtttccaagatggaactaaaagagtatgaggaagagtccgggatggagtaaaacaagatgagaaggaaaagattgaagagaggagtgaatatgcatcaggcagagaagaagagctaaacaagacagagaaagttggattaaataaagtagccaagaagaccggtattccagggaaaagaaaagagtagaggtcgtgggggatatagaagaagaaaagtgctgatgagaagaaagggcatggtaattatatatatatatatat

SEQ ID NO: 1047 - DNA, 65180 bp, Xanthophyllomyces dendrorhous
gtgtgtgtgtgtgtgtgtgtgttgtatttggccatatagaggagataaatttctttagtaagtccagggctaattcatgaaacaacagagagaacggtaattgacgcacgcagtaagccctcagatcattctctgcacctttatccttgacgaacaacatgtccgcatgagaagctgcactaagatctatagtcgtgggcaaggggaagaacgatcagataggctaatcccttttctaagaacgggagggcgatcggctggaacataccagacaccccgtcacccatgaagaatgtggtaggagggttcggcaggtttgcgtaaggaaggatagctttggacttgtcgtgtccgaattcactaggttgtgatttgacagatgtggtgaggtgatagcgcgtcaaaagaggagaatccacacaaggagtcaaacaatcaaataggtaagtatatacctctcaggatgcctaaaaactatttcccatgtatctccctgctgcttttcgtcggtaaacttgacatcgtttgcgatgatctcaatcttggacgcttcctcctcgccgatcaagttcgatagcaccgctcggactggttacagtcacgatgacgacatggcaagagatcgtgatcagagtcatatactcaaacgcaagtcgataggaatcgtccggcttactgagaggagtcattccactatagaaaacgaagcgaagaagagaacagaggagtcaacactgatggtttggcccatagagaaaagtaggacaaccaaaagaagagagcctgacgaagagacaatgatcacaggaatcttgttttccttgcagtatgcatagaagtttttgaacccagggtcgagccgaacgttctctcgaagaatttgagcgcactcagggaagggtatcttgactgattccaacatctgtcggaacgagtctctgtatcagggttccaatttcgatgaattacgaagtgagttatattcgaccgggcgaaggatgcactcataatgatagagaaatgtgactgagaaggacgatgacaaacctgaagccaatatggcccatgagacaacttgtgttcagctctcgcctcttctgtttcccaaagcctagattgtcggtcagataatcgttcgagtccgtgttggtgatcgttccgtcccagtctgacagaacgacgctgttcgtttccgggcgaggtgaaataatcagctccagcgctcaaggaagggagcgaagaacaagacttacaacggagcatcagtatggagaggaggcagaggaagaacagacatcgtttgagaagagcacaatgaaagaaaagatgagaacgagagaaaggagagaggaagaaaaaacgtagagagatcaagagatggaatctaggaacaggaacgggaattagaagcaggaacggtcatggttacatcttgaacgtatctctgacaaaaaatgccgtaatgccgtaactgaccaggcctagaatgcataaccgaccgtagccgatccgggtagatagccggacgaagagtccttatcgatcctgttattccctgaccgacgtaatccgaggcggacatgatggtcggttgtgtgctgtgttttcgaaacagtacaccaagccatagtcttctttctctagccgcggctcccatcggtgacggcgatggcggtgatgatgatgatgtccatgacgaagacgacggaaagcataccgaatggggggatttatcctatgcgttcgaatggacgcgcataagtgtatagacgaacgacaaatcgatttcacgcgcacatgtcgcgcacatccaatttatctccttctttccctctaattttttttccttccgttgttctcagcgatcgtctacgggttctgctggctctttcagtttacgtctagacgatcgagttgttggaaaaattctgcaagaagatagcgagaaaacgtttacgtttagattgccaacgtctctctggtcgatctcgatctgatcccccttttttccctgttggcttctaccatctattcgtttctcgcgcgctcacgaagtgccctcactctcccctttatttttctccttttttccttatatcattccttgaacccttctctctcggtcctcctctcttcctctctttcttcttcataacagtccagccatcgaagtccttgtaactctccttctttcctctactcacctatccaaccattcttctctctgcctataatgagaattggcgcaatcaaaaagactatgcttcacctcggaaaccttcctcccaagcctaaagaggaacaacttctgagtgtggtccaagcacaaaagacaaactcgtccctggtgagcgcgtgcttgaacagaggggcccaataccgatctttagatatccggtggcccctcttcttatcatcgcttgtcttgacgtatagcacagatctaatcatatcctttcgaattcctcctttgataactgatagcctcctcggacgccctcaacgatcaatcccaacaaccctccttggtacgcttatcgtcctccgtgtttctgttccttgaagaatagcgtccctgactgaccatcaatcgtcatccccttccacaggccagcgttccgaggcaagttatgctacttatcttttcagagagaaacctcaaaagtgcaacattctcgtgatagccgtatactaactcattcgttatctctaggttaccacgaatttagtttcgctcatgcggtaagcgttaacttctttgacctcttgatacaacgcatctgagcaaaaggcattgattctttcctcttgagacactcaggtcatgggccaacggttacctaccatcctctccaaaggaatggatgataccatcaagactcttaatgagcaggtttgtctgtcaatatctatcaattcatgcgtcaaacagggctaataccttaacaacgttgcgatcgatcggttaccaaaaagtctgatgaggacctgatcgtcgaccttgttgcgtgtctcaacagaatggagcaactgatgagtgacttgtctaaagtcgctctgattagacccatcattgacgacggaacggatacggcgctctggaacaaggtattagcgcatataatcggatagaatcagctcgcgggtaaccattaatttgagaatagctaataagatgataactgtttgataggctatcgccagatacttccaagggaaagacttcatgagcgcgccttgggcaagcacttctatccacccgatctcataccgctctcaattctgatagctgataaattcttctgtctgatcatttattcatcagctcttcgccgaggcttacaaggtaaatcaagtttatcacaaacacccactaggctatgacctcttcgtgcgctaacttatcttgcgatcaattagtaccgacgactcagagagtgtttctctgtttccaagtactggacagactacgacatctttttcaggcagaaagtgtgtgagaatacttggctacaatcatcttgacttcgaccacttaccctttgtcgtgtggtcatctagtgtgatacgttcgctcgatcagccgatgccgtgtaagcctgccgttcctgtattgacttagctcaagctgtcatgccgctgtatggaaccagcagatctcacttctttgttcactctcatctctatcacacgaagctttgagctctctaccaggttctcctctccgttcgagtatgaagaaggcatgtctgaggaagaaaaaaaaaaggcaaggaagttgttgttcctagagctcacccagggtaagtctctctatgcttcatgtcgagatcactatgagttttttcccccttgcctaccgactgtatatctgctagtatgtctgtggggaaactcgaccgatctttccttgttgatcgacatgacggaggaacagatcaagagtttgcagtctactggaggggcttccctagctgctaccgaaaagaacattcgttagtgttcaaagtcatcctaggatcacatgttatgtattcagccatctgatccatccttccctggctttgtgctttcatcagtcggaaatgacctaggaaagatgtggaatttgatttcaaagaccaagaatggccgaattgactttgtacttgacaatgccggattcgagctgtacaccgatctcgtttatgccggttagtgttacaccttcgtctgagtatattaacggaagactgatgtttatgtgcgcttatggcttgtgttggctgttcatttagattggcttgtccaggctgggtaacgtccttctgatagcacattctttgactgatggcttctcaagattgagcctgctttccatctgtttttacgctcctcaatagaatcgcgtcatctgttcatttccagtacgtttggattgtgttcatcggagactttcctttctcagagcgtagatgtcttatgctaatccaaatgcgccatactctatgactatagtggaaaacgattgccttgtatgttcacctctcgacattcgtctcgagataagaattccatctcatattctttattcgcttgcatttttttgtcagggtttgtctctgatgttaccaagaaagattgggattggcgtaagtactttctgtcgatctcagtttaatgtattctcagatcttaccctcttcctgggcttttagtcctcaacagctgtgtctacggccaggttagtcccgctccacgtcaaaacccaatacgaaatgagctgaactctacataccgccttcatattcagctcttccccgaagcctcgcaggttgagatggagagcctaaggatcatggggaatagatggaagcaatatgagaaggagggcaagtgggtctacgaacgtgagtgtccgtttcgacctaagttctctgtttttctgagtgaggtctgatactttgatggtttggacggtcatgacatcccagagcatggtgagttttaaccttccgttttcggccgtcataggtactgtccactcatccacctgtatatcgtgcgctagccttctggactactgggtacacctttgtgagttctatcacatatttttcaggcaaattcttgagtagcctccacgacacttgggcatggatgactgacgcagcactggatgtgtctttaagtgggagctcatcaaagaagctcctgatctgttcctccacttgtccaagagtgatctcgtcatcttcaaaggagtcggtatagtttaactattatcatcgacgccacactcaagaccactgacagcacatgttctactggtcgttacaaacacaggatctcaaccaccgaaagctcacttatgactgccagtgcgtttggctttctgaatacacaacagatactttctctatcggtaatgaccgtttttttccttgtgatcttgaacagagcaccgagcacgacgtcctttgagaacgctattgggcccctttcgactgccgctggagcaccacctatcgtttctctccgagttattaaagctgacgtggtcgtcgggtatgttctttctgctactttttgtaccaaagggcgcttgtggctatgcttatgattgtttctatgatgactatccatagattgcctgagggcgtggccgatagactggataaggaagagcctgggtggttcgttaagctttctttaaacgagtatccaacggactgctgactttcaacaaaaattcccttggcatcacaggcgaatctctgccaaatatgccgtcgtccttctctccgaaggtaaacctgtaagccgtcttgtttgttgtctttggcctccatgccagaactctcctggtataaacaccgagagggttgatttgatgtcaataactaaagctgcgtgtggtgcttgaactgcctgatatcggtctttagggagagaacgtcgtatttgcctagatagtgctgaatcattcgtcgacgtcgtcccactaaacattgagcgagatatatttaaaattgattctctcatattctttcttttcataatcgtcctggatgtaaatcctagatttcgtacttttctccctcctttctctctcctctctgaatgtagtctttgtttgtactcgatgattatgtcagttatgttattatcgagagttcaaagatagagatcctcttctctaggtgagagttaggcgagaggggcaagcaaatagacatgacgcaagcgcagttgtttgcttcgttcaacgtcttttcattttggctcaatccggttagagtacacttaccgagcgagcactcgtcctttccttctcttacgtccgctcttccaacacactccctttctccctctcgtgttctttgagtcttcagcccattcagatgactcctcaactagccagcttgaccagtcaaatagcggctcgtctttctgcagaagtagagaccgacacagactcgtttactcaagcgaccaaccaggtccccagctctgtcaagataccttcaggacctacccccgagaaaccagaagcggttgccaaccaagacgggaacgttcctgcgcagcatgataggtctaattcttcttctgctggctcttcatccgtaggagcagatggacggaagggtgatggggtcgaaagagaacacgtaaagaaaggagatagagcaggagggatcgttcatgaacaacatacaaacggacacgtcaacggtcacgcgaacggtcaaatgaatgggaacgtacttgacaaaaaagaccacgataatgagactagaccaggagcgaaggaaggtcgaccggacgttcatcttcctgatacccataactcactcgattccgtctcacatccaccggacgacctgtctccctcaagggatggagctgacgagaaggaagaggaccgagccaaggatttctcggccaacacttacagcttaaagttccgaagcttggccggtggcgggaagggagtcagaatggagtcctatatgagtctgaaacagaacggtagggataagaagcttgacttgcagccgcctacaacagaagaacagggcgattcggatcttcaagaagggaacgaagaacaactcgaggagagaaaacaagcacagcatggccaggccaagaacggcatgctcacgtcgtccgacatcccaaaggtcggtcaaagtgcggaaccgacttcaccacaagtcgttcgaaaggactttgtttattccccgaatagtttaaccccttctgatggtcccactgggatcgatcaagaagagctcgacactttacctcctcttcatccggcttcggctccattcaaccaacataattcttttcgaacggccgatccagttctcacctccgccattcacgtgcctcacccttctcgatcctactcaatgccggtatctcatacttcgaacccgttcgatcgatcaccgtctactcagtttcatcagcgtcctcctgcgcgcaacgctccggcatcacagtttgaaggttcgaacgcttcggccgcctcacgttggggaacgctcagacagagacttcagctttcaaagaaagaaaaggataagcagaacgggagaagtgaggaggacaaggccggaataagtctgacagatgagctgatgatgggtaacctaggagtactgatcttgaaattggcgatcgagactgatgaaaagggcaggaagagggttcccgtatttctgcatcatatcaggtaacatcctgtctgatttcttctgaagcctactttcgatgtatctgcaaacgaaactactgatgttcatttggcctttcttttcttgtctctttctctatgttcaacagattcaaggtctctgattctatcggtggatcaggaaatcacccggtgttccgagtagaatgcgagtacggaaacggagctgtcaaatgggtgagtgcttgattacttgacacatccgacgagcatattctgagttttctcgtttttttttgcgcccggatctataaggtaatctaccgaagcctaagagacttcctctctctccatgcgcactataaagcctccagtctgactcggaacgtccccggaagaaataaggggacgaagggtactgtcgaacttccagagttccccagatctagtatgtacttttccttcttatgatttcctggttgatgttcacatcatagtattgacacagctgcttcatccctccttgcctgtaggtatcccatacttccgtaataagagaaaagcttcttccggtccgaaagaaaaagaggacgaatcgaccacgccagtatacccttcctctcaaatgcccaaccaccaaggtgcttatcatactccagatggtccatcgaggatgaactcggaggttgcctcgttcaaacatcttcggaagaagtttaggcccaagtcggaggacagtcattctagagctgggtttgtcgagaatcagcgaacagcgttggaaaactacttaataggcgtcgttcatgctgtggttcgtcctttgttctattctcctgactcttgccaccttctgattgacacgtcctgatctactgtcgatcacctttctcttggtaaatttagatgtatcgacccgagtcaaaccatctgatccgctttttagagctatcggccctgtcgctctctcttgcacccaatggagggtgccagggcaagtctggttacctaagagttctttctgccaatgtgtcgagcaagaaggatagaccagtcttggcacctttggcttggaaacgagcacggaagtttagatggtggattgttagagagagttatctaattgcagtcgatgagcccgatcaggtacgcgattgtttgttccttcctctcagctgaggctttctaataaactgtttatatatctgctacctggatcgttttacgtctataacctgacctgattggttttaatcagctcgaggtatttgacgtcttcttgtttgatcaagattttgctatcgaggtacattctcttcagttggctagttggctacctcatactgtctctgtttctgatattcaggacttcttctcgactcaatatttagcgcccgaaccgagtgcttcgaaaggggatctcaaagttagagaacaagttcggagatgataagcacgacggggcatcgatcaccgagatgaacgctgaacagacggaggaaagcagactggccgctatggagggtgaccttcacggtatcgataaagctacgttgggtagtatgaacgaagacagtgccggcaatgtcgtgagtttatgcctcttctctttccttcacctcttcaggcttgacatggagaatcaatctgttgatgttgttttcctcttttgtgcttcattcttcttaagagcaaccatacattctacattaataactctcagacgaggctcaaattggtggctaaagcagtcgtacgttctgttacatactatatgcaacgaacagcggatcaaacctgacaaatttccctcatattcacttcctcttcaaatatcatccatatcttctcgtagcgccaaatgcaacagttcatcgcctctctggaaaagatggcggccgaaagcatctgggctggtagaaatcgatttgactcctttgcgccgattaggctgaacgtttctgcccagtggttggtagacggacgtgattatctgtggaatgttagtcgggcgttactcaatgccaaggtatgtttggtcctatctatctgggtattgtgtttgacatgtacagaagattccgtacttaatgatcttcaaacccgcgtgccatcttgatctccagaaatgtgtttatatccacgattggtggtcagtctgaatcctctcctctcattgcaaattgttccatattaatccattctgctgataaaattctaggctatctcctgagctttacatgcgacggcctgctcaggccaagtatcggcttgataacatcatgaagaagaaagccgaagagggcgtcaagttctatattattgtatagtgaggctagctatcatctatctccttgctcaatacgcttctcatctgttcttacgaccgccatatcaatctttccagcaacgaagtgtcaaacaagactacaccgacggacagtttgtatgtttcttggtcaaggtcatcaaatgtcgaacccagaagctgactatagcctggttaaaaataaacgcagctacaccaagaagagtcttcgaggacttcatccaaacatcttcatccaacgatcgccctcccactttgcgaccggaacgttctattggtctcatgttagtcttacttacataatttccaaaccttgttcgtaacaagctgaacctgtctcaaccaacgctctctgttgtttgacagcacgagaagatgtgtgtgatcgatgaaaagattgcgtttatgggtggagtcgacctctgcttcggtagatgggtgagagcattcaataagtttgttttcatcacgctctctgcatccctgctgatgtagtttgttatgactgggttcgttgatttgttccacaggatactcctcaacactccctggtcgacgatgactttgatcccaacgttgtcgagggcgaagatgggccggtttggccgggtaaagattacagtaacccggtatgtgcagctgggtcgatcattagtctcaatcgattcccttatctaacgtcgctcgagattctccatatttccagcgtgtactcgatttccataccttgaacaaacctttcgatgatatatatgatcgacaaaaagttccccgaatgccgtggtaagtctgttgtattgacctctctttgatcaatcattatgaaacttcttatattaattatttactctccaataggcacgatgtggcgatgcagatggaaggtcaacctgctcgagatctgtgcagacatttcattcaaagatggaatcatctgctgaggatcaaggtacaatctaaatagttgtgatccttgacacaaatctgttttactcagcaaccacctttgtctcatcttttcccgtccatagaatcactctttagcaatgcccttcttgatcccggcgcccgactttacagtcgccgagcttgaaaaagaacaactcaccggaacgtgcgagattcaggtctgtcgatcttgtggtccctgtgagttcctttctgtttcaattttgtgtttcgcttatcctacccgactagagttgcgatttcgttcttataagatctaaggctaaccggtctacatcacagggtccatgggcacttccaacaggattgagtacgtcatatattttaacctgtcgttctttggatatcttattgaccgattccttgtagacactcgattttgaatgcctatcttaaaggtaatgtttgtttatcaaaacagagcgtagtgagctcgaaactgaatacgatttctgtttccaccttggcttcatcagctatacaacttagcgagcatttcatctatatagaaaaccgtatgttttcagccttttctaattcactattgttgctcctgccagttcgatcagacaaacttaccgtacaggagtttcttaatactatattggctgtctaatcagaggtacactctttcgacctctacacatgatttacatgccaaatatcagtttgactaatcccgatgtcatttttagttcttcatcacgagcacggttgtcgatggaattgcaatcgaaaaccagattggagaagcccttgttgttagtatcattcctattctcactctttcatgaaacgatatctgaatactaccccttgaacagaatcgaattattcaagctcatgaagaaggcacagcctggcgagcttgtatcgtcattccgctgttgcccggatacacctacccaatagattcagatgcggcaagctctgtaagtatattcagtttttacgctatcaagtcaagtagatattcaacgagtattacttcaatctaggttcgactcatcgtggagtgtcaaaacaaatccatttgtcgaggaccaaactctatctttggacgattacgccaggaggggattgatgtgagctattgtttgactgttatattcaaactagaaactgtactgaacataacgtcaactatagccggaagactatatctcgttcttttcgcttcgaggttggggaaagttcaaggatggctcattgaccaccgagcaagtgtacattcatggtgagcgtgtattcataatcgcggctgagcataatgaggagtgtttgctaattctctttatttccttgctccgcgtgtttgacgtgtgtgatctaggcaaggttggtccaagtcttccttctgtgtgctactgtgtgtgatgcgttcgcctcacgcttagttttcttattaccagacatgcatcgtcgacgatcggctcgttatcatgggtttgtttatctatttagatctcgataatacagatgtttgatgctgataacgccatttctgttgttcttaggttccgccaacagtaagtcctcgattctaggttcccctgctttcgtgtttctgacatacgtgcatttattcgtctatctctatccgtagtcaatgagagaagtatgagaggagacagagattcggaactcgctagcgtgattcgtgatactgacatgatggactcgacaatgggaggcaaaccttataaggtcggacggttcgctcataccttaagggttcgactgatgaggggtaagttccacaacatatatcttgaggtccttgtcagatttggttcctttttccctaatcagctatcttctctttgtacgtagagcatcttggagtcgatgttgacgccatggctgaagatgatttgatggcgagaaacccagttgttcctgagaaagagatccaggtttgggatccttccgaagagcaacagtccactggggagggtcaacatggaaccatcatttctaaccggacagtcaaggacagattcatgatgcatgcaagcagtgtggcccataccagtcagtttaggattgtctttttgccctacaaagaaaaaaaaatgccggctaacactatccacttgttttttagtcgctcactctcaatctcaggcgatcaatcgagcagcccgaaaggtcgcagatactatcacccgcagtactcatgaggtcgctatgcccgatgatgatatcgagattttccgtctggacgacggacggctcgccaaaggtttcgtgtcctcggtagttccaacagtacgtccgcccatataatctgctatatcaatcctaattaatagcccttctctccttctatgtttgactcattcttcaatagatggaagaacggcgattggccgagcacggcttgattgatggtccgctgcgcagagacgagattcagggtaaggtgggagatattgctggtatgttatcgcttttcttgcatgctatggatatacccttcctcgagtcctcactttttgcctttggatatcaagatgccgtcttcgacgcttcgggcaaccgaatggatcaaggtaaagacgctgtgtccagccaagctgctttggacaaagttgagcctagggtcgcggaaacgttgactgctgaggaaggatctaagatgaaaaggcaagcaagggatccgctccctgttgttggacctggtggaattctctatcacctcgaaggagaagatgacataagaatggaggataatgccaagcttggtggaaaagaacccatctcctcaagacgacgaaacaacaagacctcgaaccatccctggtcgtaagtttatgccactcttggtgacctcttgatgtttctgagttaacgaccgctgctgtcaaaccaatagcatgcctcttcccacacctcacgtcgatcctgaaggtttccgagatccattggacgataagttctggaaagacacctggacatcagttgccgtacacaacgtgagtagctctgccttcctttttaagcttatatacaattaactgaactcttttttattttatttttatttgcctttgactgttatagaccgaaatcttccgtaaagttagtcatctcctcgttttctaaaaggctttatccataagtatcgatactgacatgcgtgcgatgatgtataggttttcagatgcattgtaagtttctcctactttgtatatccagatgtgcactgcttacaattcttggcttatctagcccgatgacctagtcactagctggactcattgtgagtactcagggtttgattggatccttctccctcttctatcataacacttgagctgatagtcatcgccttccttgccttgatgccaattcagatcgagaggtaggcaatctttgatccgtgcagcatgttctgagaagaagtgttataattactgacagatgacgacttttttgtataaaagaactctgcctatgctgaaaaattcaatcggcctcctactcatggagctggtggaggaggctccggcggaggagttgtcggagccggtcaaaacggatctaaaggagacgactcgtccccttccggagaggcatcaaaggctgaaaagattgagggacatcttggagtcggggatcatgaatcggaggatatctcaaaattgacgagtggtcaatctgagccctggacgaggtgggagcaggaaagaatggaggatctcctaggagaggtccggggccacttgggttcgtctctcttctcgtccaattatttgaaaaattggtccttctgaacgaagcactcagtgctgatgtcaactgtgtctgtctctagttgttttccctactcgattcttggaaatcgaggatctcggaaacaacttcgtaagtgcccctcctgattcatgtcgatctctggtgtttgcttactgacacgtgcccttcctttcttaccccaatttagctgttcaactctgacaagcttgtaggtctccagttctcacgacaatcacggcgtctcgagaaaggcgtttgactgacacctagttctatctcattacgatgtagcttcccttgcctatctacgattgatcggggtttacctgacctttctaggcaagatcaaacagttatgcttcttcttctttctattattacccgtatttattacttatttcattaaaattgttcctcaaagatcttatactgctcaccacaaacgaaatcaacatatccttcaagtttactgtgcatcaccttcctgatgttttgacccttataacactcattacttgccattcctcttagtttttgcacgcacgatcagccttcatgccttttcttgttttcatatacatatacaccgtatatactatcgctcattcttcgtagatgtctattctgttcctcaggttgcaacatataaatgagatctaattcttcctatttgtgtctctttcccccttttgtttctctccatctctcactcgattgcatgtcaacgcccggtatggaagtgatctagagcagacacacccagggccttgaaacaagagagatttaagaaacataaaaaataaaaacccatcctgacctcttcccctgattaagaggaaaagagaaagggacagactgcgtccacatccagatgcaccctcctctacatgtattcttcgacccttcatacaccacccacatactcacatacacacagcaccactctcgttctctttttaattaaaggagggaaagaaaagtttaaacgacaactacccgagttgatcttacttgacctcaacagacggtgccgagtcgacctcgacaggctcctgctttctcggtcggttagcgttcgaattactgctgttgtttccattgctgttgttgttgttgttgttgttgcttcggtttcctcgggggttggatcctccactcttctgggtcatagcccagttcatcgtctgtgcggattcagcaaggtctcgggtgatggctaggatagcttgcgaaggagggttaaacggtcgagtgatgtgaagcatgttctgtttgtcgtttgagccaaacgagaggtatacaaacaagcgcgataaatatggtcagtttatagagtcctttaaggggactcgacaggaaagaaaggcagactcacggcgttaaggtcaatctttccctccaatcgggtatccctgatcaagttgacaatccacttctcgccctcctccctcgacaagttgagtcgctgggaaaggtcgctttgcaaaggaaagaattaacggtaagtataagaatagaagtgtcagtcaatcgattacttgcgctccttgttttctgaaacccatcctatgcttttctccttgacaaataagagatacactcacttgatgtcaactcgctggtgaatcttgcagtatgtctcactgacgaggtacctggcgttatccaagaacaactccgagcttccctcggtggtggacaagaagaaatcgtttgcgacgacctgcttgacggccaagctgagactctcttgagctccctcgaaatcgaactcggtgtgcaacctggtgacaaactgggtcaacggatcctcgtactggtaagcttctccctcaacagccttgacaacctccttgagcggatcgagcttcttctggccaggcaccctgggagaagggggcaatcggtgggtgacgatgacggcgaagacaaggtatcgaagcaagtgggggcacgacgttcggatggttgcaaggtaggcgggagagaggaaaaggtcgagcaaggcgggcagaccgtcaggatggttgaagtatacgaacaacgaccagtgaagaagccagcttcgggcctgaagctgggcaaggtctccaccctgaccggcggcaccggccgatgaagggctaccctcggcagccgttcgggaagtgtttgcgaaggcggatccagatcgagaatcgaccaaatccttgatctcaccaacctgcttgagagcttcgtcccaggatccggtaaggatatccgaggcaagcttaccccagtgagcggaaaggttgacgtcctgatcggtggaaagaactaggaagtggtagaggtactgagaagagccggcgtagtctccgtaggtgaattggaattgaccgaagtggtacagggaaaggatattgtcttgggtaagctaaaaatgaagaatgccgaagagcacgattcagaatggtcgaaaattaatacttcccagccatctcttctctctttgccacggaacaaaaagttaaacggaacatacctggtagttttccttgagccaagccatgttctgctccttatcctgcttgagctgaccagcaacatcagggtttccgatgacctccaaaacctgctcagcagcctcgttaagcttctcgtttttggcagacacatcctggcgtcgggaagcaaactctacgtttgataaaaaccgtagggttcattgaaagcaaccagccccacataaacaaccaaccacccaagacggtatcgcgacgcagggtccagaataagaaagtagaaagtagaagattatcagaagacggacgagccgagagatcgggagcaaactgtcctggctgatcagaacgaatgaacaaagagaacagcgagaagacataccggcaggagcctcctttccggggtgaacagaagagaacaaggtctgagcgtagtcaaccatgttggtcttcttgacgagctcgtactgagcggcgtagagagaagcggccgggaaaagcggactgaatagtcatttcgacattgatttcaaggcaagaggtcgagattgatgagtatgtagataagagagccgacgacgacagacacgtatgtttcagatgaaatgacgcagaagaagcgaggacatcagaaggaaaagaaagaatgaggaaagaaaaagaaaaagaaaaaagaccagtaagtttcttctgtcatactgtgtcgaccctcatctctcagacagacgacaccacaaaacagaaacacgtacggctccaaaccactgaggtgatccaagagaggaatggccaagtgccggtccaggaaggggaccattcgctatcgatgagaaaaggcaagaaagagaacaccagacagaagaaaccaagcaagaacgcgtaagtcaggaacacattctgtaaatccgatacgagtgctgaaggaaagcccaaaacgagaaacaaaaaaagcaagaaaaagacgggtcttctctctctacagcacacacatacctgggtgagatcgtactgagccatgatggagaacgaggacggaaggagagaggagacgagagaaggagagatgtgtggactcgattctgttctagagaaggaaaaaggaggaaaacgaaaaagagacgaggcccaagcgcacgaatttttcgatgagccctggttacgggttgtcttatgtaagcgctatcggttacatactttcaggctggacactacagaatatgtccaaattgactagatcaagtttctaatagttggatttcctgctgtaaccactcccactcacctccactccgacgtggttacgatccgttccacccacgcgcccgtccatcttcgccttcgtctgctcccctacagttaaacgaccacacctaagcgaagccctactaccatcagaatctacactctcgtcctcatcccatacacatacccacacaaatacacatagcaacttgctcagttatcatggctcaagcaactcctgatcctgttgctccttcgttcgttcagcttgttcttgctcatctttttcttcataatcaaaggataagatctctcgctgttcctgttactcgtatggctcctagtcttcaggatcgagatcaaagcgctcatcgtccaaccgttttttcttctttaccttgatcaaatcgacaaatcacgatgtgaatgatcacttatatatacaggcccacatctgatctcgaaacgagctggggttacctcgaggtcggagtggagagagctatgatacagttcgtactcctaccttttcctacagtcaactctaccctactcgtcatctttcattaaaactgcttttgtcgttcatctttccattccatctagcctagaggaaggtatgtctccctcgtactacatggcgctttacactgttgtgtacaattactgtaccaactcggccagggcaagctcatcaaataatactcgaagtacgtttcttacgtcttctctatcgtctatgttgtcaagtttcgtgaaccgtttgatcctttatccggattcaatatatgaaaattcgttcaattctttccttgcatcatccactgactgcatatcatgactttccttctccgatctatacattttgatatcagctggtgcacaactgcagggcgcagagctctacaaatgtctgtcgaagtatcttgctgatcacctcaagacccttgagactgtacgtttgccacccacgggtcactttcgtttctgtcacttcaacacattaagactcactttcttggtggtacacacatacgtatttacctttaggcctcggaaccacttcaagacttggcactgctacagtattatgctagcgaatggactagatatacgttcggagccaaattcatcgatagactattcttctacctaaatcgacactgggtcaagagagagagagatgaaggcaagaagggtgtctatgacgtttacaccgtacggtctttccttttccaagcaatgccttcctccaaattcgttgagttgacctacgatcaaccttgctttcttatctcacacgatcagatggccttggtccagtggaagaaccacttctttcaaccggttcaaagtaaaaacagaaaacttgccggcgcactctacagacaggtcggaaagcaaaggcaaggagaagagattgacacgtcgctcatcaagaaggttgtcaacagcttcggttagtgcttacgacccatcttggacgagcgatgaagatagaaatctgaaaggcctatgtgtgtctcttatatcaatagtctctctcggtatcgatctgaacgacaagaatcgatcgaacctggatgtttaccgggagcactttgagaagccgttcatagaatcaaccagggcattctacagggcggaaagtgaggctttcgtaggtgcgcacagtgtgagcgattacttaaaaaaggcagaggagaggttggcggaggaggaagaacgggtcgagcgactgcttcacggggacaccagaaaaattgttcgttctgttctgttctcttcattttcgaaggtgtcgaaagtatcgggggctttcaacttgaagtgttttcttactcaataccttactgggtctcgtagatcatcaacacatgtgaagacgtactcatccgcacacatgctgagctgatgcaagaagaattccaaaacctgctcgattacgataagacggatggtatggttctttctttctttcttcaactctatctcgttgtgtagaagctaaacgcactcattgtttctgacatgttacatatctgcaccgggtttgacggacgaacacaaaaatcaaaagatcttacacgtatgtactcgctcttggctagaatcccccagggtttggagccgcttcgaaaaagatttgaagaacatgtcaagaagtctggtcttaccgcgatcgagaagttgtcgtctgccaagcctgatggaacaatcacaccaaaagaaggagatgatgctaatggagataacggagctgctccagtcaagaacggagaaatcgtgcgtcgcccccttacttctccgttctcttctttctcttttatcttactcatcaactgttcgtcatttcttgacgttttgtggagcaggctcccaaggcttacattgaggctctccttgatgtccgtaaaaaaagcgaggagattgtcaatacatgcttcagaggtgaagccggctttgtagcttctcttgataaggtaacgttccctctcatcacccgtgctatatatttattgcactcggcaagaattcttgaaacgcaatcattgctcttaaacgcgcgagtgtgcgtatgtactttgtcccgtttgtaaaacaggcttgcaaggatttcgtcaacaccaactctgctaccaaagactcggccggaaatcagagcgcaaacaagtctcccgagctgcttgccagacatactgatgctctgttgaagaagaccaatcgatcagccgaaacggctgaattagaggaaggtctaaaccaagtcgtgcgttgacatatgcttttgtgtacccatatgaatttacagtggcgatcgaaaagatcgtttatatgtgtttctctcttctttttattgatgcctggctctccgtgcatttagatgatcatcttcaaatacatcgaagacaaggatgtgttccagaagttctattggaagatgctttccaagcgattgatcaacgcgatctctatctcggatgaggcagaggccagtatgatcacgaagctaaaggaagctgctgggttcgagtacaccacaaagctgcagaggatgtttactggtatgatctactcttctcatttctgcctatccttctcctctctattcaagaaacatactgtctttgagcaaactgagattcgggctgactccttgatcctgctcatctgttcggtctttgctgtgcggcgcataaagatatgcatgttagcaaagaattgagcgagaacttcaaggaaaagatgaagcagactcacgatgctaaggaattggatggtcagtcatcatttacatttcttaaattcataatctaagaagtgcgcgcctcataaatattatcttttgataaattgaacacaacatatctagtcgacttttcggtcaatgtgcttggtcaaggtttctggccattagaaccaaagacgactgagttgacgattcctgtagatgtctctaagcattatgactggtttgtacggttctaccagtcccagcattcgtaagtttcatccaaatattgcttgttctcagaggcctgattgtctgtgacttgatcaaggttcgtgaaagaaaaaggcaatgttgattgtgttgaatacttcgtttcacagcggtcgaaagctcacttggctctggcacgtatccaagacggaacttcgaacacgctaccttggtcaatcatacatcttcatgacttcaatgtaccagatggctatccttgttcagttcaactcagccgatgccttcacctacaaagaacttgccacagctacctcactgaacgagggaacactgaagggtgtattgggctcgctggtcaaagcaaaggttttgaacttgatactggaagatgatgaggagagttatgaactcaactacagtacgttcggttgttacttttattttcgacttcgttcttttctcctcagcttcaaagactgacccggttgaattcaaccatgcgggcttgggctgaattagacttcaagtcgaagaagatcagagtgcagctcaaccagccgatcaaggcagagcaaaaggcggagtccgctcagctgatgaaggatgtggatgaggatagaaagtatttgatccaagcgactattgttcgaattatgtgcgttttctttcctgaggttctctttgagacattttttctctttgtttacaagatgtttcgtctcacgggatgttcatctgcttacaggaaatcgagaaagacgatgaaacacaacgtacgttcctctggtttcctttctgacatctttcagcctttctgttgcttttattacagtcaaaataacgctttatctgtatggttcctgtagacattggtgaatgaggtgacacagcaggtctcaactcggttccagcctaacgttgtgatgatcaaaaaggtgcgccctttcctattctttccctcgctggaaacggtgtagaataaatagtttaggctggtctctggtctgagttctgaattatggttttggttcatcgtttttctctgaacatcttagcaaatcgagggtcttgtggagaaagagtacctagaacgtcaggagggtcagcgagatacttataattacgttcgtcttgctttttccttcattcattaccccctttctactccttgttagggcttgctggactgacgtgatatgtgttgctggatacccccttttgtgtcatccagcttgcctagccagtttgtccgttctgctctcctttcgccctcgctatctccattacatcctgctttcctttctctacagaaagagacgacgtctgttgtctttggtctcctcttcctcttcactccctcttcatttgacttttcccttgtcatttagaatcacatgtgggcttttgaccacatcgccatttgattcgttatcaaccctccttgttttccacactcttcttaccctccacccgttcatcactccgcaacccatttgttacatgtcatggtccatgatctcttcttattcctctctcgatctcctgtactcaagggcgcctggggggtctctacttattctatctggttacgttttcctctttctcaaacgacccagtcgtattcagtgaggaagaatttgtacgataagatggtctcccgattttagaacgattcctgcaaacagagaagacagaaccataagaattctgaggagagcaggaaattcaaaagaagagaaactgtagaaagttcgggaaaaagtatttgactagatcggaccttgaataatgctaatcctattggggctgagcgaagatgcgtttgcccaaatggaagttctctaaatttagtctggaaaatgcttcgaactaccatcaccaaagcctttcaaaaacccatccttccttctacccgattcttctctgtctctagaaccaatatgggagttactgttgagacgtaagtttatagcttgccccatcccagatgttgtgttggctaggagagattttggttttcaacctctttttttcctctccgttttaatctatctccatctcatctgtctggggacctgattcttcttttctttcctttcccatctacgctatcttcttgacatctctacagcatttccgccggagacggcaagaccttccccaaggctggagacaccgttcacatgcactgtacgactgttgcatcattttctgcgttctttctgtgttcatctttcctaatcgtacacgtttgtgccttctctcttccatctcttgtgcctctcctgtagacgttggaactctccaaaacggaaacaagttcgagtgagcgatgtttccctgcaaagagatctgtttgtttctcgcctggatgctgatagtttccttgctcgccctgtagctcttcccgagaccgaggacagcccttcgtcacccccatcgttcgtccttgcttcatttttggatacttagaaacgaattttgatctgtgtactgattactgaatatcgaatacaatctcaaatccaacagggtgtcggccgagtcatccccggttgggacgagggagttcctcagctctcccttggacagaaggccaagctcagtcagtcaatcattccgtctctttgtgtcttctcgttcgaaagaagggatcctcatcatatcttcattttctcttggcgctttcgttttccacagtctgcacccctgactacgcttacggtgcccgaggattcccccctgtcatcccccccaactctaccctgttcgtttctttctttcttgtgatccatgaactctctgatgttatgtcaagtgtgatttctgtgactaatccgactcctactcaccgtcattaatcctctcaactctagcatcttcgaggttgagctcctcaagatcaactaagaacttggttctagatgctttatgaatgtattcaaacattgtcgtttcgttcccgtttggtgacttttatgtatcgaggatgtatgaaatgaaatcgtctatatcactgttctcagcttcgtcacaacggcagaaggagatagaagatcaaatgaagagatgaaaactatgagtggtcattggttacatgtgctggttacaaactaaaccgtgccgaatggccccgcatccatccgtccaatccatctcgtcgcgtttccatctgtacccaacacatacggagacacaggcatagacacattctttccgtctgtatcccgttgggtctgtatctctctgggtcgtttttctagaccgttggaggtcgtgtactttcagtctcatcgtgggttcttttcttggctctcttcgttttgacgccgtgggaaaacactaaccgatcttgactgtttagccatctttctgatcacctctatacatcactggaatagaaaccaatcttttcatctcttcatctctcttttttctaactactcttcttcttcttttccttgtaagcaaatctgattcacctgtgaatcaaaattttgaagattgagtttgctatactaacaatcatcaatcgatgtgttgttgtctttgacagcactctctcttgaacgctcttctcggtacttctcccggcaaccttgatctctcgttcactacactcgttcgtacgatcttttacgcatacgtttctcaataaactgagcccatcatctaacatcgattaacgagcaggagtttacagcaatgcaccatgcctctcgagctaccaaagccaggatctttgctttagcagagaatgtcaatccggtcctccttccgtgctttgcttcttggtcaaagccctgtacaagctcttctcgttcaccaaaatccaagcgatccgttagttgtactgtcaatacagagggatcatcagtcagtttcgctcttcgtttcaacaatacccccgacccgacttccgccataccaagagctctcggaacccgactttcctcggccatcgctacctactttgacgagccagcgaccaacgttttcgactttggtccctccatattgaataagcgcgaaccttcgccaaaacgtgactacgatcgtactccaagatacaatccttctctcttcaaggtcgaagttaacggtcagatgtgggatcaacgatcaatcctgctcagttatctctcggtcgatcgaccgactcgacaagctcatctgaatggacaggacgacggatggaactatcaatcaattgtaccaggagccggttcgtggctgccagaggtcctgactcgacttcaaatggatggagacctttttgacactctggttgatgttcttcaaacctcgaccgtacggcaggcacttggcttgctcaaccaacagacgtctccggcctcaatgtcaatggacggccgtcccctttggtcaccctggctcttgaggtccgtcatcgaccggacagagacagctacggatgcgcatttatcgatcgcagcggtcgctcatcatttaccgtatcttcccaagtcccatcaagctgggtttctcaagtggtgtgtgggtgtgacggtcaagtatcgaatggaggctgccttgcctgccttggtcagaatcactctcgatgcatatccacagcttgtcctcacgtccgcagatcagaaggaacgatctaagctccactgcagtctgatccttgctatcgtccctgcacattcggatacactctccaacgcttctaacgttgttcgtgaacagctcgccttaattctgagcgacatgaatcagaatggtttgattttgtcctcggaggcgctaggatcgctataccagctaaaatacttgatgtatcctcctatccgagaggttctgtttcggtattggtcaacatacagatcctctcgcaaactgcatcatgccaagatttggctccaggcggcgtggagagagaacgatcgagccgaaatggaacgttggatggagtccatcgacaaattctcggccacaaagcagagcactctccttgatggtttgcagtcaaaggaaacgctgcactctatcgagcctgtttctccctgctctgaaaagtctacaaagttctttggacctgtctcggtcgcttatctcaagacacttcgggagagcccacagcttgctctggagtatcttgaagctttcgatatgcctccttcccccctcgaatcgctagctaccccgagtggcgattcggattccatcgatcgggcaagacactttacaagtgatgcatggacaagtctggtcgagatcatggctcactcgaattcttccctgacttccctacgacgagcatttgacgatcctcgatcatctattcatgaccgaacattgataactacgatcaacacttccttggatgtcgtccgtcattcttcttcatctccatcggccgtgttggagatttggtcagagtacatctgccgtcggggtgtagtgcctacatcaatgagtttgaacctcttcacgagggcgtgtgagaagaaaggtgtgctcggacaggcgttgagagagatcgaccggtgggctgtcaagagaggagtacacgaggtcctgccggtagcaaagaacattagggaaacaccattccatttaggggacactcaaccaggagagtactcgtatgctcgatctcaagtgttggtgcaagatttggccttccagccaggatccacccgttctccaccagtcctccgaatccagttggacggactgctccttcgtcgattgatggactcccttagcttttctgctcttggttcatgtaagaatcttgagcttctctttcgtttatgggatgcggccccttcccgatggggtgtcacccaaacggacgacatgcttcgttccatccttcttgccgcggctcattcattctggaaagaagacggaactgtgtttcaaccgatgacccccgaacaagatatccaaactggattaggactgaccgctcgtttcacaagggaggacggtcaggtcgtgcaagatgttgatcaagtcgattgggccaaagatccggtagaggcattcttgcttcctagatcaagtcaagaacgtgcgcctcatttgagagcaaaagagttgtttgaaactatactgttctcaaactggccgggattcaagtcagtgcctcatccttgggatgagtggcaaagtccaatcattgaggatagcgaagaaagttgttcgactcactctagatcgtccggccaagacgatttgaacaattcatctgaatatctcaccgatgaaccattcatccccttcttcttttcatccaatccaccaatcttatcctcggtcgaaaacatcacacggtacctccctgcaccgtcgatttattcacatctgcacccgaccgctgcttctttcaacgcatactactatctgttggcccggcatgcgttcttcccagagattcccctcgtgtttgcttatatgaggtatctaaacattctaccggagaaacaaaccatggtggacgccctcgctcgtctgtctgcctgggccgagaagggcatgcgtcaacgaaggaccccgttcgggctcgaagacgtcagttacgctacaggaaaagcagagcttgaaagacaggttacctgggcttacaaagatgaccgaagtggaactagaccggatcgggatctttgggagtggttggtgaactggttaggaaaggatcaagtcccgacagatcaagaaatccagcagaggtggagcgcagttcgaaagttcggggagttttcgttggttgatggtggatggtgtaatgaagagagcttggagttcaaggaaagggaaccgttgccacatctgaaggaatgagcgactgcccctacaatcatgtctcatttcctttcctctctttctattcttgttttctttctcttcctttttttgtcttcctttagttgtataccatattgtcaagttgaaaactcatagatagttgtaataagtttatatatttgtatcaaacacattctatcgggctcgaaatatcacttcaaagcccttttgacgacttcctccaaggtcaccggtttaaacaccccagctgaatctccactggactcgtgaacatagacagcatcctcggagacataacagaccacaccacctgttcttccgtctttggagattctgaagaggacttgacctgtgttgacgtcgcttcgacctgtaggtacccagatgagatcccgttgagtgacataatcttgggcgatcgaccggaaagtgatctcgtccacgtgggatggtgtctccatcgacgatggcttgacagtcgccgtcggtgctgtcgtcgatgacggtagtcgttttgatctcgagtcggacgaaggatgagatgggaaaatgggtttagcgagccgggtgggagcagaagaaccaagagccatagcttggttcatcagatctaaacctgatttgaacccagatgtgatttctggcagagcgagaattgattcggggaagactgatttccaatacgaatacctgccaagatatcaattaatagaaaaaaaaaagtccgagatatctttatgttcgaatacaaaagatcagaaggcaagagggagaagaaggaacgaaccattgggtgatgtcatcaaagttgggttttggttgaatcaaccagatgtatagcacatccagccacttggggaagaaaccggactctagaagttgagccatcatcgtcggtcgaagcacaccctgccaaggtagcacgttctctagttcggttaggatttggtttcgtgggttaactcggaaatcatctcgaagcgaagcaccgagtttgggcaggatgtatttgaggatgagcgaatcccattcgttgggtgtgaatacctggatttgtcaaaaaagaggtccaatagaaaattcacgttagcggtgtcgttcaataaattagaaagataaaaacgtacctcgcgccatctgggtaattcctcaggcactctttcttccactttccaccctttgagcaatcctctgattcttctctttgcgtcctccaagatctgatcgattctcttgcccaagaagggaagccatgggaaaacaatcgactgtaaggatgctccaccttttctgggtttccattcggttattgacttgttgagttttgggagaattagttgatcgaggatgttgtcgtgcatgaaaagaggtagaagaggagtccaggatttgatgagctgcacggcaggctcggcattggtaggttgccaatcgttgctatgaaaatatgagaagtacaaacaggcgcgttgagcgaaaaaaaagaagacatcaaaatatgtgattagaatgaaagcttcttgaagacaggaacgcacttgatagccgatcgaactttcggaagccaaacgttccacatcatactctcgtacggtgtcattacaacatctctttataatttatggataagaaaggagataaactatgagtaagtcgatgcttggcaactctgaataagatgaggtcaaagagacaatcacatacagatcaaccattttgcgcaattttcgaaccctagcctgtccatatacgtccaccgccttagcatcctcctccttttcggcgtccgagaacttgaaagcttttttccaaggcctgagagaagccaacagctcggttgatgattcgagtggttgccactgagagaccaatctccgaaactactccatatggtttagcgaaaaaaaatgcgatcagaagctagaaaatgaggagagtaaaggaaagaaaagcgagaggtcaatacttacgacaggagaaacagcgcccacaactatctcatctagtgaataggttgagtgctcttccgggaactcgtatagcaatcgatcgaacggagggatgaacggcgcgagtgagggctcgtacgttgatgcaagtgtttttgagattccggatatctcgttgatgactacgtgaatctgttggagtcgcgaaatatctgattatttccaaggtaattggaggaaggaaaagaaagaatgagaacaggctatagattagcctatctgaaaagcgcgcgagaacaatgaaaagggtacggttatgaaacctactattcgcttcctctaccaactttacttttaggttctcatcttccctgattaaccactttcgcttttccctcactgccacgccctctctcgcgagtgcatcgagatcgccttttgtcatatcacaaatcattcgaagattatgccttagctcaggcagtttacttgcttcactcgttggaccggacaggttcaaagcagacaacgagctgacttctcttggctgtttacaaagaaacgaaaacgagaggagttggaatcaagatatgagtgttctgtctgtaacaccacttgaacgagacggatgagataagacacgaactgtagcaccagtagcatcaatgatgacacccactccagccgattgacctcccggcccagcttcttccagaatttcctcgtaggacttgtgttcgactctgatcttgacctttttgttgtgtctccaagattcttggcctcgttttgaagagctaggatgattgtctgacgagggaggggctttgccggccgctttagctttagcagcagcctttttggcggcggcctcgatagccgggtcaggtaaatctccttttctgtattttccgaaagagggaggggagaaatcgatgaggacaagaacaccagatactgactcaacagatgagaccaacaaaaagaaacggatttacctgatagcttccctgatgctttgttccgttcgctccgttccacctgctccgatacccatccccctgcctctcagttttgtcgttacaggggtgatgatacctgtaccatctgatcccaacccaacaccagcctgccatccttgcttggccagcattcttgctccgaatgagccctccatctttttgaaggccgctgcatcttctctcgtcaatggctgagcgttcggtttcggcggtggcgatgattttcgaaggaatgatttctgaggaccttttgctttggacgcgccgaacgcggttattaggaacgaaggtctggtgcttgtttccggagccgcagattcctcttcctcatcagagtcatcttcatcagagctagagccatccgactgagatgacccgccacgtgttgaattatttttaccgtctacttctggttcgtcaggcggagacatggctgaggtaggagcgttagcgacaggaacaaacgcggggatatccagtccatgaaaaaccgattcagactgtgaggaaggaggttgagcaggggcagggttggctgatgaggaggcagtggtgaatgtcggagctctgtaacaattgaaagaagagcaaatgtacacgttgagaaaatgcggaaaagccatcgaaaggaaaggcgaggttgattagaagccctttttgaggactaaccaagaggtgatagcgaggcgagaagaagagacaagcctactcactttgtccaatccgtagctctaccgctcttgcctctatttgaacccaaccctgcaccgccacgaccgttcagatcctcatcatcactttctgcgaacactccatagagcgcatcaatctttccggtctttcgcttctttctcgcgtagagatcaccgtcctcgatgtcgtcaccttgctgatcgaacgttcggtcgtctacatcgtcatctgaaagaccttcagatgaggaaccgtccgagaggaatcctttattggctttccgtctagccatggaggagatgatggtggtggtgttggtagtggcggtagtgatgatgatagaatgggtcgctcggagttgagggttgcagacgcgcgtaatggcggttacggttggctacggttggttacacgatccttcgactccaggtttcctcaccgctgcacaacggtggtcggatggtgtgttctgcgctatcggaggtgctctatcagaatgactgacggaagctgaagaggcgatagagacaaaggcaggaggtgtatgtgtcggattcagagggaaggaaggttgcgcgaagagtgtcggtcctcagaaacacttgtacatcaagaggtccagtcaccagctgcaactagatggtcctgttcaagttagcttgttctatcacttgatcaaattcttggtaggaaggaggaagaccggtctagagtttggaaaagcatgcttcgaagtacactcatcaagatatcatttcttgtcgaggtggttgtttcagaactgttctgacaaacatacatatacacgcacttgtactttcatgttccatttgatctctttctctctctgtgtacaacccaggctgcctgtagagatcacaaacatccagattctcaacgctgcgaagcttggaaagatgcttcttatacatgttcccccgctacttgacttcatcttctgttttatgtcaacagccaaaatttctaccctgtgtctcatccctcatcgaacatcttctcgcaaccacccttggttgactcccatcccaacttggatactgacactccattcttgtagtccatacggtcatgacgctcccatgccatcttcgccatcgtatatccatcagactaaacattgcgatcggccgtcaggtgactgcaatcacgtgacaccggcgtaaagatcggccgtccgttcccggccgggcgttcttataaagccgggagattgtcaacattatcagcccatcagattaaccatctcttgtttctttctgcttctcccacactcactcttcttcttactcaaccaggatgtcctctcttcctccactacgtcggatagtcacaacacatgcgccccagtcagactcttcggccgaaccaccggtgaggatcctgcacgacggcgactacgacgaccccacggtaggtcgatctcgacgagcctggtctggcgattttcctgctgttcagaatacggatgacgactttatcgcccacgacggactggtcagaagaggtggaactagctgcaggactactaccttgcgccctggagaggtcacccccatggtgagagagaactcttcatcacgcattcattcttgttctgagcaaggaccagtctgttgacttgggatgtattttgacaaaacagcaccgaacgtcttctctggactacaatatcataacccacggaacgatcaccttgctgacgccgaaactcccgtctaaacctgaacaatggcctccttcttcgattttgcatacgagggatgatattcaagagacccaagtcaacgttggcgaagtcgtcgtccagaggggaacgtatgtccttcacttgaactgccactgattttcttagaattctgctcaactttcgggacacaacaacaggattcacgcatggagaaacgacacaagtgaactagtcagatggaccgctgttctctctgatgctcaacctgctcttgatcttgaagaagcatgggtggaggagggcaagaacggagatggcaagggagatgtccggactggggttaagctctgagattcactttatgtaacagcacaggattggatgtacaagtagctctttcccatatcatagagaatatgcatacaacattgttacagactcctccttttacaagaaacggacaatcgattgagagattgataagaggtcgaagatgccgacgtttctaaatgttttccaactcgtcttccaactttttcgccgtctgctctcgatccagtcccagcgttcgctttctcctgttcccttgctgcttcggttctgactgtgaagctgaccgaggcggtcgagacccaccatccgttacagccttcggtctttcttgttctgaaccctcgatctccaacggctttggttcataaggcggatattgtcctttgggaaatgtctgtacgtccgtgggtcggtagtttgcctcagcgaacgaaggataccgagttggaacaggcggagttggatagaagtgtgctgtcgaagggggagatgagtaagttggtggtaaaaagctaacaaaatggggatgctgttggagacaagaggatttcagttcaaggtttagatacagagcgagatatcgcaaacagaagagaggcccaccttatagatggcctcgacccgaccgatggcaagaccgaagtgaccctcgactccttccggcgtgacctttgctctggctgcatcctctggagtcgccctgttgggatcagcccttggcgcgccgaggagagacagaccgatcgtctttgtccttgacagatctggttccacctgacggtctgtgattcttccaagatgcgtatgcacgagagaagtcagaggaatctaaaacagatcaagcgagagaacggaatcttcagcgatccaaagatgtaggcaagtaggaacataacgaggacggcaccatacctgacactcttcccaaccacctccgagggtgcctctaccggttatacccaaccgatgactccataggtcttgggcgacccaaccatcagtctgaacgttgatgaaccaatgaggccataatctgggatcacccatgggtttacaaatcaccgagagatgagtatgtctagcgatgtcgattgtgttgactgagaatacacctggttgaggcttggatgttgaatgttgaatgttgagcaaacgatacatgtgagtaggagaacaaaagacaagacgcaacacatgaacggagaccacttaccttggtacggaaaccaacatatccgcctctgattttaccgtcaatctcttctctcaccgccagcgagatccgaccggaaaggatagcgtgaggaaggccttgcatgtcccaactgccatccgtgtactcgtcaccattattgagcgtcagatcgatatgggacgatccaccgatatcagagtcagatgccagcgtcagattggctagctcatttggcgtggcaaagttgatgagagagagtgattttgggtctttgaattcagagtctgctggaccaagttgggatgctacggaaaccaaaagagattgagaggcgaattgaggggtccggaagacggcgacgagatcaagaaaacaggcaaacagatgatattacttaccagcagccgtccatttctgagtagccttcctagcgagcaaaattttgtcgaatactttattgagattcttgctcatcggtgtgtcgaaatcaaggcgatgatgttgatgatggtggtgatgaacgtgatggacgagagatgggagcaagcgaccgtcttgtgcgatcgaatacaaatattttctaatgaagactacaaaacattcctaatgaaagccgaactacaaacgtgttgtaatacacgactaggaaacatttctaatagttttcggccacacccgatcatcctcccaccttctctcgtcgaccatcaagccatcaccccaaccccatcgtcgttggccatcacctctggtttggtatcaatctcggtctagtttgtctctgtagcgatgcctcccgagtcccgttccgctccgggaacacccagaagactttctcatctgccagccgcagccgctccttctgctctgccacctcacttgacgagagaaatctcttcgctctcgctttcgctctcgcctcaaccatcatctccgtcgtcctgctcgtcttcttcctcggtctacaaccttcatcatgtcgctccgtttgcttcgtcttcccccatctcccggccaagttccacaagaactccttccgtatacagcgatatcgacgtcgatatcggtcctcccccgtcgctgccacacacttctggatccggatcacagagtgatgatggtcatcagccgtcatccacaccaacagctcaacagcaaactttaccgcctggtcaaatcagcgaacaagctagaatcatgctcagaggtcagcttaaacgtagtttaagtcgaccgacaattcacaaggccccctcgaagaagggaaaggagaggacgaatgccttcgaaggtggtaagcagtctcttgtgctcactatgtatcctcgatggctctgtttgtgttctgaccatcagcacacaacattctagtcatacaacagacaccaacattgcctgatcagtctccagaaaaaggtccttcctcggtcaacattcctgtagagagagaacatcgttagttgcgaccatttgcttctgactttcaaaattgacgacccatgttcatcactgtcatctcttttcaggttcatatccgcctaggaaatatttcatcttgacaaacgctggaaagccagtgtatgcaaggtcagcgctacagccgattggatagctttcccgctctcaagtgcaaatatgatctatgtctgacaccgtccggcttgccgttctcttgttcgacagtgaaacggacgagaccgagctcaacacaatcgtcggcgtcatccaagcactcatctccatttttctcgatcaggaccaaacggataaacttcgaacgatcaccaaaggggacaccaagattgtgtttctgctcagacaaccgttgtactatgcctgcgtgtcttcttggggtgaacctgaatctgtcgtacgtatccaaacgaactacaagagctcgttcttgaactctgaaaccaatcagatgaccacgatgatcttaattcgctttctttttatctagcttcgactgcatctcgagtatttgcatcttcaggtcctcagtattctgactggaggacagttaacccgaatattcaatgccagaggaaactttgacctcagaaggctacttcaaggttttaataatttccctgtcaaattctattgctcgtatctatcgctgacgcccattctctctcgtcttcgggcgactgtgcgccaacttttgaacccataggaacagaaaatttcttcactgctctcgtcgacacgttacagtccgatttcagttacctcacatacagcctacaacctcttcgggtacatcccgcgttgagagatgcggccggacaagccttgttgaccgcttcgaaatcgaaagtgtgtgattccttccgaaaaccccttgtatctatctcaggctgaattatctttcaatgtcccaactataggatcttctttacgcgctgattttaacgtctccagacctacatattctcactctccttcgaccaacaaaacactcaattcacccaaccgatcttcacatactgctcaaccttattagatcatctcctgacctgacgcatccagaaaacgaatcctggcttccggtctgcctaccaaggtatgatcaggacggttttgtttatgtgtatgtgacattcggagaagacgggctcgggtttgtaggcgttggaaaggcgaaagatggattcgaggagatgagagacggacggacaagggtcatgcaggttggaactctttttcttttcctcctgctgcttctcgtgttccttcctattctaattgtgtgtcttctcgtgaggaattaccaccattaatagaaattggaagaggacaacaaacagagcaagctcagtcgatcaatcgctctacatccatactctgtctgtgagttcttcttgttatttatttatttatttatttatttaacatagaatcttatagaaaccttcaaacaactctttcacgatcacgttctcaccttttttcttgaattgacagccgatctgggaattccaaatttacttcacttcatctataaatcatgtgtaaacgttcagcttacacaacctcgatgggaaggcatatatgaaaaatcggaagaacgtcgtcggtcagttcctcttctctttggcatcaatcttctctagtttcgacagacgatttcccctgactttgagagaattcgaaatcgacaggttatcaattcactaccaacaagtgcatgatgcccttcacgcaagatcctctccaggagcagaacctttgacgttgttgtttgttcggactgatacggagtgtatcctaggttgggtaaatatgatttccttcctttgttcgagataatctcttctgtactctcctaacatgaatcgctgacctatgaacctttgacgttgaaatactatgttgacatccaaaaaaagttcacacaacctttcgagctttacatgacactgtccccttcaacccctaaatcaggatgtatctcaatcgccaatagagtcgctcggtgggtcaagaaagaggagcgttctttgttcttacatcggactcccgtcttttgatacgctttataatggggtcacggtcaagttcatgaacgacaagataacatggatatcaagaagtaaagacatacgacatctaaaggaattatgatacgattataagtgagaaatgaaataaagcaagaggcaatgtgaagctggttacactaaaaaggagaaatctaagtcgttccttccaagatggctttcatgacaggcgccatcgtcttcctcgtcgcccctgcgtttccctgtttccagattcttccggtcgcctctttcttgccccaaaccttgcctgcaccctcaccttcttcagcgttcgccacagccttccaaggctgtagatccagaacgtcctcctgctccaatcggctcaccaagtcctcccacacaagctcgagtccaccttcggtggtaggagcgaaaagcaagagctctctcctgctcttactcttctcttttcctccgctttcgcctcctttcactttggtcttgttctttgacttgaatgtagtcatcactccaagtagatccaactgatgggtcgtcgcgaatgactcaagagattggagaactgaagaccagggcgttcgaggattgctcctcgtcaaccaagaatccaatccaagcgggacggaggccaggccaagagtgatctctttagagatgggcaaaatcggagacctgaacgagtactgtttgtaatctcttgccagaagatcttctgtcgagaaatgggaaacattcttcttggtggttgagagtaaagccgaccaggccaatagatcaggaaggagtttgaccgatccttcgttctcgtcggaggacgaatctggatccgactcgaggatggaaagatcatgtccggttttggcaagatcatccgggttcagatgagagtatgggtacagatactcgacggctttccaatctcggtcggtagcttttccgttctctttcaggccggaggtatcgatcaagatggcgctcaacaacaacgtggcgagttctttgggtataagcggctgaccacctaaaccgacagtcgacattgacgaaggcgacgacgagcctgaaggggaaggcaagactgattgaaagtaaagcgcgacgagagaagaacaacttccagctccagtgttgacgatcctaggatcagcttctttgtaaagcccttcgtctgcatggtgatctaccaccgcttcaatctctacagacccttccgtccctgtaggtatacttgagccaagttccgggatccatttagaagtcactcggttgtggtcgaccaaagcgagtttgactccctgtcgaacgagctcggccggttcgataggcaaatcgtctacgcaaagtaaagatgagctctcaatagacacgttggctaagacgagcgtgttctctggtcggagagacaactccgctcgtggggtttgaacgagagcaatatgtttcggtttggcgagcaaagttgtgctcagaaatgcatatgtcaatgcgcaagccagcgaatccaagtctaatattcaatttaagccaagagcaactgttagaaagacagaatttcgaaaaagtggaaatcacacataatgagatttttcgggaatagagacaaaagatggttaccaacctccggcctcgttgcccatgacgatagtccatccattcgccttcccggccttgatgtcatccaaaaacatctctctcaaactcaaaagtgagtccccaaccaaggatcctttggattcaccattcttgttctcttgaggaagcgtgatattgttcgtggaagtcgcggtcattgctgttgtcgttgtcgtcgtcgaggctgtcgatagcggtcttgttattatcgaagaaggtatagaaaccgtttgaaatgatgtaggcttgacaaatattttggatgaggacttgagagttgatttgaccacaagagcctctgtagctgtcttggctgtagatgatcctaggatggagaccgaggaggaagaagaggagcacaaagcgtttggaaaagagcaaagtgcttttttcatccactctgggtcaagtatcgaatttgattcctgctgcaagatagccagagcgagcaaaattccgactgaaagcaggaaagaaagtgcgatgagaacaagtcgttttggagatctcatccggtgagagatatacacattcagaaaacgtttggtcactttgctggacgactgtactgacgagagttcgatgaggttgttgagagaatggaggagaagcaggcgagagttggaaggacaagattggattttctatttacgtttcctctagtgacgtaagcaaaacccgaagggtttttcggaacatggagaacgaacgttgtaatcttgatttcatacccaagcatgatacgttgtattcacatacacgcagacacatgaaggagaaaaattgatagtattaaggacagagctgaaagaaagaggaagatatagaagaaagaaggaagaagaaaatgaagggaaatagagagagtactagaaggaagaaaggagggaaggtccgattttttaaatcggacaaggcaagatggatgacgataaatccccagataaagaacagaaagagagaggaaatgccatagagaggtctcctccagagaaaggtctttgtaaatgtgagaaaacctcgatggtttgacttaaggtttttatttttgctttgctagtttgtctacctctctaaccggtaatcattccactatccaatccgagcgcatgaaggaacaaatcaacgttggcaaccttacggacggcagtttcctcgtcgactgaataaacgtccaaatccacacctcgaaaggtcgtcagcatcttctgccaactggcaagtttaatcacaaatgtgacaaatgatgaaatcatatacgtaccccaaccctgtttggcagcgactacaccttcaatgaccttatctctcaactcggccaccaatgtctgctgctgatccatgtttgcatgaagagcgaacgagctcaacatctgccatacaggcatatccaatagatcgatccctccatgattcttggccatgtagagctgggggacgaacgcgcttgaaacatttgcagaggggaaaacagttggaaggtaggatgctatgcgaacaaacagaccatcgaatgcttgttgcctagtctcgtcgatatcaacgagaggtatttaaatcgaatggtcagccaaagagaagagcaattgatcgtgaagaaagaaagattaggaatctcaccattgttgaatatcagacggatcgggagattgctcggcggttccatgcttgagcacctcggctcgagaaagtaggacagtcaaaagaacaactccaggctggtgcaagaaaaagacaaaattgagtcaatttcaatttatatgtaaacgacgctgaatgcaagacaaacgtaccctagtctttgcgatctggacgacattgcatctctgaacaactaaaccaaccattccagctaccattctcaactcgcatttgtccaacacactcaagaatgcaggaataacgctactcaagaacgcatcagtatctttctccctggcggcctgttctctggtgtaaggtgggagcggaggtggagcgtcccatacgacgtcgatttgagagaaacaagcgagtagcagagtgaacacagtcaacacctgtgaggggttcaggtgtcgaagtaaacgggggaacagcttttttcccttgagaggacccaggattgagataaaagggtgagggaaactacatcgagttaaagaaaagacagagattaggacgccgaaaacacacgaaaagaaaggtacttgaaaagggaccatatacctgtgatccacaggcaagtcaaccttgagctttgtccagagttcttgaacaccagctctgtaggtttcctgccattccaatgcacgctccttgtcttgcgggtcaatgtcttcctcgtcagagaacaaatgagcgggaggagagtttcttcgaagttgctccaatttcaagattacatcgtacagctgctcgatcgcgatcaatgtctctcgtcggttcaaaggctggccttgctgctacatgatcgataaacaaatagtagagccatgttagcatgttgaacttgaccagcaagaggtgcaaaacagacatacatgctggttgggatcaatcggctctccgttggtcttggacgcatcgacctttgcatcggtagagctgtacgaagcctgcaacatcggtcgaggagcagttttagcagaccgaacggtggtctttcccaagacaccctccaagtgagctatcgatccaaggcgtgtcgacacgtgacgtcagtctcgatcaaaaagagagcggcacatttgggaaaaaaagaagaggagatgggaacaaacctccagccttggtagtctctctctgtttggcagcatcaacaattctcttgacttgagcagccatcttctgcatcgctccctcctttctgcccatcctgttcatcccgacgttgcctcctccgtttctgggtccgccaacgccaacgccgacgcccattccatcctgagtgagctgaacaactgtagccggcccgtgcggtgcgccgagtttggacctcaagatggcaccatacacttgagcataaaagtcgtcggcgtaagggtcctgggtgacgagctgtgagacttgaattcgagtgataaaatccttgtcggatcgagtcatgatatcgttgtactgagcctggttggttggaagtggcaatagaggacaaaaaagaggataaagggaatatgtcagtaaagctggtcaagacttgaacttgaagacaaagacacgactcaccatcgaggcaatctttctcgcttttctcatccttcgttcatcagctcgctcctgttctcgaatctttctctctagctcttccttgacaaacgcctgttcctgctcgttcgatccgacgagagctcccagcagatcggttgaggccgcgacaggcgcatccttctgtcctggcaaagcaggaaacatttcagacaggttgaacgctccccccgcaccttgctctcgtggagggccaggaccaagcccgggtggaccttgattggagacagcctgttgcgggtcgatctcgccagggaaaccatgctggttttgctgttggagctggatatgagcctgctgctgggattgcaaaaggtgtggttgagcatgaccgacgaaaggagatccttggggagtatggacgttgtttgctgcgactccctggaaaggggcttggccctgctgctgtatcgattgaggatgagcctgaccggggaagggcgatccatgctgctgtggaagaagagactgagcctgttggtgagtagggaagggggaaccttgaggatgttgaccatgaggaaatcctccgtgaggtagctgctgatgaggatggggagaaaaatgaggaggtatggctgagaatcctggatgctgctgctgctgctgctgctgttgttggagagcaataggctgaggatgtcccatgaatggagacgcctggctatagccgtgatgtggatgagatcctccgccaccagcaccagacatcatttctcgttcgatctcttccatcgtgagaggtcgaggtttggacgaagcaaatcccatcatctcagcctctatctcttcgagcgtcttgtgacgatgttgctgttgttgctgctgaacagatggctcatcaaacgaagagaaagcggcccgaccggcactctccacaccttcagggaaagggacatatccgatcagttgatagcctgaggtgtatttcgaatgaagatcatgaacatacctcggctatagctatcagatcgcgtgggggtaccccagacgtcacctttgccatcaaatgtgccacccgattgatttgcaggagcccgagtgggcgatggtgaatcagcccagagatcttccagcgagccggcaatcggaattcgacctgaatcagatacgaatccgagtggaataaggaaaggtagaagtcagcgggagtttcgactttagttccatgaccgccagtcttcacaacatgacatatcaatgtgtacctttgatcttggaggttgaggacttctgaggaagaagcgcggtcgtctttggggcggatgaagatcgaagaggagcaacaggagtggtcttgtacactggcttgactcgatcatccagacgagcggtctgcccggaaaagtcaaagtttcgatctacatgcacgccaaggaatgggcgtaagaacgaacagaaatgagctattgaactgatagacgttgaggagtgggaatagtctcgttctactgaccaacaggaccgctgtctccacctccgaacgtgtcatcgttgaagtcatcattatcctcaagtagcttatcgcctagaccatcgtatgtatcttctccccagctaggtaaatgtaaatggacaccaaacgaacaaatgcttgagtgaaaggttgaaagaaaaagaaaaaaaagagaagtataagaaaagattgtttgaatgacgaacgtgtaaacggcgagatcttcttcttgaccaaaatcgaacactgaagaagcgttcactggctgtgtagaagagccagccagacggttccttcgctctggtaggactggatggaggattcgaatgccgattggaaaccgaggtatgaacaacggagaaaagagagaaattggaaagaattccaaacgatacaaccatcgatcagcacaagcacacacgaacgcatgccgaatatctcaaaagaacacctgaaacacgaaccagagtcaaactcaaagaaacccatgagaggatcttgtgaggaagacgggtgagagtgtagagagtgatgatcgtcgtcgttgtcgctgtcttcttgctaccttcctggtgatgggcaaaagagtcgacggttggaagagagaacgcagagggttacaagaaagtgtaaccgaggttactgtgtggctggggttcaacgtgacctcgtgaagctgtgcaatctcagccgtccaggccataaatctccatcatagacaacaagaatgatgtctggtgcgcttgctgaaggcttggatgtgttgaggacttcgaatgcttgaagactggcatgtcaagaaatgaggtagtagcattgaacgatgcgaaagtgttctacccgatctcgaacaccttatcgactgtctgaacgatatatgacggatgcttcaaggtcaacctcacttgtcactttctttcaaaagttataaagtcgtgcaacgcaccgtttcttttcctccaacaaatactcgatgatagttgtaggctttgcttcatgtgtttcagtgaaacatatcgagccgccaagaagtgacattgaagcgcgcacactgagtgtctcttgggcggttgggctgaatactcactaatactggacctgtcggttccgataagaattgtctacctcactcacagcgtgctcttttgcatgttgccttcctcctctgtacatgctaacatctgctctcgtttgtcttgaatcttgtttggttcatccagaacaaagcatagggccattgcatgcgatgggcagaggcgccacatcacgtgactggatcgagcaatttaggtactggtaatcttacctcttaccgccgtcattgctgggtacagcgaaaccgatagaccatcctgaccatcaccatcaacccatcacctatctctttaacacatggtccggctttcgcttgcaaggctaggtaggatacgttcacctcctgctgcgccaccacctcctggctactacgacacacctgttccgttcagacctctgcctcaagcctcaacctcggttcctgccttctcatcctcgtctcctctgtcctcgtccgagtcggcctcacctgcagagcctccaccaaatacatcctttgacgagtcagacatcaatcttcctgcacctctgccttctcgatgggatgtattggccaaaagacgagtggtaagtccagtttatgtgcttgaagtgtgatttaggttaaccttgaattctcttttccggggcatatatatctgcagaatcaaaagtttcttgattatgttcacatcgtgatccgaggaggtcgaggaggagacggttgtattgcattcacgtgagtagattcgacgtaacgtttcaactatcgttcgtttctccagagtcgatctgatcacttctctcaaatagcaaacttccccaccgacgggatttgcgaggcccgccttctggtggatctggaggtgaaggcggaccagtatatattcaggcctgcgataccataggttccctctctgacgtcaaacgacggatagtaggtcttcagggttcaactggtgctggagactatcagaatggaaagaagggaggcgccactatcgttcgtctgtttctcttcacatgaggcatgaggtctgcccttggattctcaaaatctttttgtctaccgcatttctccaatttccaatccgaccttcaagatcaaagtgccacctggaacaatgatacgtcagatctcacgaacagtctaccgaccgcttactccggaagaagaactcttaccaccggccgatcgagacccactgatgatgcgtgcgctcttgatctgtcatcctaccgctcgagcttcagaggataatccaccgccgatcacaccggcgcatgtatacggaaccaccatacatggaacacccttgccgcctccgccgccgatcgagttggacctctcggcagcgataaacgaaccgattttgctcgtgaggggaggaaagggtggtgaggggaacaccatattcggcttacacgacaagaaagggaaacacttatgggcgagaaagggggaggtcccggatgaagtcaagttggaactcgagctcaggttattggctgatatcggatttcttggagctcccaatgttggcaagaggtcagtttgtctttatctcttcttatttatcagcagtgtgtcttggatttctgacgagagaaaacaaaattgcatcatatcaatacactttgtcttttcttagcacactacttcaagcattaacagccgcttcacccagaatcgcctcatatcagtttaccactctcaatcctcttgttggtctctgtcgaatccttgacgacggtaccgtcgtgtcctcaccaactcgaccgaaatctctagaggtcccggaatcatctatttcattcgacgaacccgttctaccaacagaacgtttctctctagacgttccactccctgtcggaaaatcgaaccgggctcgagcaggtcccagacatcgaacgccatcgaaagatgaatcccttcggttcaggatatgcgataacccaggactgatcaaagattctcatctcaacaaaggattgggtcatcagttccttctctcggtctccagatcacccatccttgcactcgttcttgacttttcattgtccacggaaaagttactggaacaagcagagatggtcgttcatgaggtagaaatgtttgagcccgagtcgagattgaaagagcgaatcagattggtggtgggcaacaaagcggatgaagtgtcctcgcctgccatcggtagaaaacgtctccgagctctgcaagcttgggtgaagaaacgtctggggacgaccaaagtgtgggatgagtacgccgagcaggaggtcgagatcgaggcaaacgaagatgttcagataaagctgatctctggaaaatggggtcaaggaatcagagaattggctttccggatgggtgagttggtcgttgctaaacgacatgaagatttcctcgctagggaagaaaggaaacgagcggagaaggaagcggaggaggatgcggtcagagaactccagaaacctattctaagaatcggagatgtgccagagaaaaagccagagattggctttggactcagagaggaagagaaagctcgcaagatggacgattctcatataggatgattcatgatgttttcatgtgttctttctgctttcacgatgatgtcttcatcagtgctagccatgaaaacaaaaagaaaattacatgttttattgatgttttatttggcaaagattctactttctttcaatcaaacatatcgagcctattgttttaagtcaggaaaagacggaaacagaaggttttgttctgatcagcatgaattcgggcaagacgaattaacaagaggcatattcacattccggcgccgacaggtcctccaggaagatctcgcagaataaacacgttgaggtctggaaccaaaggcgaacgggatattgttagtctttgattgtttctcttacctatacataggaatgaagatgagacataaaagcaagttcctacctgttcgttggcaggccaacgtaagcttcatcagcttttcttccagaatctcgagatccctcctgtctagagtgcccaacaaactacccccgctctcccggacgtccaccctgttccttctctcgaccaggccagtcacagctcttagctcggcttccttccgttggatttgattggccattgatttgtacagatgagagatcaacgcagtgtaggctctagcgagatcgacatgccagaggtaaaacgttcgagcaggcgttcgatcggtcgttcgcgggacttcttggagttcgagaagggaagcagctgaaagagcggcggtgatcactcggacgtctttaggggagagcatggcgactttagagatctagattcatagacatcaccgacagaccgagcgaaacgaaggagtgaatacgtcagatattgatcctattcttgggcggtgaatacagagagaagagttataagagagagaaagactcacatgtttctcatccatctttccgtatttcaacacgacggcgaccaccctagcagcatcatccccccatcgttctctcacaacagcatccaatactcttctctttaacctcctacacaccgtttcaaactcgacctgataacttcctgccgaatctctcgcggatttagatcgaccgacaaacgcggcctgctggcctgaggaagtcgggttatcttccgaacctagaagggaaagatatgtctggatgaatgcttggggggcggaagatgagtccaaggtagaagagggatcaaagattcctctgaaaagctcgagatttcgagggatagcttgagaaatctgatagattgtcacaggatctgattcggtacgtttgaacaaggcaagaaagcaaggacagaggtatcagctatggttcacctggcgtagagcgtttgacaaaatttgttgacacgaaccggatcgtatctcggatactttcatctggctactatgactggatttcaacatggcagccaccacacttccggcctcgacattgaaccgatctgatgcagcttttacaatgagcttttccagaagaatccggatccaaggtcgctaggtgaataacaaaaacactaggaacaaagacgaaaaggtattttagaaaaggacaaacatcattacggatcaacacattgaaccgatccatgttaacgtagagatagaccgaatcctagaagacgagatacatttttgtattgcatggttgaatgagcgcgcgcacatttggaagagaataggcatacatggcagataggaaacgcacagagattcgaagagcgtcgtcatccaactttggcttttttgttttgcttttgctgtaatcgagacagagatgaaggagtgtgagcaacctcatactttggaagaagcaacctgaaggagtcaacatacccgatctctttcctaagggccattttccagtcagcccaggactctctttccgccgacactctgccccatgctttctcccaggcagcattcctatcttttggcccgataacacctctgatcttggcgagttcttcttgacggagagtgattagcttgtctctgggcgaaattgattgggatgggtgatacggaaggatgaaggattgacgaaggagaacgagaagggtcttttgaacagaggcggccttcttcttgtccactctgaattctacttttggttgaagctcggatgtaggattcgtcaaggaatccgtcccagtctccctttggtccttctcttctctttcttcctcctcttcgtcttgaagcatccgtctctttccgttcttcaacccggccttggcttccttagccttttccttctctctgactttacgggctcgttctttgtctttcctttccttctcgagttctcgttttgactttttctttgttggcggaggtgaggaggaagacgaagaagagagatcgttttcagaatcggaatctcgatctgctcttgtgagatggttactctggttctggttgtcagacgtggacgagtagaggtaggacgtgcttgcgtccgtagcaggatccgctttggctagttcggcgagaatttgtggtagggtgagttttccgtgggtcgacagcaggttcaatatcgaagccgcctgaaggaaaggaagaaggttggataagtgcgaaggaagagagtcaaacgagtgagtgaggcattggtaaagacagaggaaagaaaaatgagggtagagggagtgatatcccagaaacgcagagcagacgcacctcatctccccattcgttcctacccatttctacgaccctaccgactctctcgagcttcaagaccgaaccgacgtccatctcgtaagcctcgatgccaccagtatagtctggtccggtccaccaaagcaggttgtgttgggtgagcacgatgagggctgcttggacttgacgtggagggacagaggaaagcttagatatctgaggcagcgtaagccggcctcgatggagaattggatgtgcgactctctgtattggtgaagacatatcaaaagggtaagataaggaagagacaatgttcccaaagggattgacatagggtttagcttttggccggtctgggtgactattctcgatgacgcttgacggttgacgcttgtaaagaacgaaggaaaacaaaacaggtaaaagacgaaccgcgacctgaggtccaaaatggacactgatgatgtgatgtcccagacggactgcctccttgtccgacatgacgaacgtggtgtgctcttgacgagtggatgatggacggacggatgcgagtggaggaggttggaaaaataaaataataaataataaataatgaaaaataataaaataaaacaaaaactcattacaaaagttttgtaatgaggcattgggagtcttttgccagtccactaggaaaagtgaaggattcaacgctgatacacttgccagcgttgctctcctccatgctctgtgctaactccttggacagccgaacggacaagcacctgggaggactgaacacggtggtcagaggggaacttatcttgtcgcagataagggaggcgcggaatgcattgtacatcagccgttcagcgtggtagacacaaggtgatatagatagatatagtaattccattaaaaggaaaccggactgttcaatctgttgatctgccatgtacgtgcacagtgacttcgtccatcatgtctatgtaggtcaccagcttgtcgtcttccggcgacccttccatccgatatgactgacgcgttggtgaattggaagaaaagtcacacatgtatacgtgcgccagcagagctctatagatctgaacagcagagcatattgtcttgttcttccataaactatctctctctgcagacccgctctgcgtcttgcctcttgctctgttgctaatccctctgccgttgcgccagactaccgtgatgtctctagaagaagaagagtccaaaggctatgacgagactagacgaaacccaagttttccaatagaacgactagacaaaaatcgtaatgagaaatgtcgtgatttcaatttcttcactttttctttttcacctccaaactttcatctagatcttcctcgtcatctcatcctggcagcattctttgtagagctatcatgacaactcccgtacagaccacatacaagatcatcccgcctacatccaggtttgcttcgcttattgccacacagacgatcgttcagatcccttcgtttactctcgaatccggcctcgagattagagatgtccctgtggcgtacaagacttggggaagactgaacgagagaaaggataattgtatggtgatctgccatgctctcacgggaagtgcagacgtcgacgattggttagtggttctttttcttttctccagaggattccttttgttttctggttcgccttgctgttcattctttagctatcaacggtgaactcactatgcgaggtttttgttcgtttggagataaggtggggtcctctcatggggccaggtaaagcattcgatccatccagatactttatcttctgtgccaacgtcatgggttcaccttatggatccttctctcccgttagttctcttgcctctggaagtatgaagcttttttatttcgtcctcttctgatgcggtccgtatttttcttggctatctcacacccatctggacatttaggtaaccaccaatcccgacactggaaaaccctggggacccgaatgccctcttaccaccgccagggatgacgttcggtgagtgtctgttcgactgtgtggtttacatgtcaataaaaactcaagaacctccctctctctcgtagtattcataaagtcgtcctagactcgctcggagtcaattcggtagccgccgtcatcggcggttccatgggaggaatgactactctggaatggcctatgaatacacctcctggctttgtgcgaaacatcctgcctctcgcaacgtctgccagacattcggcgtggtgcatctcttggggtgaagctcaaagacagtccatctattctgatccggcatacatggatggctattacgccgatgacgcccaaccagcatttgggcttgccgcggcacgaatgacagccctactgacttaccgaagtagagacagttttgagactcggttcgggagaaagacccaaggaggtctcgccagtggttcgatcgaggttggcgctaggccggaaagtcctgtgagccccggagcaggagacgacgcgttcaacattcacaatgacggccacaaaggaaagaaagctaggggaacagattctccactcacaggcgccacacccggaccgactcccactgtgttttccgctcagagctatctgaggtatcaaggtgaaaaggtatgctgtcaaccggtgtttccgtttctgccgttcgaaggggttcttgaatgttttcttacacacccatccaaatacctttccgtcgttcatcgaatctagttcacgaaccgattcgatgccaactgttacatccatcttacccgaaagatggacactcatgatctcgcccgaccccacttgtcgtcccctacctcgacctctgcacctcctcctctgtcccttccgacaacgacacctgaatcgacccttgccggtgttctgtctcgtcttccggccaacgcgctcgtgatcggtgtagcgaccgacggcttgttcaccattcaagagcaaagagacctcgcaggacacattccgcaggctgagcttgtggtaatcccctcgccggatggacacgatggattcctgctagagtttgaagtcatcaacgaggcagcatccggttggctgaaaaagaggttgccagagatttatgaaggagaacctttgatgaagggtgaggagactgaagggttcaaagctcagaaagagagtctgtttggtgaggcagaaggcgaggatgtgagcagatggtgatctttcttttcttttcttttttcttttcgtccttttcttctttttttctttctcttctttcaatcagcaccttagtttgtatcgttctgtccttgttgcatgggagttcaaccctcctttcggtcctattagttttcttttcattagacagacaccaaaccctcttttttctctccttcatagcaaatgaaacatgggtttacaaggaattcaagaacgttcggcgatcctcatctctgtgtgcttgaaagaaatagtcttgatatgaatgcatacatctcggatcgttcgcatatggcacaaacttccaacaggggcgaagaaaagtaagaaaagaaaagacaagcaaaaagaaaagaaaaaaaaaactagcataagaaaatacaaaaccccctcctcgattctcaacttatactacaggcgattcctgcgctctcattctcattgaccacgttttaactcggcttggaaatccctgacggcatccaagaagccagtcttggggtcatccctgatgaatcctaaagagagcgcggcttgttgattaaacgagcctggccagaaagccatgatcgacaagacctgtaggtttgcgtgagcacatgattgttttcgagatcgattagccagagaacaagagttagtccgtgtactttgctttgatgtgggggagagaaagaagagaagagtagatagcagagcttgcagacagagacttgccttgggatcttttttaaagtcaatcagattgagggcttcactaccgccgacgacagctagagcttcgatgatatccctcgtggtgactgtgattcctgggaagttcaccgttcgagaatatgaagggaaagccgatgcggggagcgagaggacgtgaataaagttgtggatgacctgaagatcaaacaattcgatcacatttaagcagagaaagaagagcagaaatatgaacaataagtgatagatctaaggcagagagagaggaagaaagaaaaaggaaaacacgaacggtagagacccttgagaggtaaagcggaaagttgtcgagattgggatcatcaattgagtccgctaccggacattcagatcgttgaccttgcagaggttctctgatcaatcctgagatgaaagatgaagctgccgaagacggggcctgtgtttgatcaagaaggattcgagccaaacagaaataggagagtagtatgagattggaaacttaagcaaaacacaattaaccagagactaggagaggcgaagaaaattacttacaccagacctgatggcaacggtaggcaatcggatgattcgtccgtcctaaccatgattaagaataatccatgttcgtccctgtcagaggcctacctagcattacgaaggacaagacagatctcacaaattggaacttacaatgaacccttttcgagtgtaatcaaaaacgtaaagctcgcagattgctttggcggttccgctattaagatatagaagatgacgccgtgcggttaggctacgttctacaagaggacatgcgcaagtatttagaaggatcgatggagatcaaacaaactaggatgtctctggaaacaaaggagtcgtcctgaaaagagcctcgattgatcatcagttcaagtgatcactctttgaccccgaaaagacacacgatctgtccactcactcaggttcaatctcagcctcaggaatacacttctctccaccgtagacggcaagtccagacacatagacatatagaggcaaaggagagccttgtctggcttgaatatgatgcgctctggtagcggcgaggagagcggtatgcgagtccacgttcacttgttgagaaagatcaaagtggatacatatgtactgtattaaacatttgcagcatcatgtcaagagagtaagaacgactaaccttggtagccaagatcaaagtttgcctcacttcctccggacatgattccgtggacggcgctacccaatatgatcaggtccgagttggccgatatgttgattaaatataaagggttagttccaaagacaaaaaaaatgcagaaaggatggatacaagacatactagatggcgtcgatttgtctgccttcgaataggttctttacttcatccttgttcgatagatcagctccgagcgaagcgatcctctgcttgaactgatcgatcgaggcaggaatcgaaggagctctgacatcggttatgatgaaattgatgttgggaaacgattccgatagagagatcaaaagctgttgaccgacgaatcctctgaagaacagtaagaagaacaaacggatgagccgatcagactgttaacgatcttacacacacgcgcgcgcactgtctagtacttaccctgctccagtgataaggatggtctgtacatgggacggaagggtcacctttggatacactgcggcagacataatgggagtgtgatgggcaagaacaacggttggttgaggtcaagaaaggacagatccttccgtccgacttcctttaaatcggcaggttgaacagaaacggtccaaacccggcccggtgagccgatagccggatagatgaaacaattcaaatatatatgctgactatctaagatccttaggtaaattcggccttctctcacctcgcctcccagttcgtctttatcgaccatctcaccatcactatcaaccatcaagaaaccgccgtctttgatcatcatcgtgagtgtttctcttggctgatgaggtcgtagagagactgtgttggatacccggtgccttgtagtgtcgagagagactttgtcttgctttgatcgagtctgtcgctcacctctgggaacagacggattcttctagtaatttctccctgtcaccgaaagttctttgatcgtcggtcgttttctcttcagtcatttgagctacggagcttcctacatcctcgcctttgccctgtataatctcactcgtacaagcttgcaccaagaggctgaccgctttgtctctgtgctgttctcgttccgatttctccgtttccgtacgaacaaaaaactctaaatcctctgtctacgtgcctgtccgctccgcttttcgtgtgggggtcatctttctcttctttgttgcgctcttttctctctatcctcgccagccgttcgtccggggcttcgaaaacgatccgaacggagataattcggattctacaatacgtttcacctgctaagacacgctccgtagtgctacctcccagcacggtcctttccttacctgggtctcgatctctgcacgctccagacaatgtcctcatcgtccggcccgttccaagttctcaaccgacccaagtttcctcagctgtcgacacctgcatacacacctgccaattcatctcgttattcgcccgaaccttccgtgtcgaatacatcgagtggcattggtcgagcgctcagcttcggagctccgagaaaaccgagaagggagagcttgggagaagcgagtttgaagacaaggccgagaagcggaaaagatggctccatcgattcgtacggggttgagagtggactgaacactgaagacgagagtgatattggctttggggatgaagtgtgggtgtcctgttgcttcataaagaacattccatgtagcagcgttgaactaattcttcctactttctgtcttttcgtctcagcaaagagacggacaccatccttcgccggaaggacccattgactgggatcacttctgttaatcagtacgagatccttcatgagcttggccgaggccaacacggaaaagtccgtttggccagagatacgatcgataattcgttatgggtaaggtcaccatgattcttccattcttttcacttccattcactggttcatccatcgtccgacactttgcgtagaaacttgcgagacagagaattcagactgatacaggcggctggtttgtctttaggaatttcaaaggctatcaagattgtcaaacgagatgagaaaaaaaggctgcccggcctgggctcgcggaaaaaagcaggggtaggaaaaagtgtcactgaagatgcaaagtgtgtacttttcctttttagatcttccaaacgtattttgacagttctcctataaatttcctttcatcttcgcaagattgaaaacagaaatagcgatactcaagaagctccgaaatcggcatgtggtccggatgagagaagtcatcgatgctaagcaggcgagcaagcatatcttcttaggtatcgcctccttcttcgttcacataatctgagttggatttgagtgactgaccgatgccttcttattctgtctgaatagtgttcgaatatatggaaggaggtgaggttaaatggaagacggaggacaatcaaccattgttggccgttaatgaaacacggagagtgttcagagatgtcgtactgggtttagaatactgtgcgtccagatacttgccttttctaattgcttttgcgagcaaaactccctcatctgtccgcctatgtcctcattcttcaacactgtctcgtttgtttgacaaatagtacaccaccagggaatcatccatcgcgatatcaaaccggcaaacctactctggtcaaaagatcactctgagatcaagatctcggattttggcgtttctcattactcctccgttcttcgtttggcttcatcttccggagatgatccagacagtccggaaggtcgatcatcaggggatgcttatgctcagatggacgaagaagctttggcaaagaccgcaggttcaccagcgttctttgcacccgagctatgctacaacggtgaacttaccccattagggaccggctcgccagccgatacgatccacaatcaacgcgaatcattcttccagaatctgcgcaacgcaaacgggctacattctccttcagtcagtaccactggacttgggcagacaaacactacgacagcgacgaaagcaacgaccccgcctgcaaccgcttcgtcttcgggtctcatagtttcgactcgaccgggtgctagaccaatgagtcgggaaccttcccggcaatcttctacattctccttccagcagcgatcttccgagcgattcaactccggtcgacctaagatcaccaaggcgattgatatctgggcgcttggagtgactctctactgtatgctctttggcaaagtccctttcgaagccccaaatgagtttgcattgttcagtgtaatcccaaacgaagactatgagatcccagatagcatgggagctgacaagttgcgttcaagtgatgatcgggacgggatggatgctttggatctgctgaaaaggctgttggacaagaacccagaatctaggattacgttagaacaggtcaaggtgagatattttcactttgctttctcctcaaaatattgtcggtctggataagttggttctcatatttgagcggttttacatattttctagatacatccctgggtccttcgaggattggaagaccctgacgcttggcttcgtcttcacgaacctggctatatcacagttactgtcgacgacgacgatgtcaattccgcgtttaccctaacaatctctcaaaagctgaagaacacagcatcgaggctgaaaaataagctgtttcattcggcttcgttctcgtcacctagacgttcaaactctggtttgagctcaaccggaggttcactcagagtatccagaaaaagtctttctagaacaaattccacggttgtgggtaaccagcaggatacagatccatcttcatcactgtcatcccggcagcagcgacccacccagcataaccggtcgttctctcaggtgtcccaatcgctttcgtctcagcccgagcagcagcaacgatcttcatcctcttcatctcaaggccaattttttctctctcatctccacccttccaaatcatcgcaacaacagcaacaacagcaacaacagtcattctctactcagcatctatccccaacttctcaatttgacccacagcatcagacccagaaatcactcgagccgcctttggcaacatcatgtgcctctttatccattcatcatccccatcctcatactgcctcgcatcaacaacaaccagagccacatctacaaacacagcaacaacctcaaacgcaccttcccttccagatatcaccaagaccaacccctacttcgctcaccagcatgatgcgagagagagaatcaagaattcccagtggatcgtcgagtgctgcgtccgatcgttcacgagttttctatactgacgacgatgacgacgatgacgatccgaggagaataggaacatacgacgatggagaggaggatggagaagacgaaggattggaaatctcgataggacggagaagggatagttatagggttgattgaagtcttctgacgagtccttttccttttttcctcctttttttctcttcctttcgagtttgtctgtttcttttttgccctacacttccctttcactcttgcatagactttcacatactttccttgaaatccgatcccgccttgttgtccttcctgatattatctcgagaaatgattaacagtcgttccaagctggagcaaaagaatgtacccatgcgctcgcttcctgacatcatgttcaatctttaatcctacttttatctcttcgttcgcctttgaccgttccctcagttatactacgaaagaaacaagaaccactcgaatatgattataccctgtccaattacttgagcgcacattcatcccatttttgaatcatgaataaattcttcttcttcaattgaaagatagactcttcttttacttcttcttcactttcgtttttgttaacactatcagtgttgttcaaacaagaggggggaaggatgaagttacgatagataaacgaattgtttagaatgtagacggattgtagaaagaagaaaacaagaaaacaagaagaaaataagatactagagaagaaggtgaggtatgctgtactttccaatgcgatcgtggtgattttgaaatcagtttgaaagactgatttggtggatgtttagtatgaataaggaatggagatattgatcgagtcaacaatagagacgagacagaagatttgtgcctacatacactgactcacaaaagaatacacagcgccacaagcgacagggaagattggaagggaagacattgtaagctgatgagacgaaagcaagtgggtgatatatctaaactagcaaatagaagaggaagagggaaacttgtttcaaggtttctccggaacgctgaagctgacagtaggcgttagattaacgttatcgtccggatggtagccacttctgaatgtcatactcgtatcttctgctcctgcatgagaaagcggattgagaagaaggccacctccagaagaagctgatgctctctgtgacgaagcgtccgacagtcttctactcgagatcgacttcactcttcggtgttgattagagatagggaacggcttgctgctcgacatgtcggtcggtttatcctcgaacaagataggtgagggcgatcgagaaccacttcgagcagagaccgcttcagaagtcgaggcatccatccttcctctcaaatcgagagcattcggaatgtcgacatcgataggatgagcgttcatcggtccagagatcgatatccgaggaggcgacctagtactaccagaagatctggaaaagatctttttatgaagactctctcgtctccgaccggaaggtcttgagtgtataaagatggctgaagattttgatcgagatgacgcaagcgggagggattcttgggaagaccggccgggttgtccaccgacaggcgatcgagaagactggccttttcctgcttccctatgtctctcatccgcccaatcagtgctctttgttcgacttccgctgggcccctcgtcatccgagtcgacttcatcatgctcgttttcgtccgcgtgcctctcctcagcctgctcgatcgattccatcagatgtttgaacttttctttgaattcgtgagatagctcctccatatcttctttgatatgctcgaagtaaagttttaactcggtttgaacttccttttctggaccccggaatcgatcgacgtgtctcttcttctgcttgcaataccgatttcggatgacttcaacttcaacctaagtttatcatttgagacgtcatcagtgtcaggagaacaatagactcaagacatcaaggaggatcagtactcacttcaccaccgtcatcaacctctctctccacaatcagatggggaccctctctgaattttcgaagaggcggcgtctttcttccttctctctccagctttctctcctcgtccgattcggcggcctcccgggcctcaccttctctatcatatgccgcttccctcctcctagttttcaaggaacccatcgaatcctcgtcgtcttcttcgtcttcgtcttcatctactctcttcgtacgactcagagccaagttccctggtctggatccagccatggtagaacttccagaactattcgaattctctctactgattttctcctcgtcctcgtctatctcatccattcgggtacgtctatttcgcttctcgctcatcgtcttctcgtctctatcgtcgtggtctagcgcgcgttcgtctctatctccaggtcctcgctccagatcgtcgtcatcgtccctgttgatggtgatgatatctccaggtaggattcgtcgaacaccagacagccaagcaggttcaggtcggcgaagacctgaaccttcggatcgacgtgaatcgttggttctagtcaacatgatggagtgtgtacgagagatagtgtgcactcgacgaccgagtgaaaagaaggggattgaaagtccatctgcggttgtattcatttttgagcacaacaatccgggtttagtttccaactagaaacggtctattgagaaagcatatgagatacacatacggataaggacggaagaaagcacgaaaaagtgaacgataggctggatggtagcggccagcaactcgacctgaccttcggggggatcatggggttcagggagcttactcgcggccagtgtagagataaagattgcacctaagagtcaattgtagcaacaatataagaattaggcggttatctcaatgatagaacactaagactagagaaaggcagaacacataccaacaccgattgggccgaaatgtccggtgaacagagcttccctaaacgtatgaacatctggcatccatctataaagcgccatcatgatcggtaatctccgaaggagcatgatacaaatcatgaggacgaccaatctccaaaccgagagtgttaaactgctatcggcaaacgaatcgaatggaaggatggcaccgatgtaaataaaagcggtcgtgttgaacagaagatcgatcacgttcgagaagttggattcttcagtctgtttgttgaagaacccactgcgtcacattaagacatgatacaaaagatgtcagcaaacaacagaagtgggctgattatagaaaacaagtgaggaataagataacgatcacatactcccaagcgaaagcggtaccacaagcaaacgcagccaagagatcatcgctacccaacaaagtggtaatacctgatgggcgtgaccaggaaaagcaaaaggcaaagtcgtcacagatcagcggacattgtcttttcgcctgttataggtggatgaaacagaacagattagcgcttaccaatgatcaagatggccaaactgatgtattgagcgacgaaagactgcctgtcgactaaagactttgcttcgcaaaacttcatgagccgtcgggcagcatagccgagcaaggctcccaagacgatgccgagcgcgacctcatatctgacatgatcgaaaagcgggaagagaagaaacagaggttaactgagatatttaccagataaaaacttaacggatgaacagaatttgtctacgcacaaccaagtgagataaaactggtgtgttcgtgtatacgagaacaaaccaaacgatcgatgttaaaatggaattgacgggcactttattttctttctattttttaaaaaataaaaaagacgtccagacgaacccattctccgacggcatgcttatcatccacctccaacgtaagatac

SEQ ID NO: 1048 - DNA, 18257 bp, Xanthophyllomyces dendrorhous
cctccaacgtaagatacaacgcgatatagagtaacgggaaggcactgttgagttgcgatcaccccaaatcatacgtgtatggtcagactaacgatacgtttgattctatatgataaggttctctgcatcgaaagtaagaagaaagaaagaagaaatactcacgctccgtcattacaacctgattcgcaagcgaggatgtgtcggagatgagccgggacgtgtttgtctgcgaatttacctccgataacagcttgggcaagaatctgacacaaaaagaaaggtgaccatattgacatacagaccgatcacgatatgagttctttgttctccagcatagatgaaggaatggatgttgacaaaaacaaaaacaatcggaaacgaaccggatccgtcggtgtgacacaagcggcaacgaccaagctagaaagaaagctgagtccagggataattccccagatcaacaaagccgagacgaaccagccgaaaacgaagatcggacctagaagaaatgcgactgatttccagtgtttacgcatataggcctttggtaattctatcgagcgattgaccagatagacatgaaggacccgacagtcaggtctctaagacagatctattcaaaagctcaggaaaggaatagaaattcagtacgaacctacaccaacaccaaacacagagacagcgatgaccactctggtcaattcctatacaaatcaatggccaaaataaaagtttagtccaaacggaaaactctgtgcggtcgaacctccacctgcgccgcactgcagccattgtacgtaccaatgtgatttcgttcgtgatttctgaacctccgtttccccaactcctcggatcaaacccgccagtcacataaggaccggcaataatacccacgactaattaaccgataatcgggattaaatcagcgataacggaccacaccagcaagttggtacaaagggaagacccactggtggcgatcacggcttctccaacaaacagacgttctttgataaacaaagagaacattccgaactatcaaattgaggaagaatagatgagtgtttgcatgtgtgtctctctgaaaaaacctagcggaaaacttacgagcacgacgaacgctctaaacgagaaattcaagagcaaaaagaagatgcaacgttcatatcagacatccgatgagcacgacgatagccatgttcaaagtacacaaagtaggaggtcaagaacgtgaaactcaccccaggacagtatatgtcagatggaccgctattcgacatccaaccaaccaaacaagaagcggacgataacaagaaaggcagtagggacatccgttgaaggtcgaatcagctctgaggactttctatcgacgaggttctcttggcacgatatctccatgtgcccattcccatccttccttttcctgcccttatcttttctacctcgcttgatatttccattggaacaggaacgatagaacgctactttctgtcggatcagagtttcaagttctgatcacctgtctggtttctccatccttagcaactaagggaagggccatgatttcctcctccacctgctcgtctaactactgaatccgcagaaaagagagaggaaactaaccattaacctcaaacggatggaacgccatcagagaatatcttccgaaggattaacagttggcagttactggggggatgtataaacctatccttcaactttcgttgtggatattgaatcaaacacgagagcaagtgggttgtaggagggaacacgggtatcaatgtcgataatgggggcaagaggaaatatgtacgtaatgcggtccgcagcgcttatccgttcgatcacctccagtcaaacacagtcaatctcgtcattcatatcatgatcagtacaaagaacgtactgaatcaaattgcacgatcggaatgaaggagataagaaaagggtatagacaagaaatccctatccgccaccattgcacacgaaacagacttttcaagaaagatcaaatccagcttcacttgttatcgcggtaagaagctttgctcggagcgtcgcttcatccgtatatggcggaagcttcaacatattcctgcgaagccaaaaagtttcccggatcatatttctcaagttagcttacacatgtctcgaacccgagagagagaagaacaaccaaacctacacgcaagtcgccgagctaggtagtcgagctacataagatgatagacaaacacgaacacgtgagtagactcggagataacctacaagagacgtcattagaaaagaaagagaaaatgaagaaaaaaatgaaaaacagactggtatcggacgcgcccgctcgtatacagaacaatggatcaagttctttgaacccaagcctaatcgacgcacgcgcggcaagaggttagtttgccaaacgaagcaagatgaagcaccctcgaaaagagacgatgttaaacactcacatcggtggacgaggacaggacgtaacaaactttatgagtgctctcttttcctccccattgaagcgactgacgacattccagaaagctatcgtccgaccaagaaccaatacggaagagaggcagttgatttctcataattctattgaattctagtcaaaactagaggaagaagtcgaaaacgaaccagtctcggttgtctcgctcaatccatgcgatacactgtttcgcttcaggtcgaccagatcaatctccgtgtccactccgcctagcaacatctgaagttctcgttgatcaaacattcggatccatttaggctcaattatgtccgccaggccgactttgacgcgcacatataagtgcgggtcccgaatttttgattaattcctcgccaatcatcatcggagcaacaaacaatagaagacaagacgtacggaagaacgcttcagactgcttcttgatctgagtgttaagtttgtatgcagcgaccagatcgatgtactttaatcgattctcattcgtcaccggtacggacgcaccgtcgggaatcaagtcgaccgacgtggtcactccaaattctagatttatcagaagcgccatatgattgatcaacatttgaaggtccaacgaatcaaagaacggagatccttaccttcaacatcaatagtgaacgtcaaagcgagttcttctacatttccatcgaacgtcttgagtttgatgagcccgtcataaagctgtagatccaacgaactaagatcgtcaagatagcattgccttccaagccactttttgactgtatattatctcaatagtcagatttcagcattgagaagagaagtgtcctaccagcctgattgtagaacgtcttgggtgataagaagagacagcgtacgcacggaagaacccagctaaagatacatccaccagagttccttcgtacaacgcttttcccaggacgcgaccaatgaactgatacctaacgttcgaataacacaaagaactcaaatcaagttcaatataaccctcttttaactatcacgtttcttcgagacagaagaacgacgaaccaatcgagttgatgactttcagtcgcatagttcgtaggcgctggatacaactcttgttgcttcgtagcctgccagagacctcggtccgtgttgaacacttcggcgcttagtctaagaaaccaaattggcacaaaaaaaaatgagagtccatcagtccgaatgtatatcatcagacagggtagcgcggaatggaaagagagacaagtgaacatggtggacatacgatgtcaaaaactctttgaaaacccctcctccatcaattcctaatttaaaagagttgtacacgaataagagtcagaaccttcctctctttcctgggttaccagtaagaatatggttaaaaccgaccggcttcgggctgtccgaatcgatcgataaactcaattgagattgttcccttcaatccagctccgattgcgttcagttttgagtacctgttacgtagaaacctcagatcagggagagccctttcttttctggagaagaacaagaagagataacgcgggcgaggaccaacccgtcttcggcgactttgtcccgacggatcgtcgtttggtatttgggagaccgtcttgaatacctatcgatccccaatcgggctttatcgtttctagatttgatcggataacggtcaatctcggagattgtagtctacgagaagaaacgggtgtgaggaaaaaaaaagaatcgaacctgatgaaagctctgaatatctctactcttaattcgaaggggatctatatcgttgttatcgttatcattaattaaaaacgatgataaaacgaaacacacaaatatgagtcaaacgagatccagtccctcgtgtctcaactagcagaagaagcgtgatgtaaacgcaccgtttgtggaatgttattcaagacgcccaaccgaggacttaggaaagccatccgccgcttggtcatcatctttttcgcgaacgatcttatccctacgggaggacctgtcgtattcgggtctggatctacatccatccggttcgcagaatcttcttcgttgatagaatccaggtcctgctcttcggtgctatttgggtcagaacccatatgacggatactttcgttatcagcgatgactagtacgaccaacgtagccgaattatagcataaaacagaggtgaggaaagacaggctcacatggcggcttcgacaaatccacgagtatcgaagctctcgctcatcaaccaaccgccgtctccgacgaatggcttccgttggtctctctcgtacacactggccatcgatcttctcatgatctctctgacgccctctactctccagcccgctagccattcaggagaatctgttggtgtatttgctgaatcagaggtaggtagtgggttccagtatagggcaaatgcaacattccgccagagagaggataagagcgtggtctcactcagggtgagaggattgatcgttgaagagaagaattcatcgtcgcccagagaaagaagaagatgcgtatgaagaagagtgagaaggatgaaaggcggccatgaagatgctagctttgggtctggtcaagatacatgacgagtgtgaaacaaaacaagggtgatttcttcagaccaggcaaatgcggatgatagaaagcaagaaagacgtaccatgcaaagcgtccagaacagctttgcctccattttttccaccgagatccaataccctcctcatgaccggtcccgctctgacctcggtcctccaaagctctttgataacacctccgttttttctagcactgccgacgagcgtaagaacggtctcccttttttctggccaggtcgagagaagggccagaacaaactgtacgacgggtagcgtcagactaattgtcagcgccgagaggtgggccggttggataagcaaagacaggtgagcgagcagctttgtgttgagccccgattttcgccctaccgattgagggcggaactggcggtcctcgagcgattcgtgagtgtcttcgaggccggttccagctcgtcctcccgacatagaggtgtatccggtggaaacgggacgaccttcgatcacccatccggacagtcttgacagaagaccttgacccaacaatgaggcccacgcctctctttcagaggtgttccatttagctacttgaccggcaccgaaggcagcaaagttacccaaagtatctaggatcgatgtatgatcgccacgtggaggcaggacgttttctgggatgaaggcaggagatcggatgaaagagagaatagactttaggtcaagtgatttggcaagcagggtaagagacgggatcggcaatctgttgggaagaagagggatagatagaatctctgaaataagggaaggaagtaattcggggagcgagtttgagttgagaagatgggcgagtgaagctatcaacgacggcaggttcggatgtttcttgtctgttggggactgttggcacgaggtttaacgtcagtaccaaaacgggacggaccactttgcccaagaaacttacgatattcatgagcgctctcctgatcaaaccgaggacgtttctacgagctaaataatcagacaactctctgtttaaagtttgagcgtctgcctctgtcatcacggacttgtaggatgagacatcgagaattaatggaaggatcgcgagttggggaacggtctctctagagctaagacaagaaaggcagagacggaagagtcgtagggagttagccttttaagttcttggacaaagaaggtagccgtggatggaagtaccacatactgagacgaggtagaggctagctgaagaagcttgaaggagagaagcttgagaaggacaatgtatcggggagcggtaggtgcatgaagtgggagcaagatgatcggtggttctgaagaagacaagagatccgatggtaaattacacagagcaatacaaaggacatgagaacaagggcgaagaggactcactcccttgaccgactgccgaccaccaagccttctcatccgcgtgtgcacccatgccgtcggctccccaaccaaagacgaccatcctaagcgcatcgatcccggcgacctggccggtggacacctgggatctccattgagtgtacaaccgatgacgctctctggacgaacggtatatcctttgaacgactctggcactggcatctttacgtctttgatcgtccctggtttgacgttcgagtgctgctctctgtaggacgtcctgagccgagctggaagattgcccggaggagagattgatattttttggagcgcgggttgatcctgtaaagtagtgatgattcataagaagtatgagctgtgagtttgggtgacgacaaggaaaagcaaggatcaagtgggctgtaatgagatattcccagtctatgtgggagaagacgattgagcaggaaagcgtgtaaattggagatggggtggagaaggaatgatgccactggcgaatggatgcttatgtaatcgattagggttattggtgcctgggtaggagacacgccgcgacagagactggacgcgagactggacgcgagactagacgcaagactagacgcaagactaggaaatatcacagtggttagtaccaaaggagctacaacaggactgtatagataactacaacgggactatacaagtgactacaagtgactacaaacaagactaggacacattctatcatagaatctcgacaagcgagactagaagaagttacagtgccagctatgtaaccagagttatcccagcttcggctgtgtctgtgtgtgtgactcgactaactgcgctctcggctcggctatagccgatcttgcgataatttcgataagagcgaaatgacgataaaaaaaaaagaaaaaaaaagacactgggagtcagagacgaagaagagagaggatcaagaggtcaagagagcaaaggagcaaagaagacagtcagcagagaactacagaacacacacaacatgtaccaacagtatgcacatcttgtgaatctgagaataaagacagtgactcattcccatccaaggaaacataccccgagtccgctcgcttccgaaaatatttacaaaattctcgcttatacatgagagatttgaagacagtcacacatgcgatacctttggtcgtgtctttagacaatcctcgcggtcacaacatcatatgctctctctttctcttctccttaccgctaaccgttaaaaacccacagggcatcgagcccactagagtccacggtcacatacagcacatgcaaggcattcaagtcttactcatgtcaaccggttcgaagcctgacctggcgtctcaagagctcattcacctcgtcttccctcccgtgttgctgttctccctactgttatctttgggtttacagatcacccaccggccaaaagaacgtcagatctcccttcctctttacactagtccttcttccgaacaggaagaacaacaagaagggacccatccggatgaactcgaaaaagaccctttcaactttgacgatccggacgtcttcatcgacggtacaccctccgatggtggtatcgccttctggaaggccatgttgatagtcaaacccgtcctgcttgtcctactccttgctctcgtctccgtcaagctaagctcgatccttggtctcggccgactgtttggtggtgacgttggctccatcagtctatctttggccaacagcgtggccctcgttgcgtatgtctatctcgccggactgtgtgtcagatatatccgtacccaggacatcgagcaacattgggcagacacaaagcatctcgccagtttgttagccatcggaactacaggtcaggcattagaactgttgttaccgcaaacaaggaaggcacatgccgagcacaagatcaatctgctcgatcgcatagagctcggaatattgtttgtgagtgttcctcatcttttctttccagacatttgctctgctctaaatgaatcatatcgattgactgagcgacttcttgtctacaggctgccctaatcgtctccatcttcatcccccgaggcccttcgctctatatgccttacaccaagatctacgactccaaaactattcaaaccatatcctcaaccactgattctctcgacaaatacagaccaaatgtatcatccgaagcgtccagttcgatcgtctcagcccttcttttcgactacgcgaagcgagtcgtcgtccttggaggtcggccaaaggcgatcgaggttggagatttaccgatcgtaaaagcttccatgagagctttgccgatgtataccacgatgagagccgtctacaaggatctggtcggccagaggaaacagaaagaactcgagaacaagaggaagaacataaggaccaagagaggcaaaggcggttggctcttgttgaaaatgattctgcgggccaacaaggttgctttcatcacgttgaccatcttggccctcattacatcaatcctatactacggtcccgcgttcttcctcaaccgactactcatttacctacaagaagatccagaacggaaggatcctacctggggctggatctactgccttggtttatttggcgtttctgcaggaaactacattttgatcgggattctttggtcggttgcaaacacattggtcaccactaggacaaaactgatgctcaacacgatgcttttccaaaagactctcgtccgaaaggatattgctggaggaggagcagccggtgccgggccaacttccaccgaaaccgaagaaagcaagaaaggtggcaagggtcagacagatgaagacgacaaagatgaagaagaggacgtcacctctaaatctcaagtacagactttgatgactgtcgatgtcggtcagcctacccttcttccatctttcttctcttatccaagccaactctcgggtgtctcatttgtgaatgactaaacattgtttatttatttatttaaatttatatttttaatttaatcttatcttagaccgatgcgctgattttggaattgaagtcttctctttggtaaatctaatttctcgcttggttccctccaactcgtgaatagaatctcattcatacccttttatcgctcgaaacagattgattcaccggcagagatcattgttgggtaagtggttcattattgtgacaatttgagagcgtatcgactcattgctgttatcttattaaaaatatatatgttcgtttgaacatgagtatagtggatggttcatctacaatctcatgggcgcctctgccctctatggactagccgctaccttgtgtgagaccttctgttccttcctatctttcaatcagatttatacgccctcagattgtcataataaagaaccacgtacccaaagacgatctacgccggcaaaccaagatacagaaagatatggtcattgctaaaagaaaaaacccctgtctttatttggttgtatagtgtttttaccgatcaaccactatgcaagtaaattcatcttgttgtccgaggaaaacgcgatgaaaggttagtaaacaaaacttgttcttctttccagctggcatttcgaatcctattgcgcactctctgatctttgttcatcgcaaaacgctgtttacacttgtagcgagggatgagaggagtggtctgatgaatgagattctggccggcatccggatgatcaaggttcgtcctttcgtatagtgattttatctgtcaacaaaatttgatcgacagctgaatttgtatatgtgtaaaccattcatcaagtttatggcttgggagagatctttcgaggaaaggatctcaaaagttagaaacaaagaactgttttggcagaggtccgtcttccttctactcctgtcttgcttccattggaagactcacactcaaccttatcggcgttttgttaggcgaaattatcatatcgaggttgattatggttttttaaatcaactggcagccctcgaaatgctcatcgtttctcatatgtcttgatcgtgcgtgtaggtcttcttgaacggaatcgttaccttcacacccgtggctgtcacaattattgctctgttccattatgtgtacatcagagagcaacctttcagtccttcgatcgcttttacgcaagtctccctctctctcttttttcttcttcgttttactctgattatccacaacgactcgaggatattgatcctttgactttatcaacagttctgtggctattttccgagagttgcagttcgctctgggaagtcttccagagactgtattaacagttatcaagagtttcgtctcattccgacgagtcgagaaggtgagcttttgtcttctttgtcatgaggtggcatcgagacatcaccgtcgccttggtgctgacgtcccccatgcaatgcttgatgaataaatgtaaaagtatctcgctctggaggagattgagctggtcgcaccttcaacctctcaacgaatttatatgaactctctcactgtgacttggcctcgagacagggtcgcgctttcttatgcttcctcatcctcagccgacggaccttctgttccagcaacgcccaaaaactccttcatcctagaactgccatcaatcgagtgcccggtgaatgagctgacgttggtttgtgggccgttggggagtggaaaaactttgctcttgaaggctttgttgggcgaggcagatatcttgacaggctccttagcttgcccaaggtcagcaccggacgcgatggtaagcctctattctttggttgacgactgtcttccttttcaaagcctaaagaattgatgatgagttttaaaaatcgatttgcaagtccaatttctcgaacgatgtctcaagtgagaactggattcaaaagtctatcactgcttacgtcccccaggtaggtactaagaggacgaatgatctctttcgcgtaatattacctatttaactcggaatgtcgttgcttttcttacacgaaaggtcgcgtggctccaaaacgattctatccgaaaaaacattttgttcaatctaccaatgaatggggctcgttaccatgcaactttagaagcttgtgcacttctttctgatttagagatcctggaagatggcgacctcactgagattggagaatctgggtatgtctatattttcttccgagatggttttacttttccaccttcatctctgattcagcaaatgagtttgctgttcttgcaaaaaaaaaaccaaaaaaaaccctagtctaaacctgtctggcggtcagaaagcacgagtcagcttggcaagagctgtgtactctcgagcgtcaactgttctactagatgatgttctctcagccgtagatgctcataccgctcgacatttgtatgaaaagtgcctgcaaggaccgttgatggctggtgttcgaacggtaatcctggtatctcatcagtatgtctctttcatgtacattctttctctttgtttgtgcgtagcaatactaatctacttgcccttataaagtgttcaactttgtgctcctggagcaaaatacgtgattgcgctgaagaatggagcggtggagtacgctggagatccacaaggattttctgatagctcaacctcgtttgacctgttgatccatgatcctgcttcaaagggcgatgaagacactatcttgtctatcgagaaggaatcaatcgagtcacttgattccaaaaaggaacggtctgacaagaaggcggaacaggttgttctagacggtagcgatttgtcgaaagtcatgtgcgtctttgaatattcgtcttccgttcaaatcgtggtgcgaggcgtagccagcttagtccattcttgtaaaatctgggaacaaaacacagccaaaagacgcctaaaaagctggttgaggatgagaaacgagttgtcggacgaatcaataaatcgacttgtaacttcaatacagactgcaagttcacgaggttcttggcatcttgtactgactccatgatcttggttgacagggctatattatttccgatcgaacggaggcgtcatctactggacattttttgtgttcagttcgctctgtgctatgctcgttccttacgttcgtttattgtctttcttctcatcgtagtcatgttacatctgatgatctgctggtcttactgacatttggtctcctggggacagttcgagaacttttggctccagtaagtattcatcatataaactttgcgtatagctttcaagtcactgatacagcgctctatcatctagaatttggtcttcggattacaaacaccctcaccattcggcgcttttctacgtcggaatttatgccgctgtgaatccttctttctgattagctaccaagacagttaacagtcaagagtctgatctcttacaacgaatgttgttctctagatctctcttagtggaattgtagccagctgtcttcgtagctacattatcttctacggttctctttccgccagtgataagattcaccggaagatgctggagagggtcttattctcaaccatccgattccatgataccgtgagcaaaggaatgttgcttaaccgatttggtaaaggtatgtgtgtctttccatccatgtgcaagatcttcttatacgctctattgaactaatgacatgtttgtgtccaaagatctggaagggatggatactcaattgagtttcgcttggatgaatacgtctacctactttttgagtatcctgatcatctgtacgtacacgtttcccttgcgcatatccacgtcgcatgacttgctcaaaatgactttcttttgaacagttggcagtattgctaaagtgggaggatggagcttcactttctctgctcttgctctcggtgttctatactacttttttggatcttcttatggaccaacctcaagagtaagcaggctactatgtcatgaatcttgaatcatccactgacatatctcttcaaacgacgtataggatcttcgacgactaggtaagcggtcctatgtgattcgtgcatggtatatcattcttctgaagccagattctctgattcaccatctcaaaaaatacagattctgttacaaggtcacctctgtactcgctgtatgctgagactgtcaacggtgtctctgttctaagagctttcggagcttcgactcaaacgctacgcaagatgttctcctttgcagataccaacatgtctgtctatcgttcattgattttcagtgcccttggggaagatgctgactgtacagatggtatatgaatccagtgtatcgtactactggatgtggacgctcaaccgatgggtcactgccagatacaacattctgtatgtcgcgacaattttgattgtttagagtgagacaaatattggtattcttcttgtatcattgaaatcattcatcttctttagatcatcggccattctagggatgaccggtgtcgttgtgctcttgacgccttcaatctctgcccccactgctggcttcgctttatcatttgcgctcaaggtagcctctgatatgcttgccgttgtcagacgatatgtcggcttagagcaaaatatgattgccgtggaaaggttgaaggagtattcagagctccctcaggtgtgttctgcttattgtatctcacatcatcaaggtttaatcagaacagagttagtaaactaatcaccctctgtatctggggtttctgtctttgcaggaagctcgagaattaatcgagcctagacccgaggcttcatggccttctagtggaaagatctcggttcaagatctagtaatcaagtacgcgcctaacctccctaacgtcctccactctgtctcattcgaggtcgatacggagagtaaggttgggattgttggacctacaggttgcggaaaatccacgtgagtaacaatgtgtttaagtcctcaagcgctaccttgagaaccaattttgaccaggcatatcacccgttcagacttgcactgagtttcttccggtttgtggaagcgacgtctgggaagatcatgattgatggcatcggtatgtgtttgggtttgaacctctgatgaaagagatacgatcgactgatggtgtgtagtgtacatgtctgtgtagatatctcaaagatcgggcttaccgatttgaggtcgaaggtgacgatcattcctcaagatccgaccatcctctctggaacgtgtgtccctttgcctctttgctatcactcacgactataccacgcacttaatatctaccctaatttgaaccgttatgattctagtctccggtctacgctggatatctttggagagtatgatgattccgacatctacgaagcccttcgaagagttcatcttatccctactgaaggaaccgaatcagtggccttaagtgttgatgccgatggtgatgaggtgggtagccatagtttctcaagcttcgtatggctggggtttctttagactaacacacgagctttggatcgatgtttctagattaacgcgaacgtatttagaagcctggagagtgtcgtcaagtgagttgttaactcggaagcatatggcgttgctcacaacaggcacatcttagctgagatcgttctcttcctcctcccttcttagtgagaatggagacaacttctcacagggacagaagcagttgctctgcatggctagagctagtgagtgctactttgcagagtggccatggacaaaagtgctaaacacatatatttactttctaccttcctgttgatgtcagtccttcgaaggaacaaaattcttatcatgtacgttttctccaaacggcactctgatcgtattgcgtgattgatattcatatcactctcttctcgactacatggccatatgcagggacgaagcgactgcttccatcgattatgagacagatacacttatcaacaagacgattagagaagagttttctgactcgactatcatcaccattgctcatcggttagtacagcgttccttctcttggcgctcgaacacggtgcagagcctgaatcgaatgatgttttgatttatcggcaggcttcgaaccatcatcgattttgacaaagtcattggtacgttgttttatgataatcaagaggaatttaactagatgcaagagctgacattgattcaattcataacagtgatggatgcgggtcatctgaaagaatacgacagtccttacaaccttctgcaagatccagactcgaagtttcacgccctatgtctggcgactggacctaatgagtttgagattctgctcaaggtgcgttcgcaatttcccatgaaagatttacgtgtcttcttgaacaacagactgactggttcatggcaatcatgtctgactactgaacagcttgccgaggaagccgagaaggcaagggaaaacagaaagtagagagcacgctatataaaatgacgtcagggttgtcctggaccttgtgaatgatagagacgcagtagacggaagataaactgtaaccacggctgaattgaaagatcaattggttaccatattaattaacgaaacttgcggatcattcccctgttttgcccagagatgctcgcgtcatgatgcttgccatcggggctggatcggtagagaagtcttcgatcggcttacatacgcagacgccctactgctcactcgactacccactatgacctgtcgactggatttttcctcaccttctttttccaacgtcgtccgcaagtccattcagtctactctttccatcgatagtcaagacctcagattgatcaggatcttggggatacattcgctctttctcccttcccctcctccttcgttcaccctgtcctttcgttcctccagctgctttttgctcaaagtttcctagctcgtctctttctttttgggtttcttttttgttctctttccaccctcattctttatatctcttcgccatcccttctttaccctcaagatctatcggtctttgtgggtgatcgctcacgtcgacatcgacatcaacactcatccccaaagtagccatgtctagagcggactcatcaccaacgccttcgtccgcgtcgtcttcgtcctcatcgtctgcctcatcatcgacctcgacctacaacgtcaacgcatcgtcttcttcgagggataaccatctggcgactgcccggacagagtgtttacccgtaccagcaggcgaacagaacaacgacgatgactctgaggttgacgagtctgacatctttcaacttgtctattgctcgtcgtccatctcgcctgctatgccgagggatgacttgatcgacatcttgagtgtatgcagaaggaataatgcagccgccgctattagtgggttattgatgtagtcagttcacctgttttctttctgtctttctctctgtgttcattcatctctatccggtcaaccgaggatatgccgtgtcatacatgtcgtcgtccttcagtttcttctattatgtctttgttcatgtctgttccttgaattttagttttgaccaagaacaaacgtgccttcttctcttcctctctcttgattcctccccggctcttaatatccgacacaccttctcatccggctcacagtaaggacggccagtttgtccagttcttagaaggaccagaacatcgcgtgaggcggatctttacaaaaatcaacaaagacgaaagacatagtggggtgtatgtcctacttgaacaaaagacaaataagcgtgattttccacaatggtccatggcctttcggttcgtccaccccttctagtctccttgcacatgctctgttctgccttcttcttcattggctaggccgccgttgatgtatgaaagctgtgtctcgtcgaaccctatgcttatgatatacaaccgacttaaggtgactggtcctcttttctaatcatccgcccgcatatacagagacctggcccgttcggaacgtttacctccgaatagagaaaacatatcgcttgatgaaaagggcgagttgatcaaggacgagaacgacgcgtttaatgacatcatggtgaaaaacaacatagagtacgtctgttcttgtctcggtagaagattttgtcagaattggttgctcatatttactctcttcttgttcatatagatcaacaatgttttcaaataacatgaattacaagataaaaagtctggttgatttgtatcatcgactttttatgcgtaattgatcgttattccaccatccgctgttcccttccttctatcattatcccgagtatcctctcatccggatgaagtcaaagggtagggggttcgggaatgaagtaagaagtagttgacgaagagagtgcaaaaggagaggaaaagttgacaggagcggacggctgagggctagatatacacttattaacaaagaaggagtaggtcaacccccttttttcatctctactgtacacgtgacagggaaagcgtgcctgaactcgcctttcgacgtacttagatcggacagccatccgacccaagaataaaaagaacagggcgaaggaaagacaccaaagcaaccaatgcatcacctccatccactctccccatcgagactcacaactcttgcacgctcaaacgcacctatacataaacccatacctctattaaccttattattacatctgttaaacacaatcatgtatcaaacatatcccggctggcacattttctttccctcatcttctttgatcttttcttttgttcttttctatacatatatccccgcccgccatatc

SEQ ID NO: 1049 - DNA, 27650 bp, Xanthophyllomyces dendrorhous
cctcttcacttcttccttcttcaattttttatcattcttttggtagagacatcgtccttcaacacttccgcccttgtcctttttctgccggctcgtcttgacaccattcgttgctcatctcgtgattcctattctttcataatctcatcactcttcctttgcccctttgcttctgtatatatctttttcttcgaaactctttcctccctcatttttcgtctctacaccccaatgcataacaatgacggtagacccttcgcctttacaaaaagaatctgttcttccctttacctcttccttctttctttcctccgtcctttcgttttccttgttttctctataagttaactttttttttctatcgttctctcttaacttcgtttggtctttctttttcttctgtcttgaatatttaaatggtaaacccttttatattcgtctcgcagtttcagtcaatcgtctagccgttcagctgcctgcccactcatctaggttgacaagcagctggatgatgaaaactgactgtcatacatcacatctgtggttcagagtcttggtgtcgtcatcttcatgttggtcttcatttttcatttcgataattaaaagaatcatcaattacgtaatctggaagtccattccctttttctcccaatcgaacacaggccgcggtcgatcaccgggagcggatcccggcttattgccgctggctcagtttacatttccttcgatctaagattagataagattagacgacctcctttgatcccagttcggagacgcgattaggtttttagggtcggaagactggttaccatcgagatcataacgtttcatgcccgatcaatatcatatcaaagcaaagaacaaaaacgacatgagattgtgagatgacgataagaacaagataatgggtgttgaatagataaacgatcggaggggactcacggttctctggttgagcggcccgtctggcgattgatgtgtatacccatgccatcgatatgatctctgtcgagtgaatccgtcaaaaaaaacatgcgagcgggtagtgagtttaccatgaagaaaacacaggcttgtctatcgactatactcacgacgtcgtcttggcctaggacgatatgaagaaggttttcttcgaggtaagctgatggttggataagatacacgaagcaggcaagaaagcacgaactctttggtgattttcgactaggaacgacacaagacaacccattccacattagtaagatttccaaacttgacaaacaggcgctacatacaatctcagcaaaccgatctatatcactggtcctcatgatgatatgtgtagctatggttatatcgtctaccaactttccaccatggatcaatactttcgattgaacgcggcggggcaaaaaatcaatataataaacaacattctctcgaagtcaaaggggaagtgcttacagtcactttcgattttctcgagactgttgaatccaaaaagaatgtgtcaattttgctgtgttcataatctgagggaaaaaaaaagagaattgactttgtagaaacgttgtcggctaaactgataggggtgacttgtccttgttgtgaattagcttcgttgtcaatgtagaagatcctacaacaccaagaagtcacaaccagtcagtcagccatcggttgacttcagacaaaagacgagaaaatgatggtcaaacatgttttcgaagtactgatttccaacagtctcttggcctttatatgagcttgacgtaggcgagttgtccatatatcccagaactccgtcagcgtcatgttctacatcggacgattcttcgcctgatccttgatctcggtcatccggatctatatatgtttccggatccatcccaaacgctggatcttttaacgtgagttgcgtgccaaagatcacgtatcttgcgagagaaaagagaaaacaggtgggcgtaagcgcaggaagacgatggcaacagagcgttcgaatatcactttttgaagaaaggaagagatcttccagccttgatagaatcaatgatccattgaggttttaatatatcgacgtcacccgcagtggcgatcaaatctgttgaggcagctagggtctcaacatggttaccaagccatccgtatcagctcttgagcgattctggttccatcacaatagagaggtaagaactcatcaaaactcacagcttttattggctatagccagtagagcgatattgccattgcttaaagtcctcaattttgcatcctgcttgaaagaacctccgtgtttcttcacgatcttttgaagagcagctttattgcaatctatggttccgctcatgatgactgtagaggaatgattgttcagtgaagatactctagatactagcaatagtcggttgacttacaaaaagtggttttgtcgaagatcttgtcttgaggtgcaatgtcttttgagagtctcccagaagatgcagctgagaacttggttctctattacatcaaagatttaaacagaaaatcatctgttagagcaattgattcggagaacaagcgaacaagccaacaaacgtactgtacttctctctgctgcatcgaccgaagatttcctatgataaaaaccatagtgtcaagatcaacgcgtccagcgctgaacccaagcagaaaaatttagatgagttctaacctcttgattccagcaggtttctcggccataagatctctaacactatcaacgtatcgattgaaatctaggaaagccaacgatagaatagagatgatttgctcaggtaacaaccgaacacctcttaagcagtcgaaatgtccgagacagatgtattgtcgcttacctgatactgccatatacggtctctctggcgcatgtatgtcaggactgatattcatggcctctctggacgacttgtcaaatcggatgaacttgcatcgcggaaaacgcaaagtcgagcccattccaaactcaactgaaagtattattttgtgtgccaaaaagatccttgttagctaaagaagcgggtaagaaaagacagaggagcttaccactgggaataacctctgaacccttgacttcaacaacaaaggaatttgttctatatcgaacctgtcagcctctgccttcctagtttcgtgataacaatgattttatcacaagtatcttggacgaacggatggatccagacatcggctgcaccataaatcacaatcagtatacctgagtgtctaatcagcttatatttgcgcttcaaacaagaaagaggccgtacgtttatcatcactagatgttcctctatctgcaaatcggatgaatgatggccagctcgacctctgagatcgaacgaagggcttccagtgctgtccatgccattttctcaagatccatagtaaacgtgtttcaagatcagtaaaattagtctcaagatgatacaagagggcaaacacttactctatccattgatagtcgcttatactcattcctgtgccaattctgacaaacgtagagaacagtggtgttgtcttgtccttgtcaaattgattatctactctaagcccaaggagaagagaagagattttgccccctcgagtgccttgataagatatatcagcagggcatctgataaatcacaatagactcgatgcgctcaccgcttccataccacgctccttgatatttgaaccccatatgatacaatgaatcggtgagtataatgatcgggttgatgaagctgataccgtatctgctcaccgagaacgagtagatcacaggtatctcccagttcgtcctagatgttgtaccgtgataaggacggttcaaagatcatgaatggggattgtcagtcgcctcaccaaacataaaatacagatggtgcgatttgcaaccaaccatatagtccggtttgactttcatccaagctttatctcgcgtgtgacatctatattttgagtgtctctgcttcaatattagtccttctcctctgatcagataaaccagcaggaaaaggaactgtgagttggataaactctctttgcagataatgactgacaacactataccaagcactcacttccgttctataaccgcattcaattcatcccgaatgtgtttggcagtagaacaaccttcaactctgtatggaaattccaatcttcctctgatttgtttggtaatgacgcctgcttgaaatgaaccatctgacttgttgtaaccttcgagcatgtgttttcggtccaccaatttggtcggacacaaatcttgaggttcggggtcatcgcgcaatctaagataaagaacatcaaagactttgactgattgagaggtttagtggattgacagttgagattttagttcagaacagacatcgtaatcagagaaagcatggataccactgacagattggtcgtatagaatcgatcacgccgctatcatcttgaatcgtcaaagacaaccggttagagggttgaattgagattttgaagacaaacaagaactagttaccaacctagcgcagcgctcttcaatgacccaaaaggtactgtgttgtggaaaacccggttaacatgatgcctcgtcttgaagagattaagaagagtggagagagatagaagaaggtggcttacaacatctttctagatctggatcgtatgccagcatctctccactttagatataaatagttaatgttcaaatcgtctactagcaagactgtactcgagaagatagacatactccaggatacaactgatcacaaaaacatcttggcagaaagtggtgaatccatggtcagatcacaggaagaaacgatgaatgtgatacaagaagaatagcacaaactcgacaacttgttcattgaacgcatctattatccaaggtgtcagactgccctcgtctttactagacccgtaaagatatgtataatccttggcttgcctgtccaccgagaccaaaataagctatggtatatatgttctaactcacgatatatatatgatgctaaacttaccttgaccaatattggaatcgatcgcctttcttgtgcagctgaattctttctccgtcaatcttttcctcgaccatctaccaaacaaccgttcagctcgaagatactgattgataacatcaatgatagcagtgacaaccttgactcacgaaatcgaacttcaagtctctggcggccttttcgagacttttgatcaaatatttcgatcgaaaacatatagggcgcagtcaagacatggacaaaatatcggaaggacgaagacatggcttactcggaactagcttgatagctcagcataggtagcataggactcataagttggatcttatccaggtcaaagcacgcatatttgattcagatcacgggtattagtaccaacaatgaatgggaacaacaactttaccacgaaccgtgctcttcttaaatccttctgtactggggtcaggaagggtataagctatcagcttcaagtcttgtgagactgtgaagagattgtatgattctgtcggtttgaaaagttatatgagaatataagagtctaatggtatctcaaggttcaaagtgcaagataaattttatgatgatattagtcctgacctggatgaaatatctcgaaaattgccttttcctgtgagaacgatattcttgcgctcagcaaatctttacgagaaaacaaggtttgactagtgttgactataactgaaaatacgtactctgatagatatcctgggatctgtccgatgttcgaaagtgtgttgagtatcttgtcttttgggatgaacgtcatttaaaacgaagttggcgcgcacctttcaggataatttgaactagccatctaacgatttgaatgatccagaataggttccgtgagcttgatactgatgaaatgagaaaggcatacactgactgctgttctagggcggtcagatgtctagcaaagtaactaatcacggcgcatcgagctttgctatgaaactcccgtgggattattgagcatggccacgcctatagaatactcaggctgggacggatgtctcggtacatacgaatctgtggatctactcagctcgtcctagaataatgttgtatagttcgatcatgtcaatgcgttgctacatattgattgaatgagtaaagttgataataagtccttaccaacttctcatttacttcgtcaactgttagagtactttctctcaagctgattcgcggttctaatgctgcaagaagaacacttgcgaaatcacctgtcttggtgttggtctgataggattcaagccacgaagttgctcagcatagattgttcatgtgctgaagaacatacttcggcagagttgagaacgcaaacagagacatgctaacctctttacctcctgaaagaggttgcttccagttgatcaatctttttccttctcccattttgggatcgaagttcaagacttctacgtaacatctagccaatgcctgttctttcaaattgtatgttgctcgatctctgtctctctgttttttcaaaggccatattcatgagatcagcgctataacgacgaatgagccgcaaaaacacagagggaaactagcctctggaatcaacaaccgtagtagtggaaacttgtattccggtgaagaaactgatgagctcaacgatcaagtaaagcacacaaattcaacatgtatccttgaacatacaaggtccttgccgacagtctgtcgccatttatcgaagaatctcttgagcttctctctcttcttctcagatttattgttgcttgtccgaaggtaattcataagtttaacaacttcgctgaaacaaggcgatgacccatgaggaacaagatctggaggtctaattggacgagtcgagccagagtatgtcgacctctgttcgatctctgagagggacatggaggctgtaagcaagagagaggataaacaatcagcccagatgagaggtggccggcgaagagactatgatgcgatgtatcgtacggcggcgtccgccagatgatttcatcttgtatcctgttcctagatcccatctcatttccatttagcgatccgtccaccttctctccttcaacctccatccgtagcttcatcaatctcatctctcggcagatattcatgacaatgacgattgaaagtactcctcccattcaccggcatctgtctctcccatcaacgtcaaccagaccgtctatcacacacactcaatctcaagcactcccatcagcatcctctcacacatcaacctcatcgtcctccggcacgctcacgcttcaacatccttcgcctctccgaccaaaattaccagcagcccatcattcagttgctcccgtactaacaacaacgcgtactcttggtggagatccaccaaaaccaataaggaaacaatttccttcctcctcattctcttctccttctactcatggtcgcccccagaaagttggccttccatctagcccaagcctcaactccctagcacccccaggtagttccgtcaagacatcctcacatagatcatcaaccgttgcatcttcctctcttccttttgtcttcccgtttggtggttcgcaaggatccagcgcttcatccgatgctggtttgacgccgattccttccccatcgataaatggtcccataatcaatggaacctatcgtcgaagcagttatatgggtgaattatcaactggcggggatcttaatgggcaggtactgttgactagtaaaaccccttatagagccgggttccagccaaaaggtgtatggagagaccgctcgggggactacgaagcggctaggctgaagagggaggaaggaagaagactcgaagagagacgattgggaaggagacttgaaaaggtaagctctgcgctttcacatccgatgttggtcaaagagacctctcaaagcatctactgaatagcaagcttcgatggatttgtttactcgtacagttgatagctttacatttcaccccaccctcacaaccactatcttcctcatcagctccatcagctccattatctccagccaagtcaatcgcctctcccccaccgacttcgcgccgatcgtccttctttcttcctgatctggatgctctgaagaacccaagtggaatatggaaaaatctgaaggacagggcaatggctccaccaccagatatgcatctagaaggaggaattgtggtcaaatcctcagaatatattcgaagtaagccgatcagcggatatagatgatgcactgaggactgacacctcggaatgcaatacgacagttgttgaacaaagtatcgtgaaatgggaagctgacaataccgtcaaacaatgtttcatttgcgggtatgtcattctgattctccgccttgctgatcgtttcgcagctgagtccgcttgccgcacatcttattcttaatcgtcatctcaatgtctcgacaaacatcagaacgaatttcaacctgacaactcggaaacatcactgtcgcttatgtggccgtataccctgctctcttcctccaacgcctccgccgctactggctatcaccccgcacggccaaggaggccggaaagagacttgcagtctactcatcgtggcagatcataaaacaggacagtgtgaagctgtggaggaagggtttgttggcttcttgaagatatcggacgaaaaggcaggtgacagtgttggcggagaggagcacaagggagagatgaaagtcacgggagtaagaacatgtagagattgctggtcgattgtttcgtaagtatctttgcgcatcgggttctgaatcttatacagggccttaaacactgatctctcaactcatctcaaacaactggctcgatcagacggaaacagtatatgctgaatgctgctcgtgttccagcatttatgcgactatatgacgttcgtcttcgatgcggttttgtaccttctgatcaaaccttcatttgatgctcaacctcttcttttctcttctcttcacctctgataatagactcttcggcagatacaatctgaaattctcgaacttctccctactttttactccctcttaaattcttcctcctctcctacatcctctccactatctcctaacagcaagtcttcgcctccaagcgagatcgaaattcagctggcagcttaccgaaagacacttctcgagaactttgcctcgtacgatatcttggcaaagaaacttcgcaatattccttgcgagaaggggagcgcgcaggaaaagttacaagtcaatattggaatcatggcgggcggtttcttggcgagtgagatgggtggactgcaggtatgttctttcagaccggaggaacttaacagcaagttccgcaaatgaatccgtcagcttatattacctgtaccgtcaccttttcatgctcaacagaaatctctttcaaaacaaaagaggcaacacaagcactctacatcctcggttgggtctatctcatctcaaaaatcgattctgaaaggatcctcatctgacaacggtgacgcgagctcattcggctcgaaccaaagaggagcagctgagatagaaatggggctactgttacaaccattattagagcaggaggcacaattggagagcttcattgctgaagccgagggccaggtgtgttttggaattccttctgatttgaacttcgaaataaagagacaaggttgttctttaggcttagcctgatcgctcgtttcgtcttcgtgctttcctctgttatccattattactcgatctagagaaaattcgaggatgctgcgtcactcaaaacttcgctggaggaaattcgtgccgaaatcaaacgattggttgattcgggttgatgatttcatttgtcgctccttttttctttctgaaagaccaaaaaaataccaagccacagaatacccttttatacgttgcttcttcctagcgcagatgaatggaagcacttgtccgacagatatcatccatgataattaatgcttaaagcatctgaactctgaccatcgtcgtcgctgtctgcatcattctcctctaacgatgtactactctcctgttcgtcgtcctcacccaaccattgacttttgcaagcctccagaatggctcgttcacccaaaaccagactagctgccatcttttctattgggccttttgtttcatcctattgttccgccgtcaagaaaggaatataacgcaactagtgaggactagcacaacttaaggagaaaaggggaggagaaaactggaaagataaggctcacatccaagatgccacaaagcatgtccgaggcttccagtgtatcaatcttgctctggatcagcctgactacaccgtttttaaacctttctccttgatctccttctagccctgcgctcaaaacgtcccatccggcctgttctgaaccaagaacgttaatggcgattgaatgaaagagatcaacggagagctgtgcatcagggttgatatagtgtctgtctgcggcaggaacggagggaagagtagggacaatccagggatgagaggcaacgagaatggatgatgacgaagatgatgagcagagaactaaaggggaaaagtgaataaggtctgttggcagagtcattgcttcttcgggaagaaatcctgagagagaagtgatataatggtctcagtatggcgagagaggagagaggagaaggcagaaaaggtgatgggcacgaaaccgtaattgcaggccagttggatacttgacagatcgccatatgtgttgaagatttgttcgcctttaggaatgaattgactagaacacattcggttttcagttcagttgactgcttatataggaagagacggaacagaaactaactttacaacgatgtccccctcatcgatcccctccaatacctgcaacaattctgtcttttggatgttcttgaaatgtgctaatcgatgggggaggcctgtttctggagagagtatatcatgagagcaaggaacaagcgagccacactggtcgcacacaaaatcgtccgcttgaaaatgtacggaatggtttggtgaatggttgaaccttacgttccacaagatttcataaagaatctgagcgaacatacttcagttagagatgtgaagaaacacttggcacttacagatcagctactgggacgagagcaacatgatgataactatcaacgtgaaatgcccgagaagagaccatagagtacgcaaaaagaaaggaatcgaaggtcaagtatctgcattgagcagttctcagaacgggttctgcgtatagagaatagaactcctgaagggcagcctgacaggcaaaagacagagacagaacgccaatcagctcgtatgatggttgtgatcatcatttgcgtggtcctaaatacacgataagagcttaccattcgattccttccccactcggtgtcatgagcgtgtacttctattggtctctcctctcttcttactatccagcctaactctgatttctgagacaatgtccatcctctctctccatcgtcgcctgcgaacatctcccaaaagaatgctaaaggaggagattggcgaggtaatgattgaagatagcctgcccaatctgatttgggtcctaacgacagttcatacagaacgtggacagagagaacgaatgccggcgatgaccggcttggaaattgaggacgagaagaggaagtaagggaagatgttcggtgtgaaagcatgcatgtcattttcgggatccgacaaactatccttggaagagccagaggtacatggtttcagtgaaccgatcgattgaacatctagaggacaagtcatacaagttgatataaaagcgatgcatacggatctcttccgtctgaatatcctcctttgcccaaacgctccatccggcgtgtcctccagaggagaataagtcttgacgaagatccagtcgtgtatcgaacgtaacctcatgcgctcgcagccattccaaaaagatctctatcgacgtcggaggaagatctatcagaggagacttgagcattggatacgagagaagttgctaggaaagaaagatgatgggagggcgtgcagagtttcgacgcgactggacgcgtttaagtcttaccttttttcaaaaattcatttaacatgttcacctaagtccatgtgtgcttgacagtcaaggctatgttccatatcctcttgattactcctcaaccatcatcgaggccgtccatcgtgctcatttgttgcctcgtcttctcggtctcaactgtcgaacgcgcttgtttggcgtgaacaacctgggcgtaacgacattgctatcattttgacgcgtcggtaatatatcatctgtaagttctcaacgtttcgctcacttctcgtcccctgtcgcttccagtcattgtctaaaagaggggtgtatgcttctcctcagtttgtcttgactcttcgtagctagtatcatagtactggaaagaatcctgagaggtttcccggagcagtcaccatggctttctcggacgatgatgacgaattcgatgacatctcgttacccgatttggagatggtcgatctgacggtctacgatacgccgacccaacctatgtctcgttcaggtatcacggccctctcgcgaactccctcaatggtgttgtcatcatcaaagagcaaatcttgcgtcaaaacagaaccagcagacgcgtctgaatgggatatacctatcaggatcgactcgaacggagagtacattcagggttctcctctcccgcccgcttcacaagtagcctttccgaaacttcctcaatcatcgatatccaaacctcagtcgaatcacaacggacacacaagcactgttccacgtcagcctgcagttccgatcaaaaaaactcagtcaaatcctactccccaatctcgttttcctccacaaccatttgttgtctcatctattcagaatggacatttcagagctgtctccaaccctccaatccatccaaatccacgaccgccaagcagactgcgtagcaacgagattatttctccatcagaaggcgtcaacgaaactgcgaagcttactgatgaagctgcgggaagagagctcagagagattcaaagaaaaaacgaggtttgtttttccttgagtcccgtctcgtcagtgaaggattacaacacataatctgaaacgatgaatgcatccgaactgacgaattgtataggagctaaaccgcatattaaaagaacaagcccaggctcttttaactgccaagggggaaacttcaaatcttcgacgaagcctcaaagacgtatggatcttctgttatagtctttcattctttatcaagtcattttcagcagcgcggtcgttaatagagcggcttgttggatcacttgactttcaaccacatcccttcttatccttctagacggaaaccaaagccgctcaaaacctagctgctataactgctcagcacgccgccgaattagagaaacgaaacagacgtgatgaggagcgccgactggaagaagagggaagacgggccaagagtatctttgacgttagttttattctccctacctctggtttttatatactggtcaggatatcactagtcaaagagtttcaaaatcgtatacataaccgtaaatcgctctctgtatcatctggacccatactgtcaatagaatcacaacgcagcgacgtactccgctcgccgtcctcaatggtctactcaatcttccatccctcgttcccagtctcgagctccgcctccattcggtgattttcaaccctcttcgcagaccaacagagggggaggagccggacacaatacatccatggtatccagagtggatacgggggcgggtgaaggaggcagtcaaagttttgctagaggaagttcgtcaaacagggagagcgagacagttagtcctggcagagactttcgagtgaaagaagagaaaaaaggttcgttcgtttcgtttgtttccttatcctgatagtgatacctgtttggaaacgggtctctgtgggacttaattgttgcgttctggcttatacctttttcttttcttcccgtcctacccctttcttttctctttggagtatctattatagctatgcttcctccccctcccaagtttcgaggtctcaaaaatacgtttaacccttccaaatctctcggcatgcgtcaaccatccttctctcaagaccgaccacctcctccgatgtctcagtcttcacgaacatttcgagtgccatttaaaaaccctccttcattatctcagcaagttgatggaccgatggctccgtcttcatcgcccgaatcaatgatataccaaacagagcaggagagaggaacaaaacgacggcgagttaacgatagcgctatcagagagggggcaacggacgaaaaagaggagatgatgacggagacgacggtcaagggacagatacagggtgaagccggagaagtcgtggatcatccggatgcttcgggtcaaacggtcgttgatgagatagaggaagagaatcaggatatagaacaggataacttgggaatgcaggatctggtattagaggatgaagatgaggcagaggacttgttttggagatctcaggagaagaacatactattttcggtggtcttcactgaccaagtttctccttcttcgactctcccttctccttctacctctttatctacaacggcaccactcactccttcttctccttacactcgatctccggcctcgatcagcacgattcagcaaattcttgcgcctcttccaacagaatcaagttcctttagagatcgggcagatcactcgaatgcatgtgctagaattctcaatgctctaggtggggcatctttctcaggtttaggtgcggatcctctgaacgaggtcattagaggtctgaatgctgccgccaaagttttcgagagattgaatatggtaagctaattcgtaatctaatctggaagcgagtgggtttctcctgtgaaacatcatttgtgctgatatccgaatacttgatgtttcgaataggtttcgacattaactgtcactctaaaactcatacattgcattctcctacacattcctcgggcctctagaatccttctccatctccctagctttctttccctcatcacatccattaagaatacatatcttccatttcctgtcaagcctccttcatttccatcgtcgcgcccgcctcttctccctcactctcaggctttacccaatacggcgttggtagccagtccacccagcttgacttccaccaagcaagaacatgagaagtatgcagaaaggacagctgtggtgatgcgactactctacgttatcgaaagttgtgcgtgggaggcggactcaggaagcgattcagatgtgtgagtacccatgtttctctttttccgcgacatatttcttgattatctcctttttgactaacctgatgcctgaggttcgtatatcgattgatcaatttgcaggctctcgaggatcattcaactaccccgatttacgtcagctctattggatccgtcggttcctattcggattgtacttcaaacgatacgcatcatcaactatctttgtttcggttagctcacagagcattcaatcatcctttctatgtttgacacggatgcgatgaattgatcatatcaattatggggtattgttttagatgagcttttgttccgaccgttactatcctatccggaccatgcagttgaacagcctcctcccacaagggatccaacgcgtatacccttggtcgaacagctatgtaaactcgctcgagaacctccgatttctgcttcatcaggagaggtatgattatcttctctccttcctcatcccgatgactctctccttcttaataaattaacaactcgatcttccttcttactttactgtgcatcttgtggcgaataggttttactactctcactcgaaaccagttcattttttagagtactatgtgaaaagcacgaagatgaggccatcatcatgtttggtcaatctcgatcattgatacctaccttaattgtttgtcttgagcgggattcttccatcatttggggaatagatccctcttcttctcagctacaacagttcgtctatccctccattcctgcgcggtctttttttttgttacatatgtatatataacaccagaacaaacactgatcttgagttgtgtcatgattcttcacagatcgataccaagtcttttccctatgctaagtcttctctacagcctcaccgttcctgtaggctccttggacgaccccggtacaccaactgtgaatttgacggacaaactccgtcaggctcctcgacgagaatttaatgcgttgttcgaaaagtttatggttgccttcggtcgcatatgttatgcagatgctccggaggtggaagatatactagagcgtgccggttcagaagaagaaagaggggagtttgaagatgaggatgatggtcaggaggatgttgatgcgagacgatcagagaaggccgatcgattagttgtagaattggaaagagcaggaggtaattactctttctttttctgtctatttaggaacaatcaagcttaccgcgctcttgtacgctccacttgctacccttctcttaatccggcgaattcatcgattcagaaatcgcgcgggatatctttgatcaagtcgtcgaaggaccagaaggtgatctagtgtatgacgtgttttctgatcagcggcctctagatgacgtgccactcgaggaaggacagcatcaagaacaagaagatccggagggatttggatatccggatcatcatgctcgactggacttcccttcaagctcggtaccacctgaggaagcagaagctgtacaaatctcccatgaggtagtcacggaggaccagatactcaatgggaaaaggacgccaagatcatcctctacacggtcaggtgcaattatgactagaacggcggcagcggcggcggcagcagcagcgcaagtggagaggcggaaaaacacagaccagatgatggtaccagacagtgatgatgagttgacagaagaagagggcgacgatgagattcaagtcctttcttagattaggcaattttttattacataaacccgatcaaacaatctcgtccttgcctttgtcgattgtgttgtgtgtagctgaacgccaactctcctgtatcatacatatacatgtatattcaagaacgaattacgcctgtcccttcacttttttctttatcgccgtcgactgtttagggcaccatcgacagcgcctctaagggccctacctgcgattcctccagccaactcggcgacctgcttgagaccaccgctagctttcgtaaggtcggacacaaattgacccaaacttgggactacactggatgaggtaggattcgatggacgggaagggtaacctcgagagtcggtcagcgtagatggagtaccaccagattctttcgatttgacaatccagagaaaggaacaacaacacagtaagaaccgagagaatatctcgagaagatgaggatagaaagagtaagagagaactcgaggactcacggttgataagcaggcctttgacaccgtcgagttgctcgagaatatcgatacccgttcctctgatccacttgagtaacgggctcttcactctgaagactttttctaacccatccgttacactcaacaccttctggttctcaatccatctctcccgctcgtatggtttcaaactgaccgagcttcctaggtcgcctccgacattgagcgcagattcgattgtcctcgtcaatgctcggacgtccaacagaccaaggttgagacccataccggcatgggggtggacggtatgcgcagcatcgccaacaagaacaacccggtgggaaaccgatatgtaagtctcggcatgagagtaggccaaagggaatgaggcggtcattcggggctggaaggaggtaatcatcggaggaaccagatggtggtctgcaggtggaattcctagaggagagggcggatggatcatcgacaatgcagagtgaggctcgactttgccggatgaccgctcaacaagggcgatcagctggttgatctcttctcgagtgatgaacggctcggcctgagtcgtggtagtggctgaggtggtgatagcagaagaagcttttcgggaagcttccaggattcgttgaagaatcatctcgatcccatgctccggaagtctgaagcaagcgttgacaagctcggctagtccattcccttccagagattttactgccttggagagttcgggcgttcggatgtgccaagccaaactagctcgactttctcccaaaggaaggaaggccagaggaccagagggaaggaatcgttggaaggcagtataagtgtgggagtagccaggaggaagtggaggatacggatggtgagacataacggagacaatagtgtgtgtatcgtatgaatgcccgtgcgagggaataccggcaaactgccgagcaggcgatcgtagaccatcggcacctacctaatggttccaaaaataagcaaacgagaatcgattcagatcgagttcttcgctagagagaatgggaagggaagagaagattgagaaaactcacaatcaatctagctctgaggtttctatcaccctgtagcttcagagtcggccatccgccagccacaccagcctcgatcgactcaaccttccgtcctcccaagagctcgatattcttccccttctctttgatgagtttgagaagcgaatgctgcaggttaaagttttccacaagcgtcgacatatattccggacgaggcgatgtcaaagttaatcgagagtccgagagcgagtcccagaccttgaggtgtgagaacgcaaggaagagagaagaagaatttaggaacgcaaaggaagagggaattcagaaaatacggatcgcgcacgatcggatatcttgagcatggtgaacaacggacctgcatttcctcaataggacacgttcgctttggatcaacgaacgaccatgctcctatatctgtaggtcagaaagcaaatgagatcgatatgagcaagacgattttttccacagaacaaagcagtatgagcaaagtgggtaagatatagaaggaacggaccatgcagccatcttcggttctcgttcgtgaccgagctgatcctgttcgtccattcgtcttccttcggtttccaagcttggatcttgtcgagatcagatgcttcaaccaaagcggttttcagatgactcgttgctgggttggtcgagagggaagcaccgagtgctagacccgcgatacctcctccgatgatgacaacgtcgtgatcggaagagatctgactagagattgtagcgtatgatcttaaaggcactctgggtgcgacagcgagcagggcacgacatctgacaagactcatgatgggcgtgtcgttagtggtggtgatggtcgtcgtcgtcgtcgtcgatggtggaaggagagacaagaaattcacgagaaatcccccacagaaaaaaaaacatctttctacttactatcaccttcttcctcctcattccctttcggtttccttcccatcaaagcgagacattctcggacatatactcttcacacaacacacgcacgctgtgttgaaaggcaagtctgataccggccgacagagatgttgatgaatagcacctgttttcgtgatttctaacatgtgctctccctctcgttcgaaccgatctctttctcagaacgaacctatcgaacactatgcctcgcctgtttccttcttcgctccggacacttcctgctcgatcttccctcctcgctactcgagcttctggcttaaccttccgaccgattggtctggtccgaccttccctctccaccacatccctcctggtgtccagctctcgtctttccgcatccctatccccgtcttccgtcctttcctctttcagacagttttccacctcactagcattattgcgtggaaacgccagaggagacgaatatcagccgtctcaaaggaaacgaaagaacaagcatgggttcctctccaagttgaggacggtcagtgggaggaagatcttggctaggagaaaagcaagagggcgaaagttcttgagtcattagaagaaaagatatgtatgaaggagatagggaaaagaattttgaacacaggacaagatgtaaagagctctctttcttttctctacttgaaagtcgaccgagaaggacactcgaacagctcagccctatatcagtgtcctttctttaaccgccttctgaactaagcctcaccgacaagaggttcatctagacttctcacaaatgagctcctgttcttctataacaaagacaaggttgatatacacgagagaagcagaacagtacacacccgtctccaagctgttcaattggtctttctttcctgattctctctagagttatattcagaaaacatgcgataactggaagaaacgaagagacgacggtagaagcgaaagtacagtaggatattatagaaagaatggttacttgagagagaaccaaagaaaagacttgaaatggattcaaccaagcaaagatgttgagaatgagaggcggcgtgttgagaggaaggtgaaagtagatatgacgtgattatctatgggcacaacaggtaaagcagtggatagaaaggaacactggagaagagagaagatgatcaaaactcaattagatgttttgtactgaatccctttctacctctacctcttcttcctctccttcttctacagcaactctgcttggtccttccgttaatacatcaacatccacccctctcacatcacccggctcccctacagctctctcttcctctccaatctccctcaagaattcatctctcaggccgccattctcactcaacccacacacgacctgtgcgagactctcatcccagaccaacctcagaagaactctaagcttgatatctggcgggaggattgatgccttgtcgatgatgtttgttgcgcgcatctttgtcatcgtcggtccgtctgtgggtatgggtacaggtggaggtgtcgagttaaaagaagaggactcctcgatgggggtagagttgttggtcgattgccgttgttgctgctggtggtgttgttgggaagaaagccgtctagagagtgtgtcgacagactctgataaccgatggatcaaaccaaccaactgtctgatcgtcggttcgtcctttacagagacaggcgtcaagagacgtggccgtttgtctgatgaagctagatctgaagaggatggtcgtttgaggttgtttatcgtggtcgttggattcagagccgtagagtgagagtaaaggtacgtggcctacgtcgagtggtacgagagactaaatgagttcgggtagcgagcaaaatagaaggctgaagagacgaacgggatcttccatcaagtcatatgtgatatccatatcactctgtccttgttctcctgccaaggtctgaggctgagattgagactgtcgagtatgtgaagaggccaaatgaggtgattgtactcccgttaagcccgctatcggacgtttgtgtcctacaagttcttcaaattctgcaaacaatggaaatccggtcgtcttgaactttactgcgtgtggatgggtctaaggaggcaaatattctagttaagctcgtttgctaataattcgagagagaagggaaacaacggggagtctcatacttcaatgtatcggtcccaggtggctgtatctggcgcggtgaatcgttgctcatcttcgttccactcgaactcttcattcgatcgaagctctttgaatggaagatagatcgttcttatcatctgtatggatgtgtatgtgattcagtagaacacgcatcgagaggtgaagtgggaacaagaacgaaacacaactaacaagcttgtatcgatctttgcaaggtccgacagtctttggttgaccctgggaggttatcgattgaagtgcttcgacaactttattccaactagacggtagaaacccatgttcagtctcgtttcctgctctgtaaaggtcgagtagacgtccaagtgtaagatcaagatattaacccatgtgttagtgtctgagcgcaagaatgagcaagagtcttgtcggcctccgatgcgtagataagtttggaggaaggatgaatcatagaggggagagaccttttctcttgaagaagtaccctggtcataacggcatcgtccgcaggaagccacctacacgggggagccctcttcttggtatctagcgcttgatgttgttgctgttgctgaacatgttgtcgatgtctagattggggagacgatcgaggctccagtggaacggttggctgttggggcaagagttgagattgattggacaagtaggccagatgggtctgttgctgctgttgctgctgttgctgctgatgctgctgatgttgtagagaaggatggcctatcgaagattgttgttccatcgtgctggatagctctgagaagttgatggttcagacgtcgacccagccggttcgttcaggttcgttcggcccaaccgggctggttcgaagagactacaaagttctgtagtatgctactataagcttttgtagtcttttcgccgggcgacattcactacaaatcttgactacaaatttgacaagctcgaactatactgcattacagatcgggggaactacaaattcactagaattccttgacaaactgactacaaacttttgtattcgaagaatttagttcgtagttccaaccactcacctacccaacagagacatacacagaaacgatggcacccaccaccgtactctctcagtcagagtcatcgttcatcacaagctcgcttgtccttccaactcctatcagaacggacggtagaggccttcatgagtttcggccgttcgaactatcgactggtgtagctccccaagcgaacggatccgctcgcgttcaactaggtcatcccggatcgacaaatggcacagaggcagttactgccgtcaggctcgaggtcctcgaccgaccagttgggtttgggaaggacgaaggtagctcggttggttccagagtggacgtgacgtgcagtgtggactggtaagatcacatctttcgttcggctctgcttactagatgaactccacaggctaaaacatgatgtcttctggtcccggatagttcgccaagtgcgtttcctctgatggattccaaagctctcgacgcttattcaacttgtgtgttttgccgttcttcctgtctatccttgtttgtggacgatcgactttcgcttacgcctcgcccgactgggtacatctagacctgacgacgcttgtgcagcaaacgattccgccgttgcttcctcctctcccgatcacatcctccctttcgttccactacacgatcgatactcttcttacctcaaccgccgctgggaacatcccggacgtcgtcttcctttccattcgttctgcgttgtctgaccttcgagtacctcggacgaggaacgtggcgtaccaggccagcctatctatcgacgagaacggagagtccgacatggttggcattaaaggagccgccttgggcggtgggaagaagaagggagcagccgataggaaaaaagggcaggccttggcaaagggagcagagtttgagattgaagactattgggatgagggtgaacgattggacgaatcggttaggttggacttgccagtctgcatcactctaaacatcgtgagtctttctgtcttcttcagccggcatttcctctttctttcgccctcctcttcaactgatgatatttacatcgactctccatccatctatcatgacaatcttccctctccaccaactagctcccaaactcgacacactttctggacgcgacgacagctgaatcgttagcttctcctacgcatctattgacgttcatcaatggaaaatcagaagtcgtcggtcttcgactagtcggttcgacagaagtcggagtagccgatttgaaagctctattgaccgttcgtattttgttctgctaatttttttcctcttatttgcgcgaacggaaaactcatatcggccttgtttttcgaatctttacataactcttcaggccgccaagacgtatgctagcaatttaattacagcctccaacgcctcgctcgacgttcctgcggtccgtgtgcctggtgggctcggatactttgggtcgtaaccgtgtgtgtcgctgaaggattgaaatagaaaaagaggagcaagagaggggagaggaacgaaggaaatagataattcaagaagaggatgggcatatatgatcaaagaatcagacattgatctagagacggacagggatgacacaacgtcacgcttctttggacaagtcgatttgaaggagaacgcatattcatcaagattaatatcaaaagtgtttggttacagcattgaagacccgaccactactcggacgacttgattttgggaagcgcatccagatcaggcatactcctcaccacttttccctcgttctttgtgtggactctgaggctgaaagtttcaaccaaaaagattgattcaagatacagaaaaaacgattcagtatgagataacagattagaaaagcaaaagagaaaaaaaggaggtaggacaaactcctcgagaagttggctctttgcccacttggcaggcggcgtttttcgattcgtgcaccagtagtagatatcccaatctgcttcatccaacagctatattttgtgatcgtgaatgtgcgcaggacagcacggtgagcttgaaagtaaagaaacgagatgtatcttctgaatgaacaactcacctcatcaaactctttgacaagttccgggctcatcccctccaaccggtcccttgcaaacgtggccaaaagtagatcaccctccaacattcctctcttcctggtctggtaaatcaaccgtttacgagtagtctctatatcctcatgcgatcgatccaacggagggatctggaacgaattctcctcagagttaatttcgcccggtggggtgttgtggagcgagggagagaacggaagtgggtatgggtcctggatcggagggatcggggatgatgacgatgccgaacgagcgatcgctggcaaaccagagttggtctggttcgtacgggcccttaagagcgttctagctacgagggatggtactctgaacgacatgatgggatgcagcgatgtcgtcggaagtgttatggttgggttggagagagtaaaaggcggaaaagaaggagaggagttcgatctcgccgtgtacagcatgatatgtaccaagtcacgtgtttacaagccgccacaattttatttttcaccttccctttattttttttctctttcctcctcaacagaagacattcaccaccgatcttttcatctgcaaaaatggctttctctgatatcaagcagctcgaggagcacctcgccactcgatcctacgtcgacgggtgagtcttgtgtttgttctccttgttttgttctcaatttcgactggacagggcgagagaggagaagaagaagaaaaaggaacaagaagatcttttcgtcttctttttttttccctgtcctatgctctcctatcccatctccatttccatctcttccatctcccactcctcctttgacatgatgaatatccaagctttggtccgtgtttccgagttcagcggcttaagaccccgcgccttttataacgatgcggataacttaatcctagctttccgatcaactcttctttctctccgaccaaaccccgtctcgcacgttctttctgttcgtcgtgtttgtttcggtaactgactatactcttcatccatggatcttccgtatatagatacgctccctcccagtctgacgtcggagtcttcgccgccgttggatctgccccctccgccgccgagtacccccacaccgcccgatggtacaaccacatcaagtcttgggaggctgagcacaaggatgtgggttcctctttctttctttctctatctttgcggccttgtttgatcctgactcaaactttctaccttttcatttgcggaatctctcagctccccggagatgccgccgctgcctccaagcttttcggtggagcttcttcctctgcccctgccgccgccgaggaggaggacgaggatgacattgatctcttcggatccgacgacgaggaggaggatgccgagcgagagcgaatcaaggccgagcgagtcgctgcctacaacgagaagaaggccgccaagggacctgccgccgtcggcaagtctgttgtcaccctcgacgtcaagccttgggatgacggtacgtcggtttccttgcctgtatgacaggttcagcatgctcacttttatcgcattggttttttcttccttcagagaccgacatggttgagctcgagaagtccgttcgatctatcgagaaggagggactcgtttggggagcttccacccttgtcgccatcggtttcggtgtcaagaagctccagatcaccctcgtcatcactgacgatgtctctcttgatgagatccaggaggagattggcgagttcgaggactacgtccagtccaccgacgtccaggctatgcagaagctttaaacagctaacgctgtttcggtttagacccttgctatctctttcctaaatccacaccagaacctatctcttcgttcgacctctttgtttttctcttttgatgacatgaaaactgtaatgatcacaagaacgttccctcagtctttgcgtccaaccgatagacaccagaaagcttcctggctagtgcgtggcgagattgggcaggggtcatgtcacatgtatttgcaggcaaaactgggtgagagcaacctgaaccgatcgtgatcgatatgtagaccttcctggcttgggtgtcttcggaccaaaaaaccaccaagatccctaagtgatggacttatgatgccctatcaatggagcagcttcagcctcaccatcgccatcaacttcagcagtggcggcggcagtatcagacaatagcatcctcgccccgctttgggtttccttctgataaggggctagagggagcatgttgcgcgacgcatcggcatccctttcccatcgagtctaagagcaagcagagaacacggtgaacactcgagacactatcctgagatataacactagtgatggtcttacagttcacagacaaagagacagagagacgatgttgaaatcattggtttgatcgagccacgtgcagccgataaatctatattgtcagtgatatgatctacgtaacacatgcatgtagcctacaactgatacactactttgcgatcctcaatgtctccatttttcttatttacttatcgccaaaaagacatctaagacgtctaggataacgaggagatacattacaactatagctgtaggctggagcaagcagatacaacggtgaccagagaaatggccctttgagatgatagaaaaatgaaaagaaagaaaaagagagaaagagacagagagagatgaagagagcgaaagagagagatgagtggaaacaagagatgaaatctcgataactggttgctcgatctcatattacgctctctctctctctctct

SEQ ID NO: 1050 - DNA, 37738 bp, Xanthophyllomyces dendrorhous
ctctctctctctctctctctctctctctcacacgcctgtctgaccgagcaacgactctctctcatcggccaccgtggacctgaccctggcccgagacttcgacctagaccgagacctttctaactctctttccctgtgccgctctgctgcgatggcagcagcggcagcccttcgcttgcttttgatctctcgtctgtatccggcaaaaacagagaggaagagagcgaggatacagaggacggaggtcaggtaaaacgttgctgcatagcatttctacagagtgagaatgaacagtaagaaaacggacggaaggacgagtgatctgtcagccataaactttcgagcgaaatgcaaaacgcaggatagaaaaaggaatgtaaggaaaagagggacgaacgcgaccgagcagacaactgtgtgcttcatcaattcccaagccaccgccggcagcagtggtcatgtgaaagatcttgtttataatcaaagttgatcgagtaaagattttccctaatgtgtgagagtcgtagactctaccgtataccaggttcgtcactgttaaagtttagaggaatgatgtatcagacgcttgacataagtagagtagggtgggatatagaaggatggatggatggacggacaattggagccgacgatctgtgaggaaacaggatatgtgaactctggtcaatcgattctagagaaccaaaaagaagaaaaggaggaaagaggaacagggaaggacaaacaggcgccatggatacgaaactgatcattcccaggtgccaagagaaaaagaatgagaaaggagcatagataagcgatgagtcaaactcaagatgatgaggagcgcctgacagaagaatcgacacttacccccagtttaatgaaaagttggctgtaggttcgtgaaacgaaaggcaacaaagaatcgagacgatcagcacaccttgcgcgccttgagagccaaccgtatcacgaaaagcaagaacgaagagatatcccttcgaaacgaacccattccgaaccattcgagacagaccacaggacacaacccgaacattccaccgtaagcgagtccaagtaaactactggtgatccatagatattctgccttctgggtgaaaagcaggacgagctgggatataaggaacacgaaagagatgagtgacaaaaagtggattcgacggatacggaaattcttttttgccagatctgacgagattcctgagaggaatggtaagaagcggagagtccgagaaaacaaggtcagaatatttccgattaaaagtcattctgtagaaagaaacaaaaaagagaacacaaaccgatagagatccttcctatgcagttccagattgagatgaccgaaacctgggtggcttgaagtctaataagctcttcactgtcacacaatcttcctccttccgaaatcaacgccaatgtggtgagaccacagttgttaatccagcagattcctgttccactcagcaaacacacgattctggattgtttctcccattcaagcaatccgagtttggtcagctctcagcagagggatagacaagtgaaaagtaagaggaagtaatgaaggtttttgagacatacgaggtcaacaaccagaaatccatctcttgcaacaacgcccacccattcaggtcaacctcatgaggtaagaaacttctcactgatcctctgctaatcaccaaactcagcggctcgtgtaagctagctattgatccaggagtctttgccgatcctgcggggtattcgtctagaattgcgaccgactttgacttcttccctctctctcctccttctaacccctgttctcttgtaccgttcgagtaggtatggtagtttggtgtatcatcagcatttaaaagatgggatagctcccggatcggagacgtcggtaccagctgcctgttctctctgtcccactgatcttcgtcaagcgaagacgatagggaggacgaatgttgatcggcgtagttcatcgaatcttccgacgggcctgcgacatgattgagatctgttccgtcaattcgattccagccggactcgcaagcgttgtaggctggactgtgaacgggagggatcaccggttggatgataaatatgccgacgaaacatggaatgaagcaaccccaagagaggagaagctggacgacgggtaggccgggcgccgagaacatcaggtcaagaaacaaaagagcgagagaaagtgaaatgaaacacgagagggacgaacaagaaaggaagaggtgtctcctgggaagaagacatgactgattgacgaaaacaagctgttggtagggaatcaaagaggtaagacatgtgaatgcagtagaaaaaacagaacgaattcttgtaagacttgcaatgcagagagtccatagccggctaggacaactccagtggcagtcgctcgggtggcatccggaaagctctgagttagtgatgaaacgagacaataaatagtgagcatgatgattatccaactttgaatctcgagtcatatccaaggagctaagcagaccttggcgaccgagtttaatccgccgctcaaaccagcgccgctaccagctccggtcaggaaactggcaaggctgaggattatgagggaacctgaaccggtatatggtatagccttaataaagaaggctctgattccggagtaaccgacaagtaaaagcacagcggccgacaagagattcctatgggaggttcccaacggagggagtgagaaacacaatgatgagatgtgaacaggtttaaaaccgcggatggagaggagctagagatgggtgcatacaatttaggtcctctagaatcaactataagtccccacagaggtcctacgctgtaaacgccgacttttttttttgaggtgtaaatagagagaagaagataaagatgtttagactgatcgatggttgataaggtgtgctctagataagaacgtgtagtttctgaaatacatacggttcccagcggcggccacaatgttgatttcagtaccactcagatgaagttctttggcgagctggggagcataagcagcgaccacatagtttgttccagataccagagctttttatgaggggaacagagagaaaagagaggagagaaagaaaaagggagggagaggaaaggaaaggaaccccagttattgagataataacgtatgagcgtgatagaaagagtgatcagatagccagaagaaacggaagagatttctacttacacacactcagacttgctagcaaagtcactgctcttttcaggttaagctccgcttgtgtggatggatccatctgcgtttgagagcggagagggagaatgttgtatgatgtgtatacagaaggtctagcaaccaaggcaggtgaaaaacacggctccgatcgaacaagatcggacgaggccgaaggcgattgtggttagggttagggtaggggctacgtaatttgatctgtaacctgagtgttaccagtttgtagtctgtgatctgcagacttcttattactcctctctgttaggcttgtcttccgtctgtgttgttcatcatcgtatcccatcatggtgattgatggatcttgtttctttgcgctcttctctgcgcttctgttctcaggcatctttgtcaaggagcttgagcttcacactatcaatccatccatcctgggatccatcgtgggttatatagctcgttatcttctccgttaccgacacagctatccttcctgatactaaccttttttaaacagcggaagcgtgactacacagcattcgagatttcatgtggcggctcatacctttcttgtttctttttcgtccgtctctgcctttctccttcttctcttcattgtcagtcggatggacgacaagagaagcgaactcgtaagagagggcattcggttttagagtgagtgttcttattttctctttctccccgtcctcttccagtctctcctcttctccattctctatcgtgatgcttttatttattgtcaccgaatatatgtcgtcttgtaacggcagatttgaggtcatctttcgactgaattcttcactctaacctgtctcttcctgaattgtactcctgtgaaggattgatgctaacttttgttttatcgtatccgtttgtttaggcctgattgatgctgatgatgtcaagtaagcgagagcacagtacaaacgaagagtcaaaatggtaggttttcagtattcttcttcagaccacccacccacccacaactcctctttcgaatgattacaatcttctcttaatctgtcaatcccctgatcctcggtggagaccgaggaaaggctgagaaaccgagtattgccgcttagcggcggttcatgacaattccttctctcttaatcaacatcggccgaaaatattcaaagaaaaacgaaacaggttgctgacctttctctgtgttttctttgccagtcttgtagaacagctgtatgtcttgcctttttcttgtggttgaattgtcgtctatatcaatgtttttgtgtacaccagtcacctacgctagagttttcactcagagagttcagaggattctgctggtttgcgatctaagggcattcaaattcgtaagggacacgtatcgaccaccatcagttgaagttacttttacgcagccagagctatacagctttgatgttgtacctgacaggaacagacaaaaacctgtcaactcttgatctgaaatccgttttaagacactgacgagatggtctcctcttacctcttccttctcccgaacaacgtctgctgtcggcttcattctgcaaatctaaactaaccccattcatcgtcatggtacgcccacatgctcctcccttccgtcttaacttgatggagtaaacgtcagtctttcggtcctctgatttgaacagtccaaacgaggtctctccgctgctgaaaaacgagtaaagatgctcgagctcctacacgaagagaaacagttcttccaactcaaggagctcgagagattggctcctgcaaggaagggaatcggtcggttgtttcctcattcacttcattagaagtaaaggcgcatatgtcccatttgtgtggccggtcgaggtatctctcttggccaataactcacatctggaacatgcttcatcccatagtctcacagagtgttaaagatgtcttgcaggaactgatggatgatggccatgtcgactatgacaaggtgagttccgtcgtctttccgtccattgttgtaagtctttatgtgctcaaccaacatatatgtcatgatccctagattggtacatcaaactgtaaatcctacacccactttgacagttcggtgatccatatccaatagtagaaagacctgagcccgtaatcttcttttcttgacacactttagttttctggtcgttccagtctgccgccatgtgagcactagcactcttgctccaacatgtgcttctgagcgcctccagggccatcttataactgcttctctctattctgttcaatacgatcgacggtagcaacgtccagatgaatatattacagagaaaacaagcagaatgttccgctctccagacgaaggtcgactctttctctcaagaaatcaaatcggcactttcgggccgagaaaattgtgtgaatattttgcttcatccgtctaatactagtcttgcttatttccctcgtccagcaaaggaaaagaagagatgaggaggcaagaaatgagacaagtttgtgctgaccgtattgaacgaacgcctctctcaaaataggctgaacgtacgactcttgtgaaaaaatacagaggactccgagatcaatcgaccgaatacagagagaaggcatcggtctacggtcaagcggacccccaggtatatcgagataaagtttccgctggagagatcgccaggcgggaagcttgtagacacaccggtccgtcttgtttcttttcgcctcttgcttgctgtctatctctttggtttcttttcccttgtcagattgtgttttcgaatatctgtagacagaagataacagagatactgatacgaatacttgaacctgtagaaaacgtgctcatcctgtttgactggatgagacgaacgttcgattgtaaagaagacgctctgagatccatgtttgagattggtccgcatcacccaatttttttctttcttctgtgttatcttgttctcggtctttttccgtgccttgtcttcgttagataagatcactatctaaatttcttaacgtttcttcgctggacattatcaaacagaacctgattgggaacaaggttcgtctcggtccaattctgacgatatcgatggacatggtactgtctctgattcgtatacacgggctgcatatccctttcataggatactcgtagacacgaaaaggaatttcccctcgagtacatatgttgcagagaaagcgagcgtagattcgtgtctccatcaaagttgggtattgcatgtcattttgtcatgcacacgcccaaatatacactttctatagatgaatcagtaaatttgtgagaagggaaaagagcaaacgatgagaagatatctaattttcgtggagatcaagggtacagcaaacaagacgactggactaagatatagatcaattgaaagtactgaagtggaacaagaagacaaagaagttgaactctacgaatctagtaaaatgcgaagagatgatgttaactcttgcctccgtttcaagcggacgcattgaaagagttggtgattccctctgcgagccttcgggcaccctctccgacctctgtctcgttcacaaaagagaacgaacacctcagactgatgttgtctgccctgctgggcacagcaacatccgacttgaacagcacgctgggcgcggtgacgattcgggatttgatgcaagactggaacacgtcctccaacactccttccggtccgagttcagccagccgagggtgtttctctgcgttgatgtgaatgtagaagaacatgccaccggtaggtggggtaaagtgaacgaaatccttaggaaggtgtttttcaaaagcgctgttcatcaagtttgcccgtcgggagtaagtcgccgccacactcgtcaggtaggtttcccaaccttcctggccaccgagcgcagcgaggaacgaggtgatcgcggcgacagagaacccggagacaccttggatagtgacctcgtttcggagggccagtctctggatcaatggggccggtccgaccaaccaaccacaccgacaaccaggggcgacgatctttgagaaagagctcaggtcaatgacccgaccgtcaacgtccatcgaaaggaaggttggaattcgcttgggtggagtcggtccatgaatgtccgggtaatggatctgcagcgcccggtaaggatcatccagcaggataagaagatcgtgcttctgggcgagcttgtagatatcttgtcgtcgctttacccccatcgttgatccggtcgggttctgtccggtcacgacggcggtgaggaccttcggctttcgtccgcgcttgctctcgtcccaggtggacagtacctcgtccaagatcgaaggaatcatgccttcatcgtccaaaggaatgactacaggattgagaccctgaggtcccatggaagcgacagttcctgtagatacacgcgaaatcgaaaacaagagtcagattgagattgcgataaagacgaggctgtaacgcaaagtctgcagagatcacacagaagagcagactaaccagggtaagcgaattcttccacaatgatgttatcgcccctgttggcaatgtttcggagcacgttatccactgttttgaggtaggaaatcctttaatcaatacggctgatttatgtctgaacgatcagaagagagtgaatgaaaacgaagcaaggaatacttacttccatcagtgtttctgacgacgggatagaatgaccgagcgagcgcagaagaagtaagcaagaggagactatcgagcgaccgaaaggaagaaagacaagctacgaggcgtacccagtggtgatgatgagatcccagtcttcgtagggaatgttgctttctctctgaacgtgctccttcaagaacttgatcaactggagagacccgcaggactgtccatactgaagggcattggtgagatccacgtgaagttcatcctgcttggcgatggcgtccacggcgtactcatccggtcgaggggtagaggaagacgactgagccgggttgtatccaggaacgatcagattcttctgaaggtacgggaaactaagagtgagtgagtttacggggaaagttgaggggtgaggaagtcctgtgtatagacgacaaatagagaaaagtcacgagttggaacgttaatgtctagccagatgatgaactgtgagaaaaatagaaaaaggaagagaagatggacatacctcctccgaagttgatcattccaggaagaccgaggtacctgggcggtgaaaagtaattgaaataaaaccggaacggtaagcatcatgtgaacgacctgggactagcttttggtaaaacgaaagaattgagaaggagaagagaatacgcacttcaatgccaatatctttagtggagaagggtatctttcaactgcctcagcacttaaaaagcctgcctcgggtaataaattgaatcgacgagagagataatcaagatgatccgatcaatactgattatctagcacaaagatatgagacccgtttgaagcaacactcacgactataatccatctttttagctgcagcatgaagctctgtcgaatgctgtggctcgtccaccgagatgagttctgccttggaagcaggaagtgctttgttgatctggtctgggtcgatagtcatctccgagggtatgaatgtgtctgtaagtgtttggtgtatgtctacgtgaaggttaatggatagaaggcccaactgtttaactctaaggttgaccgttcttaaaaaacacaaaagaggaaaaaaaaaagggagtcatcgataagccccacagccttgactgaggttgttctcagtccgttatcagtcttatctcagcctcggtaccttcggctatacccgctaccgccggtcacttctcttacgtatccttcacgtttacccgcggccattcagagacaaccggcacaacatatatacataaacacacaaagagtacatggattgagtcatccgattcaggctcgcacatacaaccaatgagaacagattgtgacacatcaaaggacaaacaaaagtatcagacacgacgtccaacaatcagtgatcaagcctcctccgtcttggcactcgttgccgaacattccgcctgacgttcagcctttgctagcttcttgatctttgctgcagcaatttcttcgtccgtccgaggaataaaagaaagatccatcccatgtaccatgtcgatatccattgaacgaagcgtctcaatcccacggcgcgtccagaaatccaggtgatccggagatttgaaccaagggatgtttggagtcgatgatgactcggatgggagaaggtccgaccgagggatcgtgatgactggttcgcgacgttgaataggatagaccagattcagatagtccttatcttctcctttcatggaaccatgatcgcccttttcgttatcaagggacctggcgggtacccaccatccatttgggtccgtcaggtcaggaaccaaccctccagttcttaaccaggcgaccatcgattcttctcctctcgcgcgctctaggatcccaacgaccgccaacagcgttcggtctaccgccatgtcttcatcaagtatttcctcctctccgtcgtcggtcgaagcctcggtcacggtcctcttgttcttcctcttcttcttctttggctgagcagcagcggacgcacgcttgaatgcccgggcagactgggtcgacagccgaccatcatagtccggtacgtgtatatggttgaagggctgacagccggtctttgtgtgcgaatcatctattagtagcgtgctctcgttcgagtacctcacagatgatccatccgccgaggtttcttgatcaagatacttgtacaccacatccagatccttcaccgtctctgttttttggtctatgagaacagaaagagaagcaacacatgaacatacacacagcgcatcaatgaatgagttggttcgaaaagataaaggaaagagaaagaaaaagaaaaagaaaaagaaaaagaaaaagaaaaataggaacagcgatgctcggacgggacgtactgaactcggccggggtcaaaccgaatgtgtcgcgcgcccagacaagcttcagttgacgagagtcctttccaccttgcaactctaagaactcaaccatcttagtgacactatgaggttgggccgaactccaaaccccgacctcccaccgtgcgcctgaaagttacgcaggaaggtgaaagcccaacaaaatattcagtctcatttgtcccactcgactcaacaatgagaacaggcgcttacggagataatccagaaatgcgccgacaaagggccttcgcctaaacgttctctctgccgatgcctttggtctgaacacaagcgtcccgttcagatcaagcagcactagctttctttctactgacggtatgtctagccggaccgggttctttttcgctgattcaaagtactccggcaaaggtaccgttcttcgctttgtcggatatgatggtcgagaacgaacaccaggagaagaaggaggtgaagcagcattggtagcagcgacggtctgggtagaaggcctatgcggtcgagtagagaaatcggctggaagatgttccacttggcgaaaaggggctgtctggcgatcagagtacgccgaatgagctggagcggccgagtgaggagcctggtggtgtccattcccaccatccgaatgccacgggaggggaggctggtcaaatctatcgtgttgccgagaagacgtagccggaccactccactggtgcttagctctatatccttctctaggtttccaatcagcatggttgctcctgttgggcgatctatactgagcggtgaagccgttgttgttctggaaggacgcagggtttctcgatagatgtctttggaaacgctcgttagaatactggcgaggctcatggaaagaccgggaccgttcatgctcggcatagcctgaatgtccatattcggggtgacgcgaccgcttacgtccattctcggaataattcacataggaatcggatggaccatctggtctagcgggtagagagggggatgaggaggacgcagagtgtgaagggttccagctttttcgagtcccagtccgagcgaaaaactgatacatagagacatacacacgaacatacgcgtagcatacatagttagaaacttggtcacatccacctgattgatacaacaatcaaacgactaattcagaacgtacaagcgtatagtgaacagggcacacagtcaatccaggagagagacaaaacatataggatgcagagtgaatgaagaacgcgtcagaatgtcgtacaataacctcccgtcgacagcctaactctcgaagatcagagcaaacgagggcgtttgacttggatgtcgatggaaagtacagatgtagatattagaacactcaccgacgagccagagcggaaggaggtaaatttggattggcggacatggtatgtagtttagtggaaacgaccgacagtagaggcgaggggctgaacgcgatgtaattaacgagtttgagcttcaaccgtcgtccttcttacgttcacccccaggacttcgatgtcatggtctcttatcattctgtctgaaacggttgtcttcctttcatcactttaacatatttcttcgtgttcatataacaaattcttcagtctacgcagctatctacatgttgacttggtgtgaacatgagaacgcgaacgcttaggcagtggttagggtccgcttgagagatcgctacgaacaacacatcgagtagaagaatggtcgctggagatgaaacgcctggcttcgaagatgagacctagcaaagacgacgaaaaacgcatcagagaaaggaagatcaagcaagtaaagaatgttaagcagacacaggctggaaagatgagagatggcgatcctcgacagtcctaccttcaatcaacgtccatcaccatcaatctaccgacctagctaattcctagagccaactcttgtctgcttgctcgttctcactcagacatacagatgaacgctgtttcctcgccttcggaacggccaatcgtcacctatgcctctccgccatctttcctgacatcgcctgaatgggcaaatatccgacaggctctccgggagacgcacctgcctctcaggaacctacactggaagccggccagccgaccgtctctacggacaattcaacaggtcgaaattgacctccgtcctttagagatgggaagcaggccgtctgttgaccagactggaagcgctcgaccgagtctcggtggggagggaggaacggaaagaagtatgctacctggtagctttctagagaaaccattcttaaacatcttcttcgtatcgtgcgaggttcgtctttcctcttcagctcatcgcgtttgactctcatctgtttcattcctctttattccactactgtagacgtgtctgtactgagaattatcatacgttgatattgctctgctgtcaattttaccactctcttgatccatttaggacgcggacacctacaagacaaccatccgaaaacaaattaaagactggcactctctcgtcgtctctcggaagacccaagaatgggtgatcgtgctcgtgatgaaacctgatcctgctaccggtctagcccgaagttcaacaggggcagggaggctattcaagatgggtgggaccgtgctcgacaagatccggagtgactttaataccaataagagggataggtatgtcgtcgtcatcatcgtcctttcaagcagagctggaagatgtatagaccacgaaagactgagccctgttcgttgattcggtcattttaaaatcgacaccagatgtgtccaactctcgagaccttcgtttcctacaccagatgatccttcactttggtcagacttaatctccaaaattaaagacggaatcatcacctcgttcgactcaagggttactcagagagaagaagaaatcaagacttccgagggaatgcggacattacccggatggaacttttgtaccttcttcattctgaaggtaagtaaacagattccgtcgatacaacactcagatacaggcgcacgtagaaggagacggcttgcgagcgattgtttggctctcgcaggttctgtgctgaccaaatggctcggcgcgcttgtaggaatcgctcgctaactccttcgaagggatgaatctctatgaagatgctctaatacaatacaacgagcttgaagcatcgttcttccaggtgctcaaaggtgattgtttctattcttgtcttctcatctgaagcatgacatatgtctcagccaaaatgaacccttacatttgatataccctcttatatcgataaaacttgcagaacggaatctatccttctttggccaccttggcgctactgcatactatgacgactcggcttctgtcctatcgaccacaaccaaaccctatcgggatctcattctcgctaatacaatctctgtttttgacttcagagtgtacgtgttcgcccgacagggaaagctaatggcgcgaatgggtcgattgggagaggttttagcgaaaggcttcgagtttgtgagactgatgggcagatggcttggcgagaacccagttcgtgtctctcccgttacaactcttttgcttacaatgactcctacagatgcaatgatacaacaaacgctgatggttcatgacaactctaactgaaatccaggacgcgctcgctcataatttcatcgaatcttggatatattcatcgtgtatgaatatcatcgaaacttgtcaagaatggaagttgaacctgcctcccaacaatacttctcatttgtcagctgttagtactggtgcgaatggaagtacttccactctcaatggagagatagtcgagaaagaaaaattggtgttgactaataaaggcgagctatatcagctcgcgaggactcaagtaagtcttgcgcttaagtgagcatgaaaggctgcctcttgtatatgctgatatcgtgtgacgatatacatgtatcctcgtagctcagtaaacttggacggcaatacgggcatcttccgaatgcttatccgttcagcacccattcatctctctcaattgtcaagccttctcccgattctagctccggagcggaccgacctatcactcgacgcgatctagtagcagcgttggaaacaaaagaatcgttcgacgtattattctacagaataaccgagatggcaattgagtgtttatcgagagtcggaaaagagaggtcaactctagatttaatcggcggtctagctaccttggacgagttcgtcgttcctatttgatcatcaccgtgtataccatgtcagaccatgcccttaaccacaaaattttatctcttcttgtgatccgctctgtagattccgagaccgacttccatcagcatacgaccgttatcgagcactttctatcagagccaactcatatagctggacgcctatggaagctttctacttgattcggctactcgagcttcatcgtgttctgtccaaaccgatagacagcgcatgggtaggaagggcgctgagcttcctgagggctttggtcaagattggagaggtgggcagattggctgtttgggagggcaatggagaagacgaaagtgatagggaaaaggaaagtgggttgagaaaatttgtagaccgttgcttgaatgacatcagggaagcaggaaaacactttgaaaaaggtaggacacgtttttgttggagacaggcgctgaaatttttcattaacaagtggtgaacacgatctttcacagaccttcctgtccatgatcatgaggcattctcggtgaagcttcagtctcccaaacaagcaactggtcctcttagaggccaagaggacggttgtaaccttcatcttctggttcaaaaccatctgccttgtgtgagtcactatcagagaatatgcgtcaggcgtgatagcaatctctcatcacatagtgttatctggtgtgctgtggtatattcagactgtcactgtagatgatgttcgggcttgcctgtctgggcatgaactagagcaactttggtttacatccggaaagactgaactcaaacatggagacaatgttgtctgtgtattctgtcctgtaagtcaagagcgtagagcagacggatacccgatcagaacgactaactgctgacactctacttgcacgttctcttaaatgttcagatgccagtgtctggcctattctctttagaagtttcacaaatacgattatcgaaagtagccttccattacgtctggttaccttcgaaagcttcggatgttagtgaacgaacggtcgttcgtataccaagggattataaagcgctgaacgcgagattaactcccgctctagatcgtgcgtttatgttcatctcgaaaatgcttgcttgaagccaatcgcttacactctggtatcttcctcatttgttcttgttgtcaaacttccgcgatatccacagtccgactagattctcggccggttgtcctactccatctgatcagtggtagaaatcaagtcacaaaggcaacggttgctctccaagtgaccgaaaatgaactagtcttgctgatgaaggaagcacaagtaatatctggtggtatgtctagggttctcctcagcttaatgatatatgctgagttgaatatagacatactgatatccactctttgaatatggaccaccaagttgtcgccacattctcaacagagcaagattatctgatcgttgaaggtgtacagcctgacacgaccgtggtgatttctgttccgtatcgaggagctcctaagggagccgctcttcctgtaagcggtgtatcgtttcattgaaggtgaaatctttacactgatgatgactgtttaacttgtcgataatgcttctggtagcaaattcgtataagtgtagattactggactcagactcgaccaagtcaacgaagagcactcagaaagactcggcctctagatctgtttcttcctttgtctgtaaatgtgcacgacatcttccgagaacattggtcagtccgtcgtatgatcctcagtgcatctgcattgattcaatacttatgtgtcttgacttgtcaaacagtctactctctaagtttaccatctcctcaggtggaaatcaacaccttcgagtagcttccgccaacttggccggagcgcagaagacactcgagattgaaggttgtcgaaacgctatgtcacctatgattcatgtgacacccaatcaacctggaaacctcctatttagactcactcaaaaggatcgcaactcaaaaagttcgtaatgatctgtgcagttcctatacctgcctgagactgatcttactctttcgagtgaacctttgccattgtgtttagagcacgacccgctccagatgacaatcaagtatcggatcttagatgatggtaagggatttgcaacagcataacgaaaactaagaagtcttcgaggactcatgctttggattgttcgtatcactttgcctcaaaacagaactctttttcatgattcagaccattgtttctcctctgctagcgtctcacaatctggtagagttcaagtcatggcttgctaagactatgatcatattcattaaagccactcctggctgggccaaccgattcatcacggcggggtccatcgacttcccggacgttgacgaaaatgacatccgagggtcttgtaatcagttgggtctgggagaagaggactttaagaaaattctagacacgtgggagagggcggtcgaggttcgtctcgccttggggtttgaaaaccaaatgattttttgacacaactgtttcccttccctccgttcctcagatcttagatgatagcgtcacaccagaagtgggtcctgacatgccttggagaacattacaaattcccgtagatatgccaacgcgtcaagtaagtcgcaacaatctctcttcctttttttcgaggatgaatcaacacaccttttagacactaatctaccttgtgctgtttatcataaatttatcaatctttaggttatatctgtagtcaaactgtccctctctaccagtgctccttatcgagttggacagcccttgaaatgtttggtgacaatcacttgttcctcagcttggtcaggaggacctatgctggaagacctaccgatgtgctatgacctcgaagtcgagttcgagcattggcttgtcagcgggcgaaagagagggacttttgtttcgaaagtaagtttcagtcaagatttctcggcacggcttttgtaatgtatttcggaaacttagttgctaaccctgtctctattacttgcatcttcgtaggaaaatgagccttttaccgcaacgatcactctcatcccagttcactctgggagtcttatgctcccgcctattcaagtcacaccatctagtcatcaatcatctccattaacatcagccgagacgtatatcactaacgctgctcaatccgtcgaagtactacccatgaccggccgcgcgactttcgtgattggactttctggcgacggtccaaacaaacataacagctgtgattcctcagcagtccatccaaacgggatcgaggtttagaacattccttaatacagtttgtgttgtatagcaaaaaaacggatagcgcaaccgatttatgtattaaacattaatcgtctttttagattgaagaaaaaagagaagagagcgccttccatgcgtaacttgcaagagaaggaagagcgcagaagtaggagagcacccaatggatgtggtaagacgaaagaatgagtaaagcaagacgagaatgagccgagacgaatagctataaagtatgaaagcaggttgaagaaaaaataaacgagaaaaagcaagtgaagacgagaagtagagcaatgggtatatactacataactaaaatatgtgtttagaaggcacagatgttgaaaaatctacaacttcaatcaattttcatcagccacccacgttggaggtgttccgttatcattatccgggctcgagccagccaccaaggccatactgcctcttctagacagagagtcccatccgtttgcgttcagagcctttgtaggcggagccatcatcgtcgactgagcagtatcaggcttggtcgtccgttggcactgctcccagagcgctagaaattctaactgttgctctgtcgaaggaggatccgggttgattgatgcatatccacctggttttgtttctgaagggtagctcgaggtcgtcgacgtagcaggggaagtcccactatctgataggatttcagatattgaaagtagtgggtttgaatcaaatttaccatttgaagctctgttgatctccccagtaggagatggcccccagatggactgaggcttggccagagatgagccaccttccttgttgatgtttgcctcttcttcctcgcatgagcttggagattcggcaaagagtgattggagcgcctcaacatccgccagactgtgctcagtgtcataagatgttgccgaagcgggtgtactggccggaccagattcatccaagatcgcgaacaaagattcgtgaaggtcaaggtccggatgatgatgccgtctgccaggatctggagaggagaataagccagcagggatgacgggaggagacgacggagggagagatgagaaatcgaatggagggggcataggtgaagaagaggcgatcggatgtgacgatctcggctcatgaattccgttcctccttggggtcgacaaccgagctttcttaggagtcggagaatggagttgatccctctcttcaggctcttcatccccaaattcgaaaaagctcgaaaagtctgaatgaagccactctgcgtctgtcatagctatatcactttgtacagcggagctcaacatggcagacaacccgtccgcttcgtctagctctctatcagtcaatctttctgttccagcggcagaagtgcccaagaatgatgggcctagccccagttcaagatagttgtcagctgtgattgtgatatctgggtttggtgttggtgtgggagcagcagccgaaggcgtatcagcctctttaccgtcatcagaaagaggcttgtttagccttcggagctcgcttccccctcctccggaaagcatcttctttagtgccgttcgaggactttcatatgcttgttggttcatacttctttttaccggtcggacaggagaagtcagtggcagagttttcatatctcttcctgttgtcggattatgatatggcgagctaggcgaaaaccgcgtgttcgaagaacgttgtgtgctcggatcgacgtggttaccatgagaaaacctagactggaacgacatgtttcctcgaattggagaagtgttgtgcatgtaggttgtcgagggtcgagatgagggacgaacgccgagcgggttctcgggggaagactccatatgtgcgctcaaatcaccccacaactccttcggcctcttcactttgtgtcgattgtagtatacaccacaggctggttgttatcaatttaccaaaaaaaagaaaaaaaaaagagaaaagatgatatgaatacacgttgttatttagaacatcaagcataggagaggagggaatcaggttgacttaccatcacaaactttgccacatccctccttctttctccagccggcgctcgtgagactcccgcagttctcacatccttctttttctggtctcttcccacttgacatccctcccgaaggtttccgtcctctcactggtccagcttggagtgcgtcttccatagagctcggtcgatcacctgttgactttctcttcacaccggctacggtggctcctccagatgacgagttaactctatggatgccgcctccgaacgaagtaaggatggcttcttttcgacgagcagtgcctgagatggttctacccagcttggttgaccctgcttcacccagccctgccaacgggctgtcagcatcttcaatctctcctccgtcagtcttgttcgcttccgctgcgcgtgctgcgttcaataaacttttcaatatccccgcggtctctttgtcgtccgttaccttcgcgtctttattgatcaggttgagaaggtcgactagctgaggggtaaatgccgtgaagttttcggtagctgcttgtagaagatctggtggagacgtcatcaagttggatattgaggtgagtttcgttgttgtatgcacagagtttgaacttgacgatcgattgggatcatgatgacgtttgggcgatatttggtgtgaagactggcacgatgcatttggttgaggaagtgatagtgccgatgaaattttagtgggctgagcgttcgttctggtcgacattgacgccgaagaaatagattgagatcttctattacttttcccactgatgatggttgccatcgaagaagaaggaccgtcggacaagccggaagttgatgattccgggtgtctcttcgaagtagatgctgcagactttgatttatttgtcgcgcccggtggtcgaccccgaccgcgcttgaccggttccagtggaatcgtctcagctaaatgttctggcgtgttgtccgtcctgaataattcctggtgcttcgatttctgagaagatatagacttggccgagtgtgtcgtttggactggtagtttcaagccaggagaatgcgctcttttagtcgtccttgacgacggtggcgcctggaaagggtcgaatgttgatccactcaatggtgtggaagatggtattcttctcggactagaatgaatggaagtgttactggggagtagtggttgtttgaatgaggacgtggatgaagaagacgaagaaggggtagcggcagattgactgattatttttcgggaatgagacggtccagaatttaaaacgggggagtttaacgatgaacgagtcaatgttggtgacgtcgaactggaagaagccggcgttgaaatagattgcgctggtagtggaagcccacgttgcaagaaagagagatgagatagatgctgagcgtgggatactggctttgtctaatgaagcccacaaaagtcatgaagtgcaaaggtacattgagcttccgctatcgtagggttcctccaagggaagtatggtagagatatatgaacaacgcaccacaacgagcctcagccggatttctaaccactcttcaacatcactctcgtcctgatcatcttcctcaccttcaatttcatctcttcttagtattcccatcactaggctttcacactccttggacgcgtcatccagtgcccaaccgagcagtccgctctgaacctctacgggtttcgctggggaggtcgatgacttcggattatacatggattctctatatgtttgttttgggttagtgagatgaagagagtaatctgtgtgaggagttggaaggagtgaagggctacacgtgggagaaagacgcatgagagcaatcagaagattggaagacgtgcaagcagaaataacatggcattggttagttgcaagaccttcactagacatccaagaccgtctgattcaccgtctaatacgatcgaaatcaaggaatacagtcagatcagaaaggagaaagatagagtaccttgaagcaactacggttctgacaacctcgcccagcgaacaactcgcccaccggtctgccgcccctcgcatctgagggtgtatcttgatgcgggtaggtaatcgggatcgagcaaatgttgtcgttgtcgacggtggaacggtatacagtacatggactgtttccaattccatcattccaaagacgttcaaacacatctcttctcgatcagaatgacacaatggacaagagaaaagagaattccatgagagactgaccgtgaaccgaccgaggcgcgttagatgttgaagcactcattttgataggagaccggattgatgattggatccctccaagctctatctgacaaaggtctggtatgtgagatggatagaagcctgtcctgaaaagaaacacgaagagtgtggcggacacagatagtactcgcgaggaaacgaggagtggtggatatgatgtgttcgcgaagagttagcagagacaaggaagaaggaatgaacaatcggaatgagcaagagacgcgtcgcttgttttagacgcgtcttcacatgacgcgtcatcaaacaaagctgttggatgatcggacaagtatcgtcatctaagcgacctcgcgttctttacagactcgttgcgttgtgagtagactagtcgaatgtaaagctcagatacgtaaagaccggttattactattgtcgttttttaacgagatcattgtatgagccatcacctccctcttttctgccattcgaacgagccaaaagaggtgtacaaatatgttctcatcaagccaatcgaacgagaaacaaaacgaatatatagaaggatttctcgtttacatcttgttttgccatttaccactgtctggttggcaaccagtcttggcccttctctttgatcaccttgtccgcttcttccctcatgatgtcctcccatatcttggcatcagcagctctgacgggcccaacgttgccaacaaacccatcgagaatcatgttgtctggtatgctctccagcctggtgacctctcttctgatgaacccaacgatctcgctgatctcatcgaccatgcttagcggatcccattcggctgggagctcgttcatcattggtggcgattcaatcgtggtaggcactggaccaattctaccttcacctccaatttttggcacaacgtcctgctccctgatcactccacccattccatctggtcgaccgatcttgaaagacttgacctgtcgtttcgaggcatctccctggggtattttgataccatacgtgccctgctcgatccctcgaccggcgaatacgttccgccaaacgtacccggccagctcatgatcggttccgcagattcccacgtcgaacgaaaactgggtgccgacccactgctcaccgagatctcgaatatactttttgatcaaactctccggagttcgtggaccaagcgtccgtcgcatacgagtgtcaagaagagagaaaaagtgagcgagaatctctttctgataggattcggccgcagctgccggaagagatcggattcggaccatgtgaattctagggtgttggagaataatcagcgacacgactatgatatggaacttttgattgattcactaacaagatgatgagagactgagtctggaaatatgactggaaagtgggaggcagcttgcactctgtaaaaccagcgaaaaaaggaaaagacttgttagacctaatcattccgttgagagatcaattcagcacgcaagtatttgcacaagatcgtcgtaccttcccagaaaaagtcttcgtttctctccaggccgtcacaggcttgaccaagaatatacctcgttccgtcgatagctttgctcgttgagttgcttccagcaactttgacaaacgccgacaagaatttcatcacaagtgggtggtatttgatgcccgagggaggtggcagaccaggaagagaatttggtctaacacctatataaagagaaggatcgatcctcctcgaggaaggtgaatcggaaagcatgtagggcgtaatagaaaatgggcgtaacacatgtgttggagaggaaagtcgggctagaggagccgatcggagcaacctagccaggtgagttggagaaaacatgtccaaagtgtgacgatcgaatacttgtagacgttgtaactacgggaacccaaaagagccaaacggatcgatctgaaggatgacggtgtatagatctagtgaagcctactatgagatcgacggggtcaaaaacagacaattcacaacgatcaaaggttcagtaagagacagataacacataatcaccaccggtactatttcttaaacttacaaggtagacaaaagtgcgatcaaacgataaggatagactgaagtgtatgtggtcgaagagaaagagttgaggagaaatcgattggctagattaacttggaaagaaggctgtacgaatatgagcgcacgtgaagcattcaattatcttccaaggctgtgttcggtctgttcccgccttcagttcgctcctttcactgtccgacggtccgttcgaccggctttaacctcgatcaaccagttctctgctcttcggatgtctttcactactacaacacctctatctatcacgccgacacgcacatcaaacccgcaacagacagcgactcagtcttcctctgatggctcaaacgtaagctcaaacttcaactcttgccttttctaagatgaggtccgcagtcttttaaaagccatgcgtcgggtagtgttcacgggaattaatatggttcttatgaattgacatgcctaaactagactcctagtgtctacttgatttgttttgtggtgatcgtgagtatatcttctcggcgatcttacgtctatgttgttggaaagagttagtaaggataaggacagaaagcttagccgcatagagtcatctttgtcttttttgataattactgttagatctgtgttctactttcgatcgtaggtgcaattcttcttttctcattcgttctaatctttgaggttgataaatgaaatctttgtaccacagtccctatttgtcgccatccgcgccgtcctcatccgtaggcgcatccacgcggcgtgggccgcatcaggatttgcagaagacttcttcgacaatcatccatcgttcccaacgtccatcactggactaggccggatgggcacactgtctggaagagcagaatggaacctcgcgtcaccccagcagggccgaagtagacgcagtgggaagagtaagaagctggggaagaagccagagatttgggagattgcaatggacgataaggatagcttgacttgggacgagccggtgttcggagttgacgaagggaaaggaaagagcaagagacacgaatgggatggtctaagaggtagagttgcttggacaaacatcaatgtgagttatgttttaacgattggaatctttgaatgtttatagagtcgcgttgctgacgtgttttatttgtaaacttcttctaccagccaatatcgctcatccatgttccaccatccgttaatatcaccaatgacgacattacccagagtttcatgaccaacccaccatacgcttctggatcaataccaaaagtctctcaagatcttcgactcaactcgttatcaccatcaagaccgggggcttccgtcccgtatcctgctccacttcctaatgtgtctgggtcagatccctccgtacagacgttagaatatctccttcctggtcagagtcaagtcgatatctctgtgatcatcgcgttacctgtcgacccggtcgaagcagagaggaaaaggggaaagagacaggcagatctactgtacaatggaggagaggatgaaggagaagatctaccggaggtttggctaggtacagagagggtcttgattcgatagacatgcatgttgttgattaacagaagcgggatttggtcgaacgaactgtcatcaaataaagacttgcgtcgttcacacagctcaagacctccactttttgtatgcgtactcgatgttctccacagcgactcgtctagcccgctggttatgagagcgcgagcggtcgcacgaacaagaacgtataatcatatctgtatccacgtcaagagccaattgaccaaccagacgtgtccgcgacacgtgaccttatcgtatgagcctgacgcgtagtctcagggcaggagctaagacgtacacttgcgggggctcctgcagtttgcgcttaattccgcatctttggagcagtaacggccacaacctcaagcctttgtcggaacttgtgcataactaaccgtttgaggaaaccttctacttcatatggctactaatatcacctttgttgaccgtatagatcggttctgatgagagctcgacatgtgtgcaggtctgacagtgcggataagcccgactaacttttgttcagccacctttatgcctcacttctaatgcctctgctcggaattcttctcctttttccgctgctctctctttgactccactctgataccttcagtcctgcagtgccttcggcatctttgcaaatcattcctctctgctgctcctctttcggtcatggaaaagcttggagaacaaatgagttgcctcatcctcagccggatgaatcatgatccctcttttttctgatcctcttcttcttcctcttgttctttcctcgttcttggccatcgtggcaagaagaacagaaactgaagcaaatcatctgagctaatcattcgcaacgagttctatctatatcaactgcatggagctacgagatttcacatcttatcctgttgcctaggaagacaaagaggactaaaataagatgaaacaacatagcagacggttgctacatgccgtctcaaggctatcacctctagctaccgggcccgatcttgccctttcttcctcatctctccttgacgcgcccggagaatatccatgcatcgttgatgactgaatgtttctcaaaaaaaggtgacacggctgatgtaggatactcagagctacgaaacctactcatgtaatcatcggcatattcgattgaactatgggacatggtccaacatcgtggaatacaaaccaaagtgtatgtctccatagattggtcatataccataatctgattttgcttccctctcgccacaatccacctataacaagactcattgatgaagttctcgacgccttcgtctttgacacctgagcgcccgtttacaattcttatcccatctaatatccttattgctcctccacattccgtttatttggttcaacctagcctgtcccgttcgatccattcatccgtttgtgcgatcaaccacgcacaactaccgtggataggcgctggtttcggaagtttaggaatttgcctaaaatctcgaaccggagcttttgcaaaccaagagaaccgccggttctgattgatacagggtgggatgtgtccgtcgttcagagagccgcctgtgtcgtctgttaggtcttcagagggagacgacattcggagcgtcagattatcgtcggtacctccgctgactcgatcgacatctccaccggatcagtcatcgccgacttatgtcggtcaagaccaacagctccttgccgaggaagtttcctcgagcgttgtcacccctgttcaatcagccgttagtcgtccatcatacgggcggatgagtctgaaattccttacccagactcagagtcaacctcttgactctgacctgctttcaaaccaaccgcttcctatatatggtcaggctgatcctcaaagccaatcgccctctctaccgcagtcccaggaagaatccaatttttttcaacactccttccgaccttcagttcatcagtcaagctcggtctcgtccgctaaagtcagcggaaaggatctcaaggatcccgttcgaaacatcgctcaagatgaccttgataaattgcctcgaggaggcccgagctcttctggaattcagtacaccaacgagtatggagacgaggacgacgacaaggaagagacgtcttcaaagaaaaggagacgggtagagacagcctgcaatggctgtaggaaaagaaggagcaaatgcggtggcggcttgccatgtaattcttgcttcacgaacaacactgaatgcgtttatgtatgtatttatctttctattcatctggataatccctctctattcttcgatagaaggtggtggttatgcccaaagaagggcgatggagatatcgccgactcatgtcttgatctctgactagtatggaatcaatctttgctttttttttagcctcctcctgcaaaaaagttgaccctgaagtaagtttcctctctcgtcaaatgcatagttttgacgtgggatgactttctctcctcgctcttccctgtccggctaacagttcatgtttttttttaccacctctgattgccattgctgcgccatttcatacgccatagacatttcgaggaactcgagcgaagaattgttgaacttcaatcattaaacaacgcatatgaaggccgcacaatcgcccctggtacaggtgtttcacctgccgagtccactcgttttgacacgactcaatcacaacagcggcagactgcttcctctctctatgaattctatcaatcagatttattttcttcgatctcaggcggtcatccagatgcgcgcttgacccaagagaatggcagactatatccccagccacttcctcaaccggctcttcctttccaatcagatctgcctgtagggttatcaccggacggattccaaaggcgacccagtccagtcaaaggtcctttcttaggattgtcctcccaaggatccctcatgagctccgaaaccactgtggccggtctgatggtaggagacttgtccagacaaccaaacgtacggagatggtctgtcgccacagacaacgacataggaaaaggaaaagaggctcgaaccagtatgaacgaaggtgtaggcaagacacacgaggtggacatatttgatgcgagcgatgccgtcaacaatatggaaaccgataatgcggttgagacctacaaaacagaagaaggcccggaaggagccaagaatggttgtggcgatgtgccaatcgacgaaagtgcgcgtaggcctcggtgggaaaggataggacgtacgtgattcatgtctcgttcgtgttgatccctcaagactgttgcgagcagctactcacgtcgaacactctcattgtaatattttccctcaactctagaatttggctataacacagacgtagtcgaagacgctgctgcaaaattacatggaaatgatcagaaccggtcgacagagatggtgccagatgcgtttgtaatgcgtggtcagtctataaaccagcttgttctactcgagatcagggcaggtcgaattactggtctgttcaaagcaaccaccaaccttatcaaaagcttaccatctcttctgtttctctatcccttttgtacagctatggagcctccatcatcggggaacaaacttgttcgtaggagccgtttttgctttgcatatacttgatctcagtacttgagcgaaattatctttcttgcgttctttctccttcagttctgtcttccaccgctggctgaggccgaggaccttctaaaatattaccatgagagaagttagttggtttttcattgttcctctttggctgattccatgctaacgtcgatttccatgtcaactactttcgcagtacattacttgttgcctgtgtttgactttgtcgatctccacgataggtaaacacacttcttcctctgaacacctctttatacctctgaaaccaagctgattccgacccagatatctggaagctactttgtggccaaagttgaaacctcgaacagcgatagatctagtctttcaggcctccttgaacctcatattttccatcgtcgctgtgttaaggtgctccaaggaagatttggaaaagcttcctgtttatttccgaaacagtcaaagcattatgagtgtcacgcacggtacatacatactcttgactccactctgtcttgtgcatattcttcatcgttgtcttgactctgaattttttccaaaccccgtttacacaaaacgtcaaacgatagtactcatcatggcgaatgtcgaaatgattcgatatctagtgttgttgtgctgtgggttttcaacggttttgtcttgatcattctccagataagctagctgaccgagtgatttgagttgtcaatcagattactcgcaaaagtgagtagacctcccctacaaatgtgagatcacgatggatatcgcgctcaccatcctgcgccttggtagttgttcaaaaggactcttggcagtgaacgctgttgggctagccatatttatgtctagaaatattcagctagacaaatccgatgtcaactcgaagatcaacatccgagatagatgcatcagacaaaggttgtgggcagcatgcgtaagttttccctcactgtcagcttctgtgacccttctctttctaaaggagtctaatcgaaacatgctcttactacacctacgtgtagatgcaaatggaagcaacgacttcagcgtgagttgaaagtatctttccacgatctcagccatgcgctatactaacttcttgtgctctcactatcatcgacatgtaaaaagaatgttgtatcgacagacaacgcttaaggaacacgattttgctgccgactctatgatactcattgacgatgatgatctctacccatctactcagcgaagcatcgacaagcccaaagatatactgttcttttacgaatcaacgaaactattttctatcaaaatcaaggtccttcagaggcaagtcatttgtttctgaacttacatccaaggcttacctgataccgacagtcatgaccgtatgcatcttttctattgtagactttacgccttcaaagacactatcgttcttccaaatacctcagcacttgtggagcttgaggtcgagcttcatgaatggtggaaaaaggttccaagtcacctaaaggaaagaacccaagatagtgtgctcgacgcttccaatacccggcttcagatgcaaagtcacaatcttatatccaggtgagaatctactgaggagtctgctggtcatcaatctagttgcctgatctcaatcgtatcttgggtatttgaatggcactagatattgcaatgcgttggttctcctctatcggccattcctttttttcgtaggcatactattctccattttgttaggtcgtcgtggcaacgaagacacactttaaacatcgtttaactatgttcgcctatccgtcttgtttgatatgaaagttctgctcggcaccgcgaaacaccgctgcttctcaaaccaacatacgtaacgatataggtttgcgcttacgttttccaagttcttccttctggtttgcctagcctgtctaacatctttcatgacctatcagccaggaagtcggctgccctctgtgcggaagctgctatctccttgattaacgaaatctcgcgaacgtgggacggagctcaattaggcttttggtggtgcgcatgctcgtcataattcattgttgcatttggatgaaaccaactgaagtttgtccggatcactttttaacaggtgcctgttgggttatgtttacaactctgctttggtaagtctctcataattcgtttgtcacatcagttcgtccacagtttttgatcattatgaccatgatctccagattatccttgctcgtaaggtcattatgttctcttgagcagtattcgtctttcatactgaatgggcttctgaattgctctgacagatcgaatcgtcaaccaagtgcatcccgcatcaatcagtgatagcgctgaaagagaatctacggaagctgttcgccaaggcctcagcttcctacaatcagtaggcgcagacagagaggatggcttcaaattcggaacgcactggtctactccgcctaaatcagcccgatctacagcgcgaaggtgtttcaaaatattggtaaatatccagcaggccgttcgagcgccacccagagagaaagaagccattgaggccgtctttcgggaatctggcgagcaagagttggaacccgaatgtcagatacaaggtcccgaccctggcatgccctacgtgttagagaaagattccagcgcgcccgttgctcccggaaacggcgagttcttgtccgactggctggaaagtaggttgatcttttctaactgtcctgttcgttgatcgaccggaagaaacaacgacatggctcacttagcagttcgtcattatttctggttttcttccgtctcattttctcagatgcagattcaaatttcctagacgaagatacctctacacccttcaggccgtacgagtgagctgtttctgccgttcatatgaccttctccactgagctcattttcacgagatatcgtcatgacatctaaaggtacaaccccaatcctgatttggcataccaaacttcctggcaagactggacatgtacgttgctagatcattgccttctggatctcattgctttgactcacctatatgtatctggcgtatgcctttctgtcgaaccgttgccgccagctctgctcgaaacggtcagtagattatgcacttctgcaatcttgagatttgaagcgttctgattcttgagcacaacacttcttttctcttcgatgaaattcctcttcgccagggcctcttgttttcagccgacatggatgatgatatactagaacacgttggcctctgaatggatcttaaaaattagaacagatgcgctggtctacatcaaccgctggcttctattctgttaattccatcttatcatatctgattctatcttgtcctttcatctgcaggtctctttttgatctaaatcgtgttttccctttttatgtcaaccatgtatacacaactgttctcatttgttgagcgtgtgcaaattcggcatatgttctgtgcaaaggccttacctgattgaatcaattaagccgcacaaacggcttgtgaaaagaagggagaaaacttgttcattcactataaattactctaaggggtttctagggaaaagatatttataaaaagagaagagaagaaagaaggggtaagggaagagggaagagggaagagaaaacacaagtagtgtacagtctatgttgatgagaaaaaggaaaaaagagagagacgggaaggaaggaggaaggggttgcaaaagatgggatgatgaacgttatagacacatttgacaaagggaagagggtaagaaggcaaagagtgacgtgagaggaaagaggagggaagctgaaggtattcaatagtctagccagaaaagtctaaaggatgtttcctcttcgatataaagaaaaaacgtgtgacagcatattgataggatttagaagaaagaaaggaaaactctttgcaacaatgataaaagaagaaaagatagagatagagaaccaaacccgaaagatcaaagggtgggcgaagtaaccagacatccttcttagctaaccattgcgtctgaacccgctccggcttccgtctggcccgacctggatcgttcattggacgatccatcttcattgaccatcgagttctctccattaccgcccgagccattcgagggatacttttgcgggctttccgactgtccttgtgtctgaacctgaccctgagtttgggttacagtttgttgctgctgctgttgttgctgcctgctcgattgaagtcgtggactgccttctatcgaatttgctaacgaggaatttccttctgagccaatcccaaatgcggcttgaacagatctggcaagctgtgagttctgcggagccgtcaaatgatcacccggtcctgacttaggtctcgttcccgtaggagatgacgctctgctagtacccggtgagttttgagtggaagccgaggcggaagtcggataacctgggaaggcagatccaacaggggcagcgaggtgtcgaccgtcccctgatggtgcacctcctccacccgaccgaccatcaccgccaacattggcggctccgctcgggactgaggaaccgtttgggttggatgaacctgcgggcgatccgttgtgagacggaagaggcgaagcattgaggatatcttcaaccgattgtctgctcgaattcatctgctgagctcgggcaagggcctgagcttgttgaatttgaacggcttgaacctgttggtgagcggccaactgctgctgaaagctcgccaaggaagcgctggtagaagacatggtcgatcgagggggtgacattcgacccgggaaggacatccgcggttgggattgatttttgtgttgttgttgctgctgttgctgctgttgctgctgttgctgctgttgctgctgttgctgctgttgctgctgttgctgctgttgctgctgctgtagttgctgcttttgttgctgctgctgttgctgttgttgttgctgctgaaagatctggttctggagggcagcctgttgtgacgaggtcgtgtttatgttgttaaagtggttaaacgcgttaggatatggatgtgatcgatgcttagtgtggtgatggtgattcttcgaaccgacaccgtgtccctgatcggtatccattccaccagatccaccaaaatggttcaccgggctgctcgcccttgaatgaactctgctctgggccggactagtgaccgcactcgtcgtacctgttcctccaccgttgcctagtccgaggggaccatatccaaagggcagcccgttcgtgttcatctgggggaaaatgctcatgtttctcaacggaccaagcacgggcgaggttgagggcgtgaactcgaaaccggtgttaccgacctgttggaagcccatcgggtcgtcgttgaacgaatctgaagattccgatgacgcgggtgatggctggtgggatgcctcggccgacgtgaacgcataaggcagagacgatcgatgtcggaatgaacggggttgagattgaatctgctgatgagcgttctggagctgttggagttgttgaagctgttgctgttgctgtgggttgaaccccatctggttaccgatcgagagaccgccgaggtttccacttccgaccagtccattgtacaacgcattgtttgcttccggccctaccgatccagcagaggaggcagaggcggccaaaaacccgttggatccggcttgaatggtgagagccctctgagcggcccgaagccgatttcgatagctcttgtggcactcggagtggtggcagtttgggggtgttaggtatgacagatcggttaaatcgcccgcgccgacggcgtgatggatagcctgtccaggctggtggaaatcctgttggttaggtcccccaactgatggctgtgctgtcggtatgacattcggagcggcaagattgcccataccaccgacatttccccaccgatctctctcattggaaaagccattgaagggtggctgtgccatcataccaggtgtgccaaccgggctcgtgcccgaacttctctggccgttcacagggactccactggaatgaccgattatctgtctgtgacgcatctcgtattctgctcgacggacagactcagaacgctccatctcgaacagctggtcggcagcggcagcagccaacgcagacatctcgttcatctctgagccgttatcgacatgggcaggagggaagaggttaccgtcatgatgttggctcgagttctgggaagattctttcggagcctttcgctcagagtccttgaaaatcgttcaaagatcgattgaatccagggaaagaggcaatattaccaaagcgtgaaacaaaatgcatgcgctttagcaaaaaggacgagaaaaggaggaaggaagatggctgtccatgaccagaggatgatgcttgaaaacttacttcgctgtcctcgtccttctttttactcttctttccagaggaaccttggtgtatgcggatatgtcgggtgagctcgtcgcttctcgaaaatcgtttgtcgcacccgggatgagtgcacgcgtgaggtttctcgccggtgtgtgttcgaatatgtcgcgtctgagatggagtagaggaggaacaagagttttgcgaatgtcggcagaacgagagggggagaaagaacgatagggtgagtttcaggcaaggaaatagcaccaggggctttcctagaagggattttcggacgaacctgatgttccagtctgtagaaagctcgatcacagagtggacacttgtacggcctgggaattttgctcttgtccatcgtcaacgcggcctctgtgactgtataaagcgcgtgagtcgaaagagctagtggcgaaaaacaggacggaacaaaagaagaaggaaacgtacgagctctaacggctgggtcgttcggatcaagtctgccagtgacggggtctggtattggtgtaggaaatgacatgtcgttgaagaatgttgacattatcgaatgttgttcctgcctttgaatttatcgcagaagggaaaggatggggttgagatagagctgataagggatacgaggtgagttttgagtgtagaacgaggtatccaattcaaactgatgaccaaggatagatgttaggccgattcggtgaataagagaaccggatgagaaccaccagacaacctattatgattatagagacagtgaatgtcgagggaagaaaggatgggaaggtggaagacagaagacgaaattcgaaacacgcaagcagaacagtcagcgcccggagtctttactctgccaagaccaaggccaactcaagtgttcagtctgggctaggatctcagaaagagaaggagagagagagagtgtgtgtgtgtataggaaacagaacagaaggtatggaagcacgaccgggatagaaccgaccggggacaaaaagaaagagtcggacccggacagaaaaacgtgcggcaagctgatacgcttctctgttttcgggtcccttgaccgacgaagcaagccattgccgcctttggatggagcgaacgcgtttggcttgccagtgagaccaagcaaagacagagatatacacacacccggacctacaataaaataaaggaacagaaggaagaaggagaggaagaaggaaaagagaaaggaggaaaggaagaaagagagaaggctagatagatctacctagcgtttcttacgtgttctcacgcaatgtgaaacagaaagagacaaccagcagacgagaaggggacgcaagaccgggtcttttccttctctttctctctcacaaagtccaaggtatatgcgaaaacgatcggtctcgagatatagagtttgaatggagaatagtggagggacaggcgaaggcaagaaggctagaagaaacacaaatctaaaggggaaccccggagaactcactgattacgacggctcagtcgatcaaagacctttctcggccggttaaagaagagcgccaccaaacgaagggatttcttcaccgggttctttctttcttccgtgcttaagccaggaactcgatggccggaacaaatgtgttgtctctgtatgtatatgtgtggtagagactgagagacggacgatgaggttgaggcgaataagacaaggccaagggtgaaatgtcgagtgggaactcgtggggaaatggaacgtgacccaaatttttctccgccgtaaccataggcctggtggttacatcgactcaacggcggaagaactcttcttatcagctgttctgcttttttctatagcatcctgaataataaactcccggaagaagaaagaaaggaaggaagagagaagaaagactgagaacacagagatggtaatgataaggagccccccccccacac

SEQ ID NO: 1051 - DNA, 41470 bp, Xanthophyllomyces dendrorhous
cacccacacacacacacatacacaaagaagagaaaagatgagagaaagacaagaataaagaataaattacctaggcagcagcgatggagaacgaaacgaaaagaaatccgcctaggatataccgattgaattggcgagaaaccggaaaaattgaacatgaatgtatatgtatatgtattatatacatatggaagagaagacaagaatcaatgtgatggtatgcaacaaagaactatgaacctccaagagaaatgaaaaagactgatggagacaaaggaaagatccagaagggaaaagagatgatagatgcattaaggtctgatcgaaataaacaataagttaacagagaaaaggctggagattcttgattaaacaaagaggttcatccggcaaggaggaaaacgtataccgtctgaagattatacggtggccccgcccatttgaaaccctcttatggccccttcctcattttcctcccggtcttcatcctcgaagtattttttggctctctcggtgacgctgtcgtaaaagcttgggctagggccgcatctgcctcgtcgtcatcatcgtctgcttcgttctgaccgcccatatcggcatcctcgtcatccttctggccgcgccctccttgctcctcttcgtcctgcccatcgtcggcgtcttcctcgtcttcagcctcgaccttctgatcgttttgatctacgttcgacagatcaccatttccctcgctctcgctctcgagcccgtcgccctcacttccgttgatacgggctgcaggcgcccccccatgcttagactctcttcttcttcttgtagaaccctctctcgctttttcgttttcttccttatcccgctcggactcctgctctgtaatgatcgatccagaggaaactccgccgggcacgtccatcccggccgttttcagagctgcttccagtagatgaactcttctccagaccgagtctagctctctcgaaatttcttcccggactacgtaaacttccttccgaaccatatcttgtagactggtactgctcgcctgaagcgtattcagcacgctcacacatctcctgtgatgatcttccacccgatggatcgtctcgtccgctcgacggttcatctcagccgaacgggtagtcagctcggtcaccgttgactgaagcgttcgagagtcaaccagggcgtcgtaaaatctttcgaacggcgcgaggaacgttgctttgggtggagcggtcgaggtcgccgcagacggagtagagttctgtcccgaggttgaatagccataaggcacgggcgaaggatgagacgaaccctgttgatgctgttgctgatgttgctgatgttgctggtgggaggacgaagggtagtgatgagatgaatggatcgagagaggagcagggggaggagctcgtccagaggaagacgaggaggaatttgaagagaatgacgtttgaagatacgaaggtgaaggagccgtctgaccaccgttaccgccactgttcgtcccgtatccaccttgcggagcactccgagaaactgattcggtaccctgctgaacagagatcgaaggacgctgatggctcccaatagagctcgcccgtccatttagtaggtgagccggttgagacgggtaagtgtgatgaggtggcggtggcgggggtagggtcgaatattggtggagttgttgttgctgttgctgctgctgctgctgctgctgctgctgttgaagaaaggtgtaatgatgatgatgatgagatggtgcggtcatatgagggggataagaactcgtcggaaatgtcttgccgcccgctgtttcccctcctggtgctccgtcctccgatgggtagatttgcgccgattccgagctagaaatagccgttcggccagcggatcctccagaactgcctcgttcgctttcctcccttctgatctcacgaccgtccgatctctttgctagactttcatctgctttgtcttgcgaagtcgggtggtgaagatacaaatgtgggtgagaatggtgatcgatcgaaggaagctgggacgtcacattcgagttcgggtttgaactcggatttggccgtggaggtgactgagagtaagccacaaatgtcgacggtggaggaagcaggttagaggtcgataccggtctaatgatcgggggtagatctggccctccacctgctgccgccgtcgttgatccggaactgggaccggaggacgacacgttccgtgaggcagaatgacccacatccgacggcaccttgtcttcctctgccgtgttcatcatcgattctgcgctcggattctcttcggctttcttggtctttgccctagcttttgaggaagccgtcgaattcgagcccggtccacgtttcttgtattccttttcgtttttgggcgtgccctttcgctgttggatcaacgcctgttgctgttcctttaatttgagagcgctcaagatcgagtccctcgtgtttggatctgtgccagtaagctgaaagccaaggacgacaggagagaccggtggcttgtcggattgatccgacgcatgatgggaacgaggttgatgttgatgctgtggtcgttggcgatctagatttgctggcaaattcgagggagacgaccgaggtggaatatgttgacccaggttaggtgagtgggcagaagaaggataggaatgggtatgatactctccatccatgttcggatatgcaagtggaggtagagaattatttgtgaacgaggacgccaaagatggaagcagtcgaggtcgtttgtgattttcaggatcggtggaacggtgtgagctaatttcgttcgtggacgcgtttttttgtgagaaatatcgatgggacggtgatctgaatgaatgaaaacaagcccaggaaatttcaggtcaacgtttgtgcttgtgagagaaagcgggaaaggcggaaggaagaagggactatgggacttaccctgcttgttgctgctcgctctcttcctcatcttcatcaaactcttcttcctcttcttctgcgtcttcaccgtcgctgtcatcgtctttttgatcgccgttacgttcttcgtcttgattattgttgtgaccttgagctcgtcgttttggacggccggccggtcgtccactcagaatgatctctgtttcgttttgggacgaacgagacggtagccgatgaggttgggacggatagacaggcgtggtagcagctcttccgatgtccgattttgcaaaggaatagactttaggatggtttgacggtggcgacggtgaacctcggagagacgaagttctggtttgattttagaggaaaaaaagaaaaagagaaaaaaaaaacacgaaaacacgaaaaaagtaggaagcgtcagatgaagggacgatggatcgagatgatatccagttggtgaaaacagaaatgagaataggaaagagaaagaaagaaaacaaaagacgtaatggatatagagacaagagatcgaagactaacggatgatccagagctccagaatagtagggaggagccatagttgaaagagtttccaaaggtgaaacctgaaagacggcgttcacgatccccgatgaatttatacttttttccgactctgtgtttctgttccgtcctcctcaagttgctctgttcgttcttttcagatctcggatgaaacgagttctagagaacgatgggactgtctgcggacaaattgcaggttgtcgaaagagaaggaggtatagtcttaggaaagaacaggaaggagagaagagaatcgggaaaagaagggaagagatggagatcccagtctctataacctaccacaaacacacacgcacagtacacacaccacaagcacacactcacgcgcactctctacacacgcgacgccgaaagaattctcgggagggggaaagagagagaggggaaggagagcggagaggcttggccgagaggaataaggctaaagtgtttgtgagaaacacacaatacagtacggatgtagagaaaggcggctttggaaaaagataggagggaatcctggtggcctgccggctgaaggcagcggtcccactgcggggattgatcgtgccttgtgcctcgaacgccgaaccctcccagcccctcccccagtcccggagttttcgttccggccttgctctgccctgccgttcctgagggtttcactttcggtcggcaagattatgtaatgaactccctatttgcctgcgctatattctctgttccctctattttctttatcgtttttgtatgatgctccggatatgatctttacggtaaagcgatcagtgacgattcaatttacatcgccaagccggcggcttgctctttctttctcattcttccaggtaaaaaggaacaaatcacatgcaaatactttgatgccgtgagtgaacgatgctagcatgataattgatagaaattagacgaagcttgggaattgttttgtcatattctgttgtatatcattccttacgctctcctctaaaatcggacgatcagagtaatttcttcatgcggcgctaactgtggaaagtgtgtggtgaagaaatgaaagacgagacgcgcgcacagagaaacaagggcaaaaaggcttccaccaccggagccgaaggtggattgatacttacgtaaacgcctcgtagccatggccgtaaatgggtgacgtgtaaccgcgctggatgactgtgatcgatagttgggtctgagagtccaatcgatcatgacgtcgggtttccatctcgggtctgttgtttgtatattgtgtgcctgtgtacctgcgtgtgtgcccggaagggtaggtgtgcctgaacgataagattccccccccctctctcttggtgcctcttgcgtgcccttttcgagcccttttcttgttccttcttttttttcttttttttcttttcatctccgccctctttgcctctttctcgtcactctttctttctctcttccctcttctctcttcttcatcacccatctcctttaacactctctctccaagtaacttcctcctccttcccatcctccttcctttgttcagttcagttcaaggaaagaaaaggatggctgctcaacgcatcaaaaagagtctcttttcgaagcaggtcaactccggctcaggctcgccctcgccctcatccgaacagacggtacctcttcagaacgtgaaggatgcctttttcgaagattcctcttcttctaccatcatcgacagaacggcttccctcaaggtacgttggcttggagctcatgactcttttctgattgtttctctgctctctctcctgtttccttcctctcgtcatgttctacccttcacactctggacatgccatctcacaatactctgatttaaatgttcagatcgatatccccaaacctcccagcgatctaggtccgggggcccgcgccaaagaggtgtatgtcggctatttctatctgtttcctttatcttcatcatctcatctcactcaaccctcttttgttctgtccttcggatcatcttactcgctctagcttgcctcaaaagggaaaggttgacgctcctcctccagccgttgccgctgattcgggtaagtggttgcctgtctcgccccaatcggccgtgcttctcacttacctacccacgccctcttcatggtatatagctcaagggatacctgccgccgagaatgtggacgatagcccgggtgcgcctggcaactccgagagaaaggttcgcctttttgttccacaataagatacgttgtccggtactccttcatctctttcgttcactaatcagcccattttttatcctttcgaatcttactaaaccttatgcaggcccttcgagaaaggcttcttcagtctcagggatccacttatacaagcgtcgaagaatggcggtatgttgctctgtgctatcaatccatgcgggcttatttccggtcacctcgtactcatccctatttccccaatcttttcaaactagaatgggagaagacgaaaagaaagctgctcactggaagagatggggaccttacttgtctgaacgacagtgggtgagttcctcgttcccctttctctttcttttttccctctttcggtcgaaaatatcagacaaccggctcacaattcatctctccttgacaggccaccgtccgagaggattactctgccgatggagatgcatggtcccatttccctcatgagcatgctcgaagtcgagcatatcggtggggagaagatggaatcggtggaatctcgtatgtccacgtttgattaggtgcgcggttgagcaaacacgctgatgtcacaatcattcattttcaatcccacagtgataaccatcaaagagtctgcttcgcccttgctctctggaacgggcacgaccccttccttaaggagcgactctttggagttacaggacaccaaggtaaatgttgatcgcctttgctaactttttccaagtcgatgagctgacattctatcttctgctgtatacattgtggtctttctcctgtaggaaaccacggagaggatgtaaaagaactttactattatcttgattcgaccccgacccactcgtatatgaaatttctatataaataccctcaggctcggtacccttacgagcaattggtcgatgagaacgttcaaagggatcgggatgttgacgagttcgaggtcaccgataccgacatctgggatgacgaccggtattgggatatcttcgtcgaagtgcgtcatttgatctgttcataagcctgttaaatacgctcttgtctgacaattcttgcttgtctgatactttcctctcttccagtacgccaaagacgaggaagacccaaatggagtctccatccgaatcaccgcctacaacagggggcctgaagcagccgacttacatatcattccccagctctggttccgaaatacttggtcttggcccaaggaggaacctcctcgaccccggatgcatgagtccgccgaaggaaccattcaagttaaccacgagacccttggaagaacccatctttactgtaccccctcccccgctccagccgcgcccgcaaaaggtggcgtcgtccttgtcgatggaccgagtgttgtacctgagctgatgttcacagagaacgataccaactttgaggtaagtcccttcttcggaaactccgtttttagtgaagaaacgattactggccaagatctcattgtttctttcctttcttatagcgactctacggaggaaagaacaagacaccttatgtcaaggatgctttccacgatcacattgttaaatctcatcgaccggctgagcctgatgcagctcccaatctatccgagctcaaaaagtcccctagtgtgaagacgccccgacttcctccataccatacatctgccggcgacgaggacgacaaggatgaggagtcccagacgaacggtgatgacgacgagactgcccctcctgccacgagccctgaagcgcctcctcggccaatctctgaggccggtgggcgacagttcgtcaatcctgccaaggagggtaccaagtctggtgcgcactattcattcactcaggtgcctcctcgaggaggttgtgttgtcgtccgactcaagatgacccaggccaagccggaggaggataacacaattgtggacgaggaagctttcgatgacctgattgaagataggcgaaccgacgcggatgagttctatgccagactcgccagtgggcctatcagcgacgatcttcggaacgtgatgagacaggctctgagtggtatgctttggaccaagcagttctacatgtttattcagaaagaatggatcgagggagacccaggacagcctccgccgcctcccgagaggaagcacatcaggaacaaggcatggaagcatatgtacattgccgacatcctttccatgcccgacaaatgggaataccccttcttcgccgcttgggacactgctttccattgtattcctcttgctatggtggaccccgcgtttgctaagaaacagctcgaccttttgactagagagtggtacatgaagccggacggagcgcttccggcttatgagtggaacttctcagacgtcaacccgccggtccacgcatgggcaaccttccgggtgttcaaaattgagcgaaagctctttggcagggaggacttggactttttggagcgagtcttccagaaacttctcttaaactttacatggtgggttaaccgaaaggactctgatggaaacaacgttttcgaaggtggtttcctgggacttgacaacatcggacctttcaaccgatccgagcctctgcccactggtggaacgttacgacaggcagatggaaccgcctggatggctttcttctgtttgaacatgttgaacattgccctcgaattggccaagcacaaccccacctatgaggatattgcctccaagttctttgagcacttcttattcatctctgatgcgatgaccttccagggagcgggcgaagaatctatgtcgctctggaacgaggaggatggattctattacgacgccatccaatggggtaatggccactctcagcagattccgattcactccttggtcggactcattccgctttatgcaaccttgacattggaacctgctgtgatcaaacgattccctggattcaaaaaacgaatggactggttccttgagaaccgagccgagttatctgggaggaacattgccaatatgaaggttgctggaaaggctgatagaaagttgctagcacttgcctccaaggagcgattggttcggatcctcgagcgaatgttggatgaatccgaattcctttcagatttcggtatccgatctctttctcagcaccaccgagatcatccttgggagatggacgtcaacggagaaaagttcggtgtcggttactggccaggtgactcgagatcgggcatgttcggtggaaactccaactggcgaggtccgatctggcttgctgtcaatttcctacttgttgaatcgcttcagcggttccaccagtactatggagaaacccttttaattgagtgtcctaccggttccggcgactacatgaacttgggggcggtcgccgaggagatccaacaccgactgattcatattttcgcgaaagatgaggacggccgacgagccttcaatggaggaaatgagaagcttgatagagatccaaacttcaaggactaccttcagtttcatgaggttcgtccattttcttaccttcgctaccttccctcgccattgctcactctgcgttgattacatatagttcttccacggagacaacggtcgtggtctcggagcctcccatcagaccgggtggttagtcttttttctgtctcttattgatcatcatccgtttatgtggtcttgttcgctgattccctaactacttgcatgctgtctctaggacgggtttggtggcgtatcatatcatgcaaaccggagtatcttgtcgacttcccaagacacctagaacgccacgatcaaccgctcgacactactttgacgaggttcgtcttttcgctgattcaggtcctttcttttccctctattagggcatatttgctaacttctcgttcattttcgtccttccagagcatcgcgacgccttccgagatgggtgacgagcattctgtgttctctaatgaggtgagttgactgtccatgtatatttcatgggagtgcttttgacctagaatttttaactgacgatatgcgctctccccttattcttctatctttgcaggatctcaacacgcttggagacctttcgcccgaagctttgtagacgtgttgtggcaggttttgatcctgtgaaaagctatatttatttattcctttcttttccttctcatcttgactgtgtagaaccccatctgtgtgttttacttttaccatcgttcgtgtatactgtgtgtgtgtgttgtgtcgttaaggtactcaaacgtctatctagatgaatcattatgttctctgttgtcttttcttctacactcctgtttctctcccttctttcgaataattttgcgtttttgtgtatttctcttttgttatgaaaagaaacaaatgtcgtagtatattttctctacccttggactgtaaatgctttagaagagaaatcaaagactaagaggtattttgattagatgaaactttcaagaaagacgttttccgctgtgcgtttgtgactcggaggcaagagaggcggacccagagattcaggaggaactacaattgaataggcggttgcaaagacagactggaagacaacaacacaaacaaacgaactgttttgatgaacgaatgattgacccaaaagacaaagagaggcagagagtgagatactaagaaaatggatagagtctatacaacagtgaattgaaaatttgaagagaaaatgtgatgaagcaatcaacaagagtattacatgaggcgagagaataagaaatgggatgaggatgcaagttgggagaaaagactgtagagaaagaaggaaggaaggaagaatcctttagtacttgacagtgtcgacgacctcgacctgctcgtcctccgcaatcttcttctccgagagatcgttctcgtaatccgagactcgctcagttcggacttctcctcggagcttggcttggttgttgagctcgttagcgacgaggatgtagcagcctttggtcttccagatccagagtgagaaaccgacgacgtagatgaaggcagggacagggagccagaaggattgtctagttccaaacttgatggcgagcgcaccctgaatcggggggaagacggctccaccggaaacaccgcagacgagaagagcagcagcccgtcgagtgtgtcgaccgagtccctctgtagagagaacgaagatgacggggtactggatagccatcatggcatagatgaccatcaggcagatcacaccgacagttccgtggatgacagcggtgagaacagtgaagacggtgcagaggatggcacacacggcgaggagcaagggagccgagaagatcgagagcaaaccggtgaaaacgaatcggaaaacggtgaaaatgatcaaagcgtaggaaagaaagttggaggctttgggcttggagaagtcggcgctgtcagtggcatagttgatgaagaacgttccgatcgtcacctgggctccgacgtaggcgaactgagcaacggcaccaagaataggtcggatctgcttgtagaagggcttttggagctggttcctctgagcctcgggcatgttggccacagcgacctcggcctgctcctgaagctcggcctcggagacctcagggagtcggacgatggcaaagatgacggcgatgatggcacccatggcagcgacggcaaggtaaacgaactggacggtggtaagggaatttgcgtgctcgccggtgaagaagtactttgaagcgatgaacgggccaataaaactggcaactccgttgaaggactgggaaaacaagagtcggaaggcggccggttcggcaggaggcatacaggaaacgtaagagtttgcgcaaacctccagcgtggccagcccacaggcgacgacaccagtgcagacaacgaaacctccaaagatagcattgttggatgactttcccgcaaagtgggctactggccagaacagaatagctccgagagagtagaggcagagacccatgatgatgcatttcttgtagccgtatcgcttgaggacctcaccggcgatgggggagaagaggaaataaccgataccgaagtaggccacctgaagaccggtcgactcaagcttggagatgttgaggacatcttggaagtgcttgttgaggacatcgagaagaccgtaacagaaacctggaggggtcggaaagcaaaagatgtttgttaagcaagcagagccagaaattgcgctcaaggtaaaagaaagagacgtaccccaaaggaagaagagagaggtcaccagagcataagcggagtagtactctttgggcatcaaccgcgtcttgaacgggttgaccgaagcaggcatgggtccagcagctccaccagccatggttaagaagtgagagtggggttagaagggaggaagggaagggaaggtgatttaggtgttcagggtagagagctgatgagaaagcgaagtgaggatgatgagaatgaggagaagaacctttgggactccactgacgatctcctctttatagaaaacattgatcgtcgatggagacgatcccaattcgaccgacctctgtctgtctgtttgtatccctcactggtagcccgggttcagcgggatgggcggctacacaaaatgctagatggaaggaggacagagtcggagaaagaacaaagaaaacgttttgaagcacggtgttcagaagtaagaatgttcaatagagttcattatagagattctagcctttccagcaatcgttcggaccgattacacaatggaattccatgcaattaaatatgccgacataagtgaatcccgccttgtggtgcccgatctactaaccgccggttgggggcaggtcagaggttgggatatccgggtcatgagacccgagtcatgaatagggattgtcgattgagtccctgtttcaggtgcggcggcggcgaaatcggacattggcgtcgggagagaagcacccaaaatagatctagctctatagcttagcgtcgtaggtctgcaattcggaagcgcgtgagtgtgtatgataataaccccggcagttcctgattgagtttactgtgcattgtgactggtacacttccctttccacaacgtttattcagaccgggattgtattctgatatcttcttattctttccctgatctgttactctctctttgtctttttttttaacaatgcaaagcgattgagaagaggtcaccttgagttggtactgaaagtgccttccaccgattgtgtattctccaaagagataatgcgacccgtgcacacgaaaccatgaccgctcggtatcatatcagttttatctcttctcagattgcttgtttaccgctcggacggtgttcatgcaatcaaacataatctcaaccgaccacgtttgctgaactcgatccagtctaatacaagaagatgtattgatcagggtgcatacgtagtcggaccgattagactcagttcttgtactgttgggattgccagtcatactttctcgcttccctccgatgtaagagtgaacatgcttatttattcgcacccgtctatttgacaggcccctaaggaaggagttccaatcgggtgtagattagacagttgtggaaagagaaaaaagaggaaaagatcggactcagaaatcctcgaagctaacagaaccaacagcttgccgccgagatctaaagcattgatcgtcagaaaagagcttatagaaaaagttctaaagagtatgcgtttatagccgtgcgcactatattcaacacttcatcctctcatcttgaacgactgatccccatgccacctgcggttggccttaattattgattgatggagtttgtaggcatcgtaagaatatatcgttcaatatattggacatgcagaagtctcagaatagtgtcttgtcgttctatctatatatctgaatgccatcttgaacatgaccttctgagaatgaccttccgtccgtaacaataactcgagaacgagatggattgataataacgtgatatgtggcaatgcacagcatgttagggttaactctacatccagtcctccggttattcccaacaaccgaagaactacacttgacattcccgagttccagcagaaccagactctacaaccagttgcttcatcacttccaccgtcagcatcacaatgtctttcctcagcggtcccgcagattgcggacctgtaaatcctcttgctcagctctcaaaggcatctgccgtcgatcaatctcttcatcgggtatgttcctgtttcgacccatctgctttttgcgcgtagatggcgttcgtactgatttactcactcttctgtctatactctcttgtcctctttctaacacacaggatcggttcgtttctcaacaaggacattcaaacagctctgtatgtaccagagtatcgttatacgtcttctgtgaaaacgatcactaacaggctcccttcaaaaactagcttcgaagtcttccttcctcctcaagacctcaacctgcacaacaccttcagcccggttctctttcccagactcgaacgtctcctcagccattcgacttaggaaacctccaacaagcgttgcctcaatcatcggcatctggagctgcatggggagcagagtttcagaatgtcaatccaagacaaagcagtcggatgcctcccgacggatggaacgtaatggaacaacactggggcagggctcagggtcggtgtccactacagattccacacgttgttctccctcttcgctgaccatgtctatcattctcacaggtcagccatccgtgaatcgtgtaattgccactcaacatccacaagcctctctcacacgctctcaagattcttgggatcaagtcttccagtcccatattcaaaccgctgctccccaattccaccagcccgatcaggctgtctctttcagcggctatgaccagtcacagcaaatgccaatgcacatgctataccagccccagcttcaatccatgggtatgggtatgggtatgggtatgggtatgggtatgggcatgggtggtggtctgatgtatcagcagccaccgcaacccgaagtactctcggcaacagagaagggaaaaggaaaggaagctagctgggaggatcaatttgagaagtatagtgcattatcagaatccaaactaaacgaagaagttcagcctatcgagaaagaagatggcaagggaaaggaaaaagaagtcgatcttgaagagtgtgttccgccttgtcttttgtgcaggaatttgtcgtcgactaacaagatcgaaagctcatcggaattgctcctttacctgacgactcgtcttcttcagaatttggaaacaacaccaggattcacctcatgatgaagacgtcaaaaactgggaacaagagttttctcagttcgccaacggctccatcgcatccgcatacgaagagctcgaagccgaccaacgacaacgttatatagacgaacttcagctagatgacgaccaactggcagaaggtacaactgacgagcgaggtttccctaggttgggcaagtatgagttcggtgagtcccctcattacgcttcagacttcaagacttactgtgaaaagtgattctatatcgaaaaagtgtctcactattcaaccccacttccctcctcaagagcgcaataatcgttatctcgaatcacccccacatttgacccaaccgccaaccgaacaatcttctctatctgaccgagcgctctttctggaagcagccattcaatccaaatccaactcagagaccgtccgacagccaagtgacctgctccagcaagctgaatcctggctttctctcggagagacccagacacaagatgaaaaagagcttgctgggatccgtgctctcgaggcagcccgagacgaatttgaatccatcctgtcttccattcctaatgtcgaatcagaggaccacgtccgagccagatacgggctcggcagagcactcatgtcactcgcagtatcgtacacaaacgagtcctacgatgaggccgcctatcttagtctccatcggtacttgacattgaccaacccagagaaggcggccccgttaccgccaccgatggaacgaagtgaaattggaaaaggtctggaagggaacccatgggaggtccatgcaaagctcaccgagagcttcctgcaggttgcgcgggaggagaactcgcaaggccggctagaacctggaactcagatggcgttggggctcttgtactacagtaggtcttacaatcttttatgttttctgtccaacatttcggtagagctcgattctagcattcaatcaaccctcttggttcatcaggcaacggtgattatgaactcagtgcggattgttggagcgcagccctgaatgctactcctggagtgagtctttacctcgtatctacctgggtgttggctattgttcctagctaatctcccacgccggtgttttacaggatttcctactatggaacaggctgtgagtttccaagtgttttgatcacatacgaccgtttcgtcccgactgatctggtcttacaattctaatttacagtggcgcgactcttgctaacggaggtcgacccgaagaagcaatcgatgcctaccgacaggctcttgctatccatcctgcctttacccgagctgtctataacttgggtgtctcatgtgggtctctttcttcctccttctctctctgtttttatctgttgactgaccatgcatattatcctttccccgaaactctgtgtaataggtctcaacatcggagtgtaccaagaagcggctgaacatctactctcggcactctctttacatgagacttctcttcagtccggcggaggaggcgccaacgggccgtcttctgccgaaggagcgccggccgccagacagttgctttccagaaatgaggccgtcaatcaaagccaaaatctatggtccactcttcggagagcattctatgccatggtccgtatacctgcgcttgttgacgaaaccatttcgaagatgctcacgctcaggttttcttttttgtgctcgcatgttatttatctctcggtcaaacaggaccgaccagatctggcagaactcgcagtagttggggcggatatcaacttgttccgaaaagatatcgcgttttgaagctatcgcatgaaaattatcgtacatgctcaacggcgaccaagactgtctccgaagtttagtttttcatgctttgaaaagaaagagaacgaatcaaattatcattcttcatctatattctctttcttttcttttgtacgccatgaccgagccgccgcctcggcctttcgagcagccttttgctctttgttgtattgttgcatccggctgacatgctctttggcagtcaattctagttgggtgataatcgtctcgcgcacggcgtctactgtctattgagagaaaggaacagacaagaaagcgtttccggcgtgttgaaaaacaacccgaatgaacaaatcggagaaaccaatgaatgaacaaggaagaatagaacagaatccgatctgatatgatcagagacagttgaagtaacgtggccagacgtacctcatccctcaaagcccagcccttcttcacgctcacacagagcggttcccaagtcctaccctcgatctgcccctcttccaaaagtggagctctccctctggagttgatcaccttctgtctagtctccttcacgcgttgctcgatctgttctacaggcacgagatccgtcttggtgaacaccggaaggagggatacagatcgaggcaacgcagcgaggaagagctcatccgacgcgagaaggccatgattaagaggaaagagtatgacaaccaaggatggaggagtcggtgggcgttcggttacataatctgttcggtaaatcccatagaaccaaaagatagactcttcagaaagcatgtcgagtaaaaacaaaaagggagagaagatcagagagtatgtgcttgcattggaatagctctccccattccggccgaccccgctctccgtacccaggagcgtccaccatgatgaattgatcgggtatttcgaagaagttgagcatcttggtgtgtccctaagtagacatagacatgagcaaacagggagcgatcgcgataacatatcagcaaagattactcgaacggtccgttcatgttggcgaaccagaagaacgggaaagaccaaccgctttggatgacaccttgacaaggctagtcgaagagaacagagcgttcaacaaggatgactttcctgtattcgatcgaccggcaaacacgacctctgtatagttcaagcccatcaagcggtcggtcagtccgacctcgtcctttgattgattctgagctctttaagaatgttgatagaaacgaacaaaccttgcagttttccctttggaggtaatccctccggagtcgctgccgacttccaatatcgagcattttcgaatgctgctcgaaccgacatcttctgatttcctctctcgtcgcgagcctgaaactggttgttcggatacgacgtgttgggcttccgtttgaacaccatcttcgtctgagttaccggtaggtctgatctcggttttggtttcggtttcggacttgtttgaggagccggtcggaacagatcagaaggagtcgagtggaaaaggcgaagaacggaaggagagattggtcgagtaccccgacatataggacgaaggaaagaagaattcatcttgaaagacgttcttgatgaatggtttagatctaattgtgagtgtgagagtgaacttgagggaaagtgtgccgggaggtttcgctcgagtccgaagaaatgatatttattctaatttttctaaaatctcgtgcgcttttctttcactttctccgactgtgacaaaaccatcgtcagatggatagatttacttcatgatatacaggagaagcgttctagaccttgagatcctccatcgactcttcgtcctcatcttcacttgcctctgaggcttcttcttgctctgcctgttccctctccttctcactcaagaaactctgccaccgttccgcaacggccgttccaacagtagagttgccggtcccgctcatcactctcttcagacattccctaactcccttgctctctccctctccccaaaggtacatcagccaggtcatatggcaatcgacctctccctcatctcccggcgcgttgaacccggctcgccacgcgtcatagatgtgctcgaggacgactctcgagctggggaaggatctctcgtgcgcaaaggccgctcgatagaacggtgcggtaggcaagtactttgctttgatcgttctgtatgtatccagtcgttgtttgatcgacaacgcgggcccgatatcttcagaatcgataaagaaggaagcaggagagggatgaagtagagggagggaaaggacgagaagctcggtgtgcgtaggcaaggaggatgaggcagttccggatgaacggagggaaagcgagagaagtcgatgaagttgtgcgtgtaattcggcaggagaaggcaggagggaaaagtaatgagcgatgatcgaccagagcgccgtacggtcggccgcctcggcgggagatgtcgattgaagaccaacggggatggcctgcgcgacgaggtcgcctagcgacgacagctcagcttcatcatcggcagacgaaaactggatctcgacagacagccgggatgcccaagtagcaggtgatgaagggaacactttcgtcgcctttcgagcgaacgttaagatctgagcggatgggggtggagcaggcgaggcaagaaggtgtcgaatatgggaggcgtgaataccaggcgttgtgtgcggcggtttgagcagacttgatagatgatactgaatgtacgcgctctgtgtttatgcggacacgaattttaatgtaagatttgagatagaggggaaggggaatatgttggttagcaaattagacattatcctttgacaaaaaaaggaagcgcgtaccaagccttcgtctttcacatcggcctgttgccttctcagatcttcggcgaacacttccaacaacttgtccttctcttgtccgtcaagcgcttggacaccctgcttgaaggaatcgaccatggttttgaccgcatcgatcaaatccttcccactcagtggctctttctctttggactcatccactttgtactccctatcctgaagccctctcctagcaagaacgacccaactctccgccttggattccaattcgctttttggatccgtcagagatgtatagaccatgcctagaagctcggatcttaaaggcgtcgggaacgttctgaagagcgtgaggaacgagtggaagagttcgagttttccagggagcgcctcaagcgcattggcccaaacgaccttcacaatcgctccctccatgatggctttcctaccagcagcctgatcggcctcgtactctggatctttgacaccaagaacatcccaccgtcggcggagtcgctcgacccagacgagttccatctttgcgtactcagtccagaggtgaaccgaattggggaccaaacggagaccacgttgaagaagagttcgagcggctgtcggtgacaggttctcagtgagttcgtatgaggataggaggacatagagagtgggtgatgttgggtgctggagaagcgcactaaagaggtttgagaagaaagtgtgtaggaaggcgggaaaaggagtgagtgagagcaaaagacggcaacaaggaaggggttataccaggtaagaacaagctgagtaaatcggaacgaacgaggcaagaatctttccgacaagctttttggcaccttgctttttggcaacttcagagtactggatccataaaccaacgtctcctttgaattttcgagtagctctgtcaaacaggcttaggattcgacgttggagggagaaggacgagagcgagtgctttgtgtgtgcattttctttgtgatagtaacacgggaaagaagatgagttgagcatgcttgatgacaaagagatggaccagatatactgaagcacatactctgtcgattgaatcgaatctttcgaagctcttctaggttgagctcatactcaatgtacctcagaaagtcctcctttctaccgactctccgaacgagtgctcgctcgaatgctgttcttcgtttgatgatctctcgaatttcatcctgaaagagcacagtcacagagcagacatgaggttctgttgtcatatacagtagccagagccaaacgatgcctacctggttgaatatcttcttgtccttgaggtcattgagctctgggagcatttgctccaagctagacgagagtgtgcatgtatgcgtgcgtgcgtgagctcacgcgaacgatacgacctctgaacccgaaagacaaagcacacaaccctaaactcacaggtagtctactttctccatgctgggctgctgtccttgacgttgtagaaagctgaatcaaggcaaatccgttgggcgttgggtgtcggatgctgggtctgataaacgagaaatgttaacagtgtggatttaccaaattctttatcttagataatttatgaaatctaccttaaattcataaatccaggctgatcccatctctcaccctcaccctcccatcatctaccagcaacgacgacgacgacgacaacaacgacaacgacgaggagtagcaacagattatctttctattgcccgctctcatctatcctatatttactctatatctgtagtctgatatgccatccgagtgagtagctgctggtttgttcggtggtggtcatcaatcaaatgcaatctatccgcgattgccgtctctgtttccaagaccgatggctcatctttcatgttgtccttgctgaaacattcgctcggccttttctcaatagactggcttactggatcgtctcctctcctacgatagatgacgatccgtccaggacgctctcagacatcaagcctgctctagatggtgtactgactgatccatccaagtacggctcggtagaagtaccccgtctcaaagtgcgttctgcttcctatcatagaattctatccgcccttcatctgtttgatcgaaccagcttactttcgtcctgctcaacctcggaactaggccggcacgctttcctctttgctttctctctccgacagtctaccgaagcaggacgctttcttcacacaaaccgtctccaagttactcgacactcttcgatcgctcctaaacgacgacaaggccaaagtcgagcttcacacaagggcaagtccctttctttctgcatatgagactattttagcatcttccaactctcttagaagattgaatctgaacgatgattgacaagtgtttaaactgacctctgaattctgatcatctactgtcaattctaggtaaatgatcgaccattagaggagtacattttcccgcccgacaagtcgggctggaagtgggataacggtcgatggggagctcacggaaaggtggccgaggtgatcgagaacttaagcaaagtaagtcactgagcgctctcaccaagccaacatacactcgaaatcgactgattgctgatcttgttgatcacacgtgggctgggggtttcggcaaacgattctgaatctacaaatcgacgggattctatcatgaaggaaatgaactctatcgactccattcagaaagcgaggcttcaggcctacaatttggccaaaggaaatcttacggccatgcaacgacgtctgacgttagttttcctttcttgagcagcgccaagtttgaatggttggcctgactgatttgtatattgtcttaccttggattcggtttgaacagtggaaacttgtcgaccaagtcgctgggagaagtcgtatcgaaagatgatttcgtaactggagatagtgaatttttagatactttgatggttgccgtgccaaagtgagcacatgctttctttctcaaagaatccggatacagttttcgcctacgcgcatagccatgattcattgaccaatattggcctgatttctgttcttaccctcttttctttcttttgaatcgatagtaatttgaccaaagactggctgtcaaagtacgaacggctctgctcgatgatcgttcccaggtcgtcatcgtaagacttttccttcatcctgatctgaaatctacttgaaggatcggagagatttctgacccgttgtttctctttctgacgatcacagaaaaatcgcgtcggacgacgaattcacgctttattcggtgacagttttcaagaaggtcaaggacgagttcagccaaaagtgtagggagaacaggtttgtgctaccccttcgtgttgctaaacgtaaagaaacataaccggtgcttcctgtctgacaccaatccttacctcgaaacgacttgtgttctaccaggtttatccttagagatttcacctacgatgagggagcaatccagaaacaaaagcaagatttagagtatgctttgattgaggaacgcgagctctgggtgggttttccatatcatcgttttgtttgatgtgtgtcgatggcagcagtcagcttggagagaattactgatgcttaaggtttgatccttcgtaggccgatcttgtccgtctctcacgcacaaacttctccgaggcattcaagctgcttgtccacttgaaggttgttcggttgtacgtagaaagtgtgctccgatatggactgccagccgagtactcagctatcgctgtcaaggttcgtctctattctgttctgtctggtcaacttactattgtactctcgccaaaattctaacgaaacaaaaatcgttcctcatccctttcgggtccaaataatggccgttgatcaattaacctagcctgagggcaagacgtcggccaagttgctcaagacgctctcgagccagtatgcttatcttgcctccaatggtgacccgtctcggcgaacgaaggatgagaagtccgcgccaagcggcggatcaggcaaaggaggagacgaggtgggcggagagtgggccggtgtgatggaggaagagtggttggactttgtgctgtttgaggtacccaggatcgtttaatacgcacagagttatcgcggtcagctagatccacccggtatcttgcacttccctttcctccctctcatcatttgctatttttccctctatatatcattgtgactactcgacccaatatcataaagtttccgttgaatgataatttcatggatacatagcttgtcgggttgatcaaaagcgttacgtaaggatggatgctttgttggacaagcgaactgaaatgtagaacagatcaatcaccatcggcagccaacttcagctcacccaaaccactacctttcaaattacacttgatgacttgctcttcctcttcacagccgtttctacaactgatctctggctctcgtgtaatcaagcagggggctgaagccgtaagctccgaattgatctctgcctcgaaatgtgtcccctagctctgacctcggtcaagagtgatccattctccaactaacgatttttgctgaatcacttcaatacttgacatatcttagaaagtctacaagaccactctcttcccatcaccaatcttgactccatcgtcctcttcctgcacgacgcctcaaccgacgacaactttgatcaaacatcggttttctaaaaaatacagacaccctcacctggatgcccagttgaccaaagccagagtgatctcggaggcaagatcgttagtccgggcatgtcgagggggggtcaacgttcctggtgttagaggaatcgactgggagacgggtgtggtcgccttagagtttatagaaggatggagtgttagggaggtcttgggtgctggggcggaagacgaggacgaggatgaaggtgaagaggagaatgaagaagagaacgaggacgaaaacgaagacgagaatcaaattacgaaggaggcaaacccttgggatgggttggatctctgttcgttaacttgtcctttgctcctcctctttgtgatccttttccttcgtaatgttatccagggtcaactgacaccctacgcttcccctctgttctatctctatgaaccggtatctgacagcattcatcccgagtctgatcggtcaccagctcgcgcttcttcacgcggcagagattattcacggtgatttgacaacatccaacatgatgcttcgaccggtgcacaaagaaccgaccggctcaagagctccgtatgaagtggtgagtgtctgacgactatttatggacttttgtatcgcccagatccaacacggtggcttccgtgatgtcggttcttcatctgactatctctctttcttcttcatattgcctttaaaacttctctcctctcctcatttctcttttacggatcctttcgtcatctaaaaggtgatgattgactttggcctagcattcatttcgaatttagctgaagacaaggcagtcgacctctatgttcttgaacgtgcattctcatcgacccatcctggaagcgagggcttgtttgaatcaatcttggaagcgtaccgattgacagctgggaagagttggaaggaggtcggaaagaggttggaagacggtgagtactttgcttactcgaaacctgggtttgaacgatgtcgcttggcgtgcgcttgtaagactgttcgcctcgggatcctgactttcgattgggatttgattgatagttcggttgagagggcgaaagagaagcatgctgggttaaatatatatgtgtcattggaatccaaaagcagagtggagcaagcacaattgagcacaagaataggtatgatcccaacatcagagcagagtacatcatccatttcatcaaccaagtttatgcgcgggaggtggtttgatactgttagcttctatgacaccaaagggagggaagaaactaggaatatggatgatctactacagagaaagcgaagacgaggaaagatagattataaacataaggatctacatccacgtcaacaaacatgttggcgtggaagaaatgtcgcaaccatttcagtgtgtccgtttgtgcatagcaatatctatatcgtaactgattttgtgccaggcgacagttttgttcgaagcttttgtacctgaaaactttgtgaaatatgtcgtaaggagaagaggggctagattgttagtgaatatatattatttcccactaaacaactgaagtgaatgaaaatagaagggtagaactaacctcgacggcttggtgagtagtcctccttatagatgtggacttttcgccgatagaccctcctctcactctcgctccctcctttcctacacatccatcccctcgtctactttttcttcttttctggcggagcttcaccaactcgatctttactcaaatcaactcccaagccagccatatgcaaatctatgtgcgcgattgaagattcgaatgaagaatatagtgtgaaccttgctgatgctaccatacatgcacatgtttatggaatcgatgatgggagtagaaaacttactggtaagcttgacttttctgttggccccctttttgcctttctttttgttgttcgattgtataggcagatgcgtcgagggatttgtggcggacgatttgataccacctataaacgtgacgtcggattccacgagataggcaagtaagtgagtcaggcatcacagataataagggggatgagaattaataaaattaatctggtgagatggtcttactttctttgagcgccctttcaatatctgtggggactttgagggcatgccaagcatctctaaattctgatcgagatgcaaggtcgcgccagagaaagaactcccactcagctaagaacgacaagaagaaaaaccatagcttggtcacgaaaacataccagctgtgacagctttccctccccgttcctctccaacctcgttgaagaacacctgtttaaatggcccgtctttcttaactcgcataggcagaaccttgccttcttggatgagctcctcaagaacctgctgagaaccattccaagactctttgagtgacttgaccgagatcccgccctgcttgtccttgttctgttggatagtggacagaacttgagccggcgtagagatcgcgtggtctgcctgatgagtgtgagaagggaaattcaatactaaatcagccttggtcgaaggacattggtaggatgaggaccaaaccgaccttgaaagcgaacagcttggtctttgggtcaaatgtcacccgttcgtgctccttgagcatgttttgaaaaacaggattccattccagttcctcccaattggaagccaatgcgatatcctctgctcgagttggaagccctttcctctcctacccaaccaaatccagaatacatgaaaattagattgagttcgagaaaggaacagaacatattaaaatagcacacgaaccttcaatacacggacagcataggagatcctcgtgttgatgtgaagaccttgcccagtatctcttggttgcgagtatgccgagacttcatattaacccaggaaggaacagatcgtcaataaattcgaagagttgggcaggaccacaaagaccaaaactttacacctacggtcagagtactgagcagccggcttcttcttctctggagaagacgcatcatccgtcgacctggaaggcgacgacatggtatgtttgattcttgtgtgggtggatgagtgactgagcgagacttaccgagtgggtctaatagccagacctggaagttgccgtaaccacccttgccgtaaccccaaaggcacgtgtgtcgcgtaaccacttgacctccacgctcacacttcaccctctactctctacttcatcccatcctattccatccaactcaccatctcatctctttttctatcagtccatagtctattcagcatgtccaacacctcctctgcgtcttcctcagcaggattcgagttagttgttgatttctttgacgcttttgttgtagctgttcgagttcttcagttcatcgcttactctcgttctctcccattctttctacaactacgcttcttgggaaaagcttttccaacgcaaaccgaaacgctcaccttcttgcttccacgtcagctcgagcaggtgcgagcaagactgttcttcccaaagcaacatccacaggtaccactatcgtcggttgcttgttcggagacatcgaggccggaactgctggaatcgtgcttggtgctgataccagagctactgaaggaccgattgttgctggtacgctttccatatttgctgctgtcaatctctttctggtagcaggaacttgagagtgatcacacttgcttatcatcttcccaaaccacctgtcgaaacttgaatgttttgtgggggatacacgatccaaaagacaagaactgcgaaaaggtactcatcttccagtacctcaacgtcgccgctttctcttcatcgatacctgacacatcttaaattttgctatatactagatacacttcatctcggaatcaatccgatgctgtggagccggaactgctgccgatacagagttcaccactgctctaatctcatctaatattgagttacactcgctctcaactggaaggaagccgagggtggtgacggccatgacgatgctcaagcagatgttgtaccggttcgacctctgctgctattcattcgttttctttccgagacgatactcaaacacccacaaaaaatcgtatctcattcaacaggtatcaaggtcatattggagccgccctcgtcctgggcggatatgacgctacaggtcctcagctgttcactgtcgccccgcatggatcaacggataagttgccgtacgtgacgatgggttccggttctttggccgctatggctgtattcgagagggattggaaggcaggactcagtgtaagttgcctgcgagtattctacatagttgtgtgcttagcattagaacctaatatatttatcacacccgcatctccaaatggttttgttggctccctatgaaaatagaaacaagaggctgtagctctggttgcagctgccatctctgctggtatcttcaacgatcttggatcaggttcgaacgtcgatgtttgcatcattgagaaggactctactgagatgttacgaaactacgagatgcccgtacgtcgtgcctttcttccattgagctcagatgagattttgattcttccaaaactgacacatgtcctgtgtgacacgtggtatatatgcgctggattgattacctagaacgaacgaccggtgaaggatcaatcgtacaagttcccaagaggaacaactgcttggcggaaggaggacgttcgtcggtttgttgtcgccgaagagcacagggagcatggctcgacggtcgaaggacaggctggcgtcgttggcgctggagcaatggaggtggacgtgagcgcttgagattattaagacgggaatctctttctctttattcttcttctgggaagacgtgagatgccttgcatgttttcatatagtttgccgataaacgagatacacacttaatcctgtcaaattacaccgaggtcacatatattttcattattccttggaatctatcatatggttcacaacggtgaaacgaacacacagcgaactattcagtaaagctttataaaatgtccatcagaatccaaacttactcattttatgcagcttcttgttgctgttgctgttgttgtctttgcatcatcagctgcatcaccatctggacattttcctgttttttctcgatggtcccttgaagggtatcgagattctttttaacgaattgtgttttggacgtatagtgcgtcaaggcctcctttcgagtctgagcatgaacgtatagattgggaaatcagaaccagagacgtcaggttgagtttgaaagatgagaggtatatgagatgatgcggcgtggagggacagaccttggagacatagtaccctgtcccaacgtccacgataacattctctgtgtcggttaactttccgggaacgtaaagtgaggatgtcagggggattaatatcggcttgtctgtttggttgaaggacaacacgatcaagatagtgcaacgacgaaagatgggatgggatgagcaatggcaaggatcgacaacaggcgaaaaggaagcggaccttgattctttgggttaacctcctccacatcagcaatacatgatttgaatttcgcttgagcctgttttagctgggcgaacgaggtggtgagatgctcaagttcctatacgcatagaaagtttattaaccatgtacgatagatgagggtcgaggttgaacaagcagcagagaataaaatcaactgaaggaccttgaaagtatgagatagaagagattgcatggaaggcagaacacgaacgtcatcaagctgcttcttgacctcagacagctgtctgaaatcgagatcttgaacggagatttgttgttgggggcctgccattgttcgtttcggaagagccaggatgatgtgcgtacgttgggtggaaggaacaggtcgatttttcaatctcccatttgattttgaatataggaaaaatcattcctaagacttctcctcttttttcgttgtatttctttctgaatagatcaatcatcaacctgcaactctctccaagacccagcagtaatgtccgtcgctctgttagctccctacaaggccattgttgccaaactttcttctcaatttgccaaggctaaggccagtggagacctcaactcctatgagagcacagtgaatgaagtagagcaggatggacttcgggtacggccgtttgatcttattcctctgctctgaaccgtttctttttgttttcgtacttctatctcccgagtgaaccaagctgagcgaatactttgatgatgttatatttgcattcagtatgagatccgagtctgccctgccctcaaagagaaacgggcggccaaatcaggttcatctccatccccatccgacgactctgagcctctcaagcgacagaagccagccgaccctttcgagggtccgtacgacaacgatttgtttctaggaaaagttggacaggaggaaggtggagagaaaatggttgccttgctcaacaagttctcagttgtcgaccagcatttccttttgtaagatatttcttcttcccttctcgtgaagccttattatatatattgggttgggttgaagtgttttatggatcagcagttatgaccttgaactgatccagactggatgatcacgctttttttactgtcctgttcctttgggggatttgtatacaccagagtcactgaaggtgagttgtcagacagcctctcctctcttccgatcacataatctcaagcatcttgtcgtttgaacactctctttcggtctataataacttcacagagttccagtctcagtcttcgcctttacaccctccgcatctattgcatgcatacttgatgcttctggctcttcaacagactggtcaacagtggatatgtatctataacgctggtggaccggtctcaggagcatctcaacttcggagacagtaagtgtctcgtgctacgtggaagacaattttagaggaaaggggaagcgcactggtgactaaaatctgtctggacgatattcacgaatctctctttagtttgcagtttgttcctaactctgaggagccgcctgtggacgaatggactgcaagcgctcaaatcgaaacagagggtgtgtcttttgatgagaagatgttctcaaacatcctgcaatcctttctataacatgcctggcgctgaactagttgatcttctttttctccctctgacatagacgagccattttacctctcatcgctccctcatgcgcacagtattatgcgtcttccctctcaactccgatctcggtcgtcgaccgcagactctatcacatcgaccctgatgctttcacacatcaaactccttgacgcgacgcaccaggtcattcagaagcatcttctacctccttatctcgaccctgagtccgcctccttagcacctcgacctaccgaaaagcctacaatggcttataacctgatcctcactctcagtcacttccatgccatcccgaggtcaaaggagaaggctgatctggttgatcctggaatgagtttgaacgcgatggcgttcgcgggtatggtactatgcgagagtgaagaacagatggaagctatcaagggattggaaggtggggtcaagagcctgttgaggagcgtaggatttgagcgattggaggagaacaaggttgaagagatggcaatggcgtaggaatcatcctagcaagataaaatgtctgccttcctcagttgatttgagagaccgctgtcctaacacctcaatgcagattgacttgtactcctgctgctttatctctctgctttctgagaactgtcggctagacgatgtgagtacggcaacggtaaacagtgtggtacccgcttagacttgtgcaactgttgttagggttacagaagttctatatcagccgagatgatcaaatgcttattcataaggatgacgtcgacatttagatctgatagagaccagatacagaaagagtagcattgatttatttgaacatcatcaaatatcaacccattctccatcatattctagcatcctccctcgcaaattatttcaatcttatcacagaatgaaggtatactatgtttgaattttggtgctgctaaacgcttttgactcttgctcatcttcatgatctcacccgttgcgtccgaacagattgcactgactggagctcgaggaagcgtcgggcaatccatattgaaacactgtaacgagcagggtcattacgtttttgagattaaccgaagagacgacccggagactgataaccccctctcggaacatcgacgggctgagggtaagatgtgccgcttagttttatccctctaaagtagtcctccgatgaaatgtcaacccgacgaagcgcttatcatccatcgatctatgctgactcagaacatcgtatctttatattcttgtcttttgcctctatcgtgaatatctgtgtcaataaggcacggattacgaagctattctcaaagcatttgaaggagcagatgcagtcatccatgtgagctatcatccactatcgttaaccaccgaggtatttgaatgacttatctgctgtatgatatacaggtggctgctgttcctaatccgggaaaggtagacgatgcgaccacacataacagtaacgtgtcctctagctagtaagtacactttcctcacacgtgcatctaccaaaggggtagagcgcaaatcggcgacgcgctctcaactttgagaaagtactgatgaaccatccatttgtatttatcagcgttgctttacgagccgctgctgaattaggtatcaagagattctccctaggtaagttctcgctcctttccctggtggaaaaaattgacgtgatgttggtactcgcttggtatagttgctcatactctaataaattcttctttgcaatcagcctcgtccgtcaacgctctggggctcgagttctctcgtttctctactttcgactactttcccctcgatgatgttcacccaacttatgccgaagatccggtgcggctctcttgtttgttacatcatttcatgcaaatatccaaggtttgacacgccaatccttcctctttcagtactctatgagcaagtacgaggcggaaaagcaagccgatgggctctgccgaagatatgacttccttcgggttgcttcattccgaatgcatgaggtttcacccaaaaaggacctcaagagggaaccgaaagtggatcaaatggtactatggtcgtattctgaccctgaggtatgtactcaggcttccatttcattctcaagatgagaggtgcgcggttggagaaagatagtgtcagaatcagctgtcggccatattactcaacagtctattcaaccatcttttttgatatgactcaacactgtaggaggttgcgaaggcctgtctccttggtgtcacggtcgaaaaagactggaagaagggccatgaggttttctactgttcgtgactccataaattgctttaagtcattagcagtttctagttgtgttataactgacgagctgtacatatatcaaaaacttcttaggcgtgtcacctgagaacacccatgaacaaacccggggagaaaagatcgataacgagacccttgctcagcgatactacccaaatgtgacttgatttctctctttgactatcaaactgccgtgatgctgaatctgtgtttatatttgtccttttgtctttcttctccaggtccctgtgaagaaggatttgaacaaatatggattctttgacacgaaaaagattgaggatttccttggatggaagcatgcccagaagtagagccgtagtgaccccatattgtttcctctctttcctctctttcatctgtctattggtagatagttgcctacctcactgtgagatgtgtcgatatgcctatgtatttcttgacaaatatgaagacggcgatgacagtccagtgtagccggattacgtacacacgcccgaaaccggccgggggtctgtaaagcagtgcattccgctttggtcaactctgtttcctacacgcttgttcagcaacaacgacctcccgacaacgcgtgtattccctctttcttttccattccatctgtggaacttctatcttctattctagctagccagattcatatcgtacataatgggtctgtttgcaagaaaacgtaaagatgcggcagcggatgggaccgagcagaccgaggtgggaaaggcaaagaacaaaaagcccgccggtaagtaatttcctaaggacatagtcttccttttcctcctcttctctcttcctcgtcgcctctctttgctgcatttctatggagaggatctctgtgtttcagcagaacaaatagaattggcatgcgatggccatgtgttgatacgcaatctacccgcgagggatttaaccacgcaatctgtaatgttgtgatctttagcttgcctttccgcaaacttattccgtattgggtttggggggatcaaacgaaccatatgaacacgtttcttcctgttcttgggtgtgatcgatcaatgctgacttcaatggcgattatacgttatgctcatgtcagccactgctttcaagcagcagcgactcaaggcttggcagccgatcttgactcctcgaacggtacttcccacgctcttcatcatgggcttgatctttgccccgataggaggagttctcatctggggatcgaacaaagtgagtatataacatcatgtttaatcatctttgacaagagccacaaaatattgggaagacaagctgatattataatgtttctcgtgctcctatatctgcctatccttcagatcacagaatttacattagactatacagagtgcgacactcaatcctcaacgttgaccgacatgccctcttcgaaatttagctgtgagattttggactgcacttcagagtgattgagaaagaacctcgaaactcaggaatgacgactgattgaatctcttgctatccgttgaattctcagactctcttgcatccggtcactcctccacctcgatttcaaacccccagtggtcatacacaaactctacgactggcaacgtttgggaacgccaagtctgcactttagagttcgatgtcccatacgaccttggtatgtaccctcgagagcgcgtccagaattgttcctttcatgcgacgcgtctaatttccatttatgatgtcttcctcgacgatctagacccttccgtattcctctactataagcttactaactagtaagcctcttgccttctcactatgatggttttgtcctcgatctaatcacgttctgagccggttgtctatccgctagctaccaaaaccatcgacgatacgtgcagtctgtagacactgatcagcttcatggatcggctcaatcggcgtgagcatgtctattaaggtatatccagactgttctcttgaagactgactgtacttcccttcttgttttcgttgctcttttccttgtttattctagatcaaccttgaacagtggtaactgtaaacctatcaccagtatcggcggcctacccgtctacccttgtgggctgatcgccaactctgtcttcaacgacacgttcaatactccgaccttgatatctacgtcgcaggtgtataactttacctcgaacggaatcacctggtccaatgagcacaagaaatacctcgatgctggatataaaaatgtctcacaggtggctgtgccgcccaactgggttgagcggtatggatcgacgtacaccgagttccctaagctttacgacgatccccatttcatggtttggatgcgtaccgccggactaccgacattcaggaaactcttcttcagaaacgtcgaagagaccatggcccaaggacggtacagaatcgagatctatatgagtatgttggcaatcttttcctttctcataagaaccgattgaccctcgagggctttcatgccaaactttttatatgtgatgttgattgacggtctattttgtagattatccggtcaaacaatttaatggcaccaagtccatggtgatctcgactgtgtcctggattggaggcaagaactcgttcctcggctgggcctatgttgctgctgccgccctctttgcccttcttggtttgcttggtaccgtcagacatctcatgaagcctcggtatgtcttcttttcctactcgaatcatcgatttacatgcgatcactgattttggcacgtttgacgtgatgtagacgattgggagatatgtctttacttagctggaatcagcccaagaagtaaactcgaactggttcttatggtttatgacgacctcctcttggttgtgttcttttaatccttttcaggattgtgtcgcaagtttccttctttccgattgaaatccgtagtccttttgttattctacctctttcattctgaatcttatatcacaacaaatactcaatcatcttctctcatcttcttttccgttccatattggtctattgattcttatgattgccactcactgatcgacccgtgcatcaatcgctttctgctgaccgaatccagtagatgtccatttgtgctacaatccactgcctgacgcactgcaaagttaaacgctctctgactacaggccagcttctacaactatagctatcatgaggacaactagaagaacgagtcaaaaacgaaagctttgccagagatagtttcggcccgatatggcgcgagcatccttttcatgcatacctccgtcgggttttcatccgtctgatgagtgacaccggaaacgacggtgcacttggcaaatattcattttgttttgtcttgtatctcttgaccgtcgtctgatctatctggtgtccaatcaaccatctagtatcactgtctctttcggctccgttctcggtttatctatatcggtatttcttctcttccttcatcatccgatccacatcatgtctggtttgccgccctctactctctaccctacggtacgctcttcttactatatcgggtttcttgacataatccgtctctaagattgagacaagttatctactgcaaagctgacggccttgaatgactattttctctcttcttcatcccatcaggtctttgctttggcctcctcgatcgtcatcgttctctttattggactttccatgggagttaggcaacagagacgccgagagcaacgtcgtttagtctatcagcttgcctatgaagaaaggatggctctttacaaagagcgggcaaggcctgatatgtttgaagtcggaggtggcaaaggccgatgggcagggaccgaacaggttgattgcgacaagatcaacgtagacttggttcgtctccttttcttatctcttgacacttgacggttgggccccagatatgacacaagcgtcccgagatctattacatcctcacttcgaacatgacgctttgatttctttccgtctcgacagcctatatcagctctcgtccttcctcatcatccgggcgtcaaagtactgccctctgttgcccctcctgtgatgatctgtgtgatcatccttcaacctaaaccgccgatttctgactttcctgagaccagaggcgaaccagacgaggaagaggagggattgggtgtcgacgtagatctaggaatggagacgatcaacgtcgttggagactggagaggggtgacgaggcaagcaggtctaggattcgagtagatcgatattgccttctcatttatctcatcctctggttgatgttttctttgagcttggtgatgtccacctatcttgctctcatcatcaccgtcgtcctctcctatccttctatcttccatctttcttcttttttcttctttcatttctcatgtagtacagaacagtccttcttgtctcttgtccatcgtttgtataccatcgtgtttcatttctctacttatgaatttctcaatttatgaatttcttatagatgtcttttttctttttctccttatcgatttcaagtttgacaaggataattgagtccgacgttgccgaaaggtccgaaaagtagtcatccaccggacccagcacctcatccacccttttttcggatactctccgaatgaacaatcttggctccttgcagacccttgccgaacgactgttatgaacctttccggtgttttctgatctcttttgttcatcatcatcatcaatttatttctcatcttttcactgttctcgagatgcgagcgactgaactacccacccctcccccggagacgaactcactgccggcgtctgaaagcacggtgttcatccctacagaccttcatccggctgtaagtgaagataaccttttttcttgttcgttagatgaatgagaaactaagtggagtgttagattcgtctggttgagaatatcagggcattgaacacgctcgcaaaagattcaaaaaagttctcctgtcgacagaagtcgagtcgttcgaggacgctctggctgaaagcgatggcctaggtgagagcaaccttgtttgatctgctgggaagataggataaacattcatcattcgaaacgaccttatactcggcacagttcttcggcagtcttacaaggtcaccaaacagatccttgcgtctgctcccagactccgagggatcgccagaaatggagtggggtacgatagcatagataccgccagagcgaaagagcttgggattgctgtattcaatattccaggtaggtttcttctttgtctgaggtttctcttgaaaggcaaaattcgttgggtctaaagcaacttcgtggtgatgtgctctctttttaaattaggtatgaatgccgagaccgtcgcggagatgacgttcacgcttgcgctctcacttttgagaagagtcaaccttgtggatcgagcgttgagattgggagaggatctatcaaaggttgggatcatgggaaacactgtatgtcgagtccatggcttgtgatattgcttgatctgtgagaacattaagctcttgccgagtagactgatatgcgttcctctggtgtctacttagttacgaggaaaggttgtcgggattgtcggaatgggagctatcgctcatcgggcggccgagcttttccgggtatggtcaaggttgcctctctgattgggtgactgtagctggtatgattggattcgtagaccttactttctcttcctcctcttcacaggatactttccaatgtgagctccacgtgtactcgcctacgtcgtctacagacaaatggaccgagaacgatccgtcgtaagccgctcatcctgtgtatcaacaagcgtgagatttcttgttgtgttcatccatctttcttttttctttttggggggattgataccctgtttccagctctctgcgcgctctccctcacacccgacacgccagcttggacacactactcccgatcgtcgatattcttacgcttcattgtccacttaccccatccactcatcttctgatcggcgagaaggagctggccactatgaagacttctggactgttaatcaatactgcgagaggtggtgtggttgacgaggtcgcgctggaagtcgcgctgagagagaaggttatcgctggggccgcggtggacgtttgggaggtgagtatctgatatgtttcgtgtggtcggttgaagagatggatgacggtggctgaaggaggatccgaatgatttgtgggaatccttgtaggtcgagcctccgcctccagcaaaatacggtggccttatctcccaacctacttgtatctctcttcctcagtaagttgttttccttcgtgtgtgtgtgtgtgtgtgtgtttcgggattcacctttttctctgtttgatgttaataacgtcgtcctgttttctttttctttctcttcctctgctgacacagcatgggagcattgacgaacgagaatcagacacaatgctgcatccttgcggtcgatcagctagcagatcatttgtaagagatctccttctcgctctggaccatctttcttcctcgtttacagacgctgacagactctttgaggcggcgggtgtttgaggaaattcatagagatggcaaagtggttggcaatagagtagtttgatgcattgtcctaggaggatagaaatatagaatctcatttggcgctcgacctgttctctctttttttccctgtcagtcggtttagtgtggtcggaggattggacaggagagaaggaaagaaaacctgtcaaactcgatcacagaagacatctctttcttttgtgctttccttatcaagacagacagacagacagagggaaagatacacgtccatctctctttgcactaaccctcatctccttctctcttgatttacctgcctgtatgctgactatctgtgggtacaaaccgcttcgaggagggttttcttaaaacggtggatctagcgggcagacgacgagcgtcagctaattataacaccttggggcttctctttgtacagatcctatctcgagctacagtcgggcggaagcacaaaaaagcgggagtaagcagctcgaatggcttccacagaggtaaggtgctttttcgttcgtcggttcgttgtcatactttatagatcagcccaccggcaagggccgaccatgtcgtttgttctgtccgccctctcctctcttcttttttttctcttgacggaagagtcggcgccactctgcagatcgaggtcgaagccacggacgggtggatgggtctgacggtcaaagatgggacggcagaattggtgagtggcagacaggtcgagatttctctgacccaatattcgggcacaatttcacccaagaacatattcttttctctttctcttcaccgggaaacacaggaccgtatagtcgtacctgtcaatcaaaccgggtctggtgaaaagtttcaagctagagctcgtgagtgtctggttggtttgttttccagaggtgtttccagggtagaactttagatttgaccggacggttgatctcttgatcggctcagaggaaactcagtggcaagtcaggatcagggtttcccagaaggcaagtacgaaagatctatgtatatgcatgtgtgtgtgtgattgaaagcgcatacagctcatc

SEQ ID NO: 1052 - DNA, 1545 bp, Xanthophyllomyces dendrorhous
attcttagccaaacgtctatcgacgatttcaagtcagcctactagatggagggtctctaggaaggctcatcggtttgatctcgccctatttacccaccaaactacttaccggccagggcgaaatggagcagtcgatgccaagaaccgcagctgattctacgcctagcacacaaatcgttagcacgatgtcagcggtgactgcagcgacgacaacgacgacagcggcaacgacggctttgacggcgacagcaactccaccgacgacgacaacaacaccaacagcatcaacaacaaagaaaaagggaccaggaaagaaactagagcgaggctcgtcaagtttagctgggatcaagcgaccgcgacaggcagacggggcggacgatagaaagcagaccaagggaaagacgaccgatggaaagggaggcggaggaggaggaggaggagaagtagtaccggagaatacaggcggctctcacatcgtcaaacctttggccgatccacggacgggtccagtgccggtcggttcaactagtgcggctgtgagaggaaccgggttgccaaggcctgtgccgagtgtggacagagggacatgtggcgaaacgatccggcatggtagttcgctcgcgctgggcggatcgactggtcaggatgcctatggcttgattagttccacagggagcgcttcagggcttccggttggacaagtcgaacaggagaatacccagacgaccggaccggcgactgggtttccgaatctggtcgatcttatggggctcgagtttgggccagtccagggggttgactttttaggcgagagtgagagcgagaaggcagagtctgaccggttggcccgaccggttgacccggatcgtccgtctgatggatgtgagcgactggtggactggtcatcattatgtgttggcagtgactcaactaaggagttggcatcggagagttcggcctggcggatcgtgagggagaaagctgacgatctattggcgatggacgataccgagttggccgggctgatggaggagattgtgtgtggagaaacgtttgtcggcttggtcagcagagtagagagggttagcatgcagacaggctgggcggccgggtaattagaatacacatgctgtgtttgtgacgagatatatgtcatgtcagctttgttaagagtgagtgtgctcttttcttcacatagtcaactttgtgggtgtgccaagggttattgctcggagaagaaatatgatagaacatgatagaatagcacgagatgaaatgactgtggaagcatgatgaacggacggacggacaaacgttggcgaggtgtatgagtaagagcaagaagcaaggaaggaaacacagaaagacagggaaaaataaaagagatagatagcgacagaaacgatggatgaagagaacagagtgttaaaggacgtgcgtgcaggatccaagcgaacgggtgaccgcgtgcgtgccaaatgatgcaagaggtaaacgtatgtgttccgttgggtctctgacggacgacgggcgcagtaggga

SEQ ID NO: 1053 - DNA, 22306 bp, Xanthophyllomyces dendrorhous
atgtgtgtggagggggagcgaagcgtggggaagagcgtgtgggaagaaggggggggacccatgtggtccgtctggttagtcaggtgtgtttggcgagttgccaaagtcgtcggctagtggaagccgaaggctttgacccagccggacacgttcacactgtaggatgaacgagaccgagggatgaggccgactgggtggtgtcttagtctgatccatcggccgagagagcagggaggagagccatgtggaaagataagggtatcgagggaaggaccggaagatttctaggaggaggacggtcaggtacagtcaggtacaacaaggcacggcaagtggaagggctgatagagtgacggcatccgaatagaggagacacgggcggagagagagagagaaaagagtacaaaccgtaaacacaacacacaacggggggagcaggcaggggagagcaggggagagcgagagaaaacaacagacgcggccggtggcgtgtggaagaaaggcgctgtgtatcagcggacgatactacagatgatactacagatggactatagatgggctgtgtgaaaagggaatacacagacagactacagaaaacaagacgaaaacactagaaagacactacggggatgataggactactacaaaaacagagtgaaacctttgctcgaatgttctctagccggaaggaaggaaaccttttttcatgaagaaactataaaccatgtattattattattatcatcattttcgatgtctgattaggaaacgtttgcagtcgagtcattagaagcttgactaatcggaccttgttcctgacgtgtgcctagatgccggtgccggtgcctgtgcccgtgccttgtgcctctccccttcctcccccccttgtgtgcctgcccaaactttagctcggtttctccctcaaccatctgtcctccctcactcacctccagcacctcactcaccccactcaccccatccaagcacccacccaagcagctctctctctcacacacacacacatatacctacacatacaaactcacacacacacacagctcactctcctctccccccaacaccctcgttttcttctcctgcttccgtctctttcctccacggtatctgctgtctctgtttccatctctcgttctcatccttattctcaaaccctctgttctttctttttcttcttttcttttttccttgcctcttgttcttgttcttgttcttgttgttcttcatcaccacttccccatacagcccagtcaagcttcaactcagctcagtccagcggtgctggctcctgctcaacacatctcccaaaccgtatcttccagatttctcgttcggcccatcctcctttcgtccattcggctgcctctcgatctcttcgcccgacgttatcacccggcctggctttcacgcctcggtcatctcaccgtccttcttcgtttctgttcccgtcctggtttcggtctccgtcccagcagtctctcctcctccgctgctggtaccactactcgctaccaactccattttgacacgtttgaccgttccctgcctggcgtgtttctgccgttagcccttcctacccgtcctccctccgcctctcccctctccctccgcctccttcttcccccagggccatgctcgtcgctccagcatccccatcccctaggtcccctcaagtcgcgtttgtctcgtcggccttcccttcgcccgtcatgggctacaccggaaccaatcggggaagcagccggtccagaacaatgtccagaaacaggtccctcgccgtcagcgtctctctctccaaaggcgtcttgtcctctcaagtaccggccagcacctcgcccatcatcggagaatccactccaaacaaggataccctcaccggctcatccggaggcgacaacgactttcttggcgcctggtccagtttcggcctcaaaaacagatcgtggaccagagaggttgacaccccggacggcagtcgtggacccagcaccgccggtgacactggtagcagcagtcgacagtcccgcagatccagacacgccccggtcgaccctccgttcgtagaaggagatatcatcacaccctatcaacccctcccggctgcttcctcttcggcccctctcctccctgttccgtcatcctcgcccctgggcagccgtccgatcgaccagccagacggtcaacatgacctcaaacgtcttgaagtcgtcagaaggctcggcatcggttcctacgccgtcgtctacctcgtccgggaggtcatcgaccagaacgacagccacaacgatcaagagtgggactttggagaactcgacgaggacgaagacggcgtcggttccagaagcgatcacaggacctacggtaaagagtttggtcagtgtctctcttctcttcttttcctttgtcttccgttgttgctcttgcttatcttttccacttcctttctttcttccttccactaccttcgatacccgtcattctctctactgacattccgttccaaaatctggtctctccttcaaacatacagcgttgaaatgtttgagcaaacaggaccttgatgacgagagcttggagattcagatgtttgaggtcagtcctgaatgcctccgctctctttttttctttttcttagaagacaaaatcacccgcctcttgtccggtaatctgacctcttcaggactgctccttccgactcttcctatcctccgatccacttccaggctaccatccaccaatccttaccgcctcacaacaacatcgtcactctccaccacacgttccagaccccggaatggctcttcctcattctcgaattgtgccccggcgaggatttgttctactggctcgagcactctaagcctcctccggtcaaccctgcgtcatccatcccaaacgtcctgccgacaccgttcctaccaaacagccccaacaagaccgccgcattctctccagtcactgctaaacagttccacacccctgctccccatcatggatccgctccacatgcctcccatcttccggcctatatgtcttcctcccctttgctcccaatgactctgtcaaccaatcagtacctcggcaacggcggaattcctaccccatcctcctcccacatccactcatccatgcacaatttaggtaccccctcggtcgcgtacaccccgccgaccccgtcactcctctcgaccgtacccgctcccttactcttagcgccctcacgagtcaggttgattgccagtatgtttgctcagatgtgttccgctgtgcaggcctgccacgacgtcggagtctcccaccgagacattaagccagagtaagtttttttgtttgaccaatccgtccattgatctattgtgtcatatgcaaagtcaaaagtttcaggccgaaattcttaccctcccaacatctctttccttatcagaaacatcatcgtcaccgaggaaaaggcatttagaaaaagtagaggacgggttgtttgcaagttgactgactttggactggccacccgagaggctgagagcgaagacgtagaatgcggaagtcgtcgtgagtattcttgtctcaacaggctgttctgatctgcttgccgtctatcctttacctcaaagcatgcttctgaattaccatcctttcctttcttttctccttcttccttctatccctgttcacagcgtatatggccgttgaatgtcgaaacaacatgggcccttcttatcgcccacctcctgccgatgtgtggtcccttggaatcgtcctcatcaacatggttggtcttctctactcaagatttgcgtcccttgtgtctctatttgttctacctgaaacctgacacagtccctatgcctgtctatgtgatctagctgttccacaagaacccttggtccgacccttccccgacctgtgcacctttcttgtcgttccggaacgaccccaaagggtttttggccgccaagttcccaggaatgggcacggaggtagctacttacttggccgaaagagtactcgcttgggaccctgccgaccgtgtcaccgctgccgaatttggacagtgggtcgtcgatctcggaagccgactgggcagcaacaagaagaacggccacgcttccttcctcaacatcggtctcggtggcaagcaggtcttcaaaggcggcgtccttcaatttggaaaagtcgacgttccttcaaagctcaagatcgaggagattacctttcaaaaatcgcccgtgttgccccgtcggtctttggtggccatcaacccggatcaactggattccccacctctcgccaacagagctatgtccactttgactagctccgctccctctccggccttgggccatgcttccccaggatccactccttcctccccccttgcttatagtcttaacgcgttcatcaatccaccaccttccggtcatctacagtccatcaggacagagacaacgccttcgcctctctccgctccacctggtctgcctcttcccagccaacacctcgcctcgtctccagctgtatcggctcttcccccttttgccctttctaccccttcttcttttcaaatggtgcctcaggcccccagcgatgaagctctaaagaacgattcgatccctacgtcgccctcagtggccgatgcggcgatcgggtcggcagctttgtcgtcacctgaggcaccactcgctcctgtttcagacgtgacggtcgaccagtcgactatcacatccccgcacaccacggattttgagacggatcttggggagaccaacgatgaaggagactgttggtcgagaagcgcttccgcgacttccaaacagcgaaagaaacgtggagtgaggaaaggaaaggcagccctggctgctgctgctgctgccgccgcggaaggcgccagtccacccgagcagccacagcaaccggcaccgttggaaactatctcgtttgagttaggtgccgcgtcgagagatgtgaccagtcgagcgttggcgatcgcttcgcagaccttggctcgagagatgagctcgatgccgtacacaaagcctggcactgggtcttcaatcggaccttccggtggtggtggaggcggagggccattcctaccacctacaatctcttccaactcttcccctgccgcgcttttctcgtcggcgtctacaacccgagccccttcgacccagaagggagatcgagattctagtagctcgttcacagacggatcatggtcccgtggtcgagctaccgagagagatgtatacgccaccgccggcttgcctcgaatgatctctcctggatcatccattcattcgacccgatcggttccttcatactcctcaacctctaccgtcgccggacttcatcagcattcaagctcggattcggcctcttggagatccagaggtgtttctcccgcgaggtccactgcgtcggcgccgaatcctttcgggcctagccgtcgagatgccgcttccggaggaaacgccgccggccctaggaaggttctcaccgcccgacctcgagcggccgattcttactcccctgcaggtgacagttttcgaacgtctcggacgacatcatctccagccagttcgatttactcgtctggagggagtgtcagtacctacgcaacctcggccagttcgtccggtagctaccaacagagctctagaggttctagccagtattctgccggaaacaatggagttcagggagtggtcaagcggcctaccaatgttaaacgtgagtactgcttacgttccatcctctatcgaacatgttttctttgatcctgactgtgtcttctacttgtgtccttgttcctgtgtcaaccagaaatggacggaattccttaccagttagatcaacttcctcgacaacatcactttacacgaagtggagaattggttagtgttctatcgttatgtcttttcagtatgatcgttcatttcgttcctgtttctgatcaaatctcgccattcttactcgcagtctacgtccgatgacatcttcaccaaacctcgacctcctcgacctcccaaagtaaagcaggccaaggtgcatcgtcaacagtcgttccctgccgttccgaacctcggtctggacactatctccgaacgtccgaaagcactttccggcgtgaccatggcgaccagcggtaccggtggagatgaccaccgttccatccattccggccggtcggttcttcttggccctgcaatcggatcacccgcttcgaaggatacgggcacaggatcttccggaagtgtatctggaggaggaccgccttcacagcgagttcttatcgctcgcaaaagggacgataggtcaagcagtcctgctccgtctcagctgagtctcgagagtcttaatagagtacccacgtccattggaaatgtatcgtcctcgacgagatctgttctagaatccgcacctgtgcggctagcgcctttaaaggcaagtcaagagaagctcaagccaaaggctgacgatcctcctccggcaaaactgaagggccaggtgtcgactttgagggctatgctctctggtctatccaagtcgagtaagaagggaggggaatgaggttggacacgcttggcttcttttttctttcccttgtcacattggtttgctttcttccttcctcccttccttccctcatcgcggcaaaaacacattcaccttcacaaatatatcttcacttttacacatttccgtttcatgccgcctctgcccatgcttcgaaatgcctgttttgcagcacaactctcctccctcctcacatctctttgaattccactctcctgtcgagtacattatattccttgccctcttctttaaaccccctcgcccccatctctttctacactatttatcaaatgtttaagttacgttcaatttcattcaattcagatgtttcttccatcggatttctccgcattttaggccaggttttccatccagtcgatcacaccgtacgtcgccaagacgtctttgttcctatgaatgaagaaacaaacagataaagagtgacaaatagaatacagagaagaatgtcgtcgtcgtcaacaaggaggagatccaaaagtcgattggcgcgatcgtgttcatctctttccatcgatcccctttcacaaagataggttggcaacgtcaattctatctatccattaacctgaccaaggttgaggcctgacagtctagacatgatcttgactgtgacgggttggctgttttgtggaggaaatacctggagacggtgtatagaagatttaaagacacccctcggtctctccgatattcatctttctcaactagtccttatttcttttcccggatttgtctttctttattcttgttctccagtcgatctactgagacactcaggtgttttattctttcgtatgggaagcagacaacttcttgagaccgaacagaaaaagaactagacaaggactgagcagccaagtgacaggatggcattaacttttgccttcgtagacaactagcctgaatagctaagtggttatagcgcgtcgcttgtaacgacgaggtccgtggttcaaatccgcgtttgggctttctttttgatcatcttttgcatcactggttttctttttcccttcttttttcccccctcacatacaaacttttcctggcgcccttgcagtcaaacatagagcctctatcttgaataggccgcactgactagaactgtactgggacgtttgtgatgagttgtgtgtatgtgaagggcgactgatgtcacgtgtgccgaaccgatgcgtcagtcatccatcgttcgattaaccctagcacgacccaatttcatttccacagggcttgctttctttccttctttctttcggactcttgttggagacggggacggaagagtcccagggtgtgctcttatacgtctgaacaaggcttccatgcgcttgtttttatcagaagctggagtcgaggtgcctaagagttctttacgccttcacgccctttggcttatgtccaagtcatctgtgtcttttccgaaccggtcagagaccgctctggttcaacctttagacaacttaaaaaacaaaacacaataaacaaacaacaaccaccaccgatcttatttcttcgtctgtccgcacatggatacccgcgtactttgactgatgtttcatctgagaaccaacgggagaggggtttcttcttttctctctcgttcagagttgatgtggacgacgagaggtgttcgtcaaggaagaacaacgaaaacaaagtctttgcgcctgatccaaaactcaatactatcgatgacaatgatgatgatgatgaagttcgcatgcctgacgatggcaacgttgtattccatctattctgaacaagcacacctctcagggaaagattcttcgcacgggccatattcccacgccaactatcatcttaagctttcatgactgaaatgttatccaagagggaaaagaagggaatgtcgacatgtgcacttctctttatctttctctcttactaaagcagtagctcagacaaacgtccatcaaatatcccaaccaaaggacactcaaaagacaacgacccgggattcaattactcatcctggacgacggtggtcttctcgctcacgtacaaaccatcaaggaactttcggatatccttgttcttgacaaggcaagcaccgtggatggtggcacacgactgggaaacgttctggatatcgttaccctcgatgatgatctcgtccttctgaaccttggactcggagatggtgacaccctcgagcatagggatctctcgcacgatcttctctcccaagaagtttcggatggagacagatcgtcctccctcaccgatgatacagttgatagggaaatgggcgtagacggctcgcatcttgtagaggaaaccctgtagaatgacaagtcgaacataatcaacggtcagcatatcgtctttgatcaagttttcaagctagggagtgatcgagagcgaaccttggtaacaccggtgatcatgttctcgatcaaagatcggacagttcggaggcaagcaaggtgctttcgggctccgtgccagacggcaagggagacaacgttggaaccagccttcttggtctgatggtcataagcaagcgaaggaaagagaaagcaaaaggagccagatggtaaagatacatcaatctctggtcttctctgacagcaagattagatgtggacgacgtacgagctggatatccatgttcacgtgtcgaatgttcttagtgagctcaccccggggtccggagaccttgacgatccgggacttgatagccacagtgacaccctcggggatgacgaaatcttgagacttgacgatatccttcatctattgaatccaacacaatagcaacaaggagagagaacggagatgaagcagtgattgggggttgcgaagtgggtattcgggaaagatgaacgcgattgcagggacagaaatggaaagttttgtcgcgaggccgacgtgaaacgatgggagggatggggaacaacaagtagaatcgagcgtagatcgttcatcagagttgaaggttcccagtgacaaagatagaacgccagagaagaagcatagaaagaatagaaaaaccgaaaccgtcagtgtactgtgccatgaaaagaacaggacagctcacaaagccctcagatccgcacaaccatccagccagagttctgtcatttttcttcgtatatcgtgaatccattccagttcgtctgtcgagaggcctgcctctgtcgatgtcgatcttctcggtctgactcgctgaatccaagtaattctgtcggtgcccatcgggcttcccacccaatgtcctcactacctctccccgtactacctcgctcggttttcaacccattgctaccgtactaggacaactagtctgccgacgaaaatttcccctctcctcatgattcctgcaaagaagatacagaactggcatggctggatatgtgcggactgatggatactgaggggcttggggagctatttccaaacacttttaaagggttaactaaccttgacgagaaatacaaggggtcggaggtgcaaagagaaacttgacaagacgaggtggaaaagccctaaatttctcacccagccgagcgaacggcgggcgggcagaccggcgagctttgttacgcggcacgcgccatcgatggttatgcggcctgagccttagcaagtctggtctcaggctgacgtgagctgccaacacatggaagctgacctttatgtaactataaaagtcatacgcccattgggcagcggtgactaaccggagatcctccaaatccatcaactttctttgctgctagcgttttccatcaagcgtggtctttggttgtctactgttgaagccaatcgtgggatagttggtataccagtgggttctcgtcctgcagtctactttggttagtacagtctgcttgctttctctccaagtcccagctcttctatcatccgtccgctcctctgtttgcagaagcgtctttctatgaagatactcttaatttatcagtaacacgggaagtctttacaaacttcagagtccttcatctctgccggtggttcgttttgaatttcactgggtatcggaggggaaggactcgtttcgtgtggtgatctaccctacattttatgtcatagttatactgagaatttcctggccgccatatatccttcctttgaacacatcgagtttgatttgtagaagctgccgttgctgacctaatgtttctcttgttttcgatggttatagtcatccgatcttctgtcctttctttcctctgtatcatatatgatcaatgaccttggtttcaattgttttggaatgaacttgcaaatcatcaagttgccacacattcgcctagaacgaggcttgagagtttacacgacactagaacagattaattctctttgaacaaacatctcacttcttctcctcgggcaactcgtttcatgagcgagagtacattcatcaatgagtagttggcgaatcagtcgaccttgttcgactttccccgtctctctgaccccccatccgccatctgtatcccagcccagattaaccggatccaactccaaccgagacccagagcgcaatacacactcgtcagcatcaacggtaagaactccatcgacccctcctttgagccggctgaaaggagcgggttgatcactgattggaacagaggaatcagtggcagaacatagagatagatgttctccgccgtatggacaaccgtcgaagatatagtcggaggtggccttgagtatggtatgattgtcgatcacaggccagcaaaacaagtcatgtttgttcgagttcaagtcagaactattcttgaagaagcacaagaaaaggaaaacctaaactcaccgatacacaacccgagagacggctgcgaacgtgatcaagaaccacagagcagagtagataagtttgatgggtgtttctagattacagaataaaaacacgcgtcagcgcatcgctcttttctatctcgatcataccaggaatgctaccccagtcgtacacacctgaaggagtaaaaagcaaaggaaaaagggatacaatccctgaagcagatgcaatcacgaagactcggaagaacgcatagttctcggttgccaggaagctttcaagtcgacggaggaagaatatccaatcatctgttgtcagctagctgaggactttctcaacggcgagatgagtttctttcggcacatcgaactcacgttaaaggagtcaagaataacaagacggccttctcatggacatgccagccgaacaagaaacttgtgaatccggacaacgtgagagcccacacaaatgttttgtacgttggggatctccaaagttttaacgagaagagctacaatttccgaacaggaatcaacgcagattgatcagagtggacataaaactagctcgctcatcccctcaagtatctatggttcacttacaaactgaagagctaccgtaatgacaaaactaactcacgcagacatcaatgaggcgcacaaactgcacattagaaactctgatcgtttgaggtctaccgcgaaaagtagccctcaagacagcacataccaatggataggcttgacatctggcagaacggcaaacacagtgtctccaacgaagcctcgggtagatgaagagacccccttcaaatcaacttgtaatttgaggccaaccagatgaccgactgagaggaccaaaccccatattgtcagatcgcttgcactaaagctcagcctcctcgcacgtttggacatgcaatattcgaaaggaagcgggatgacgaacacttcaacaacgttcgatcgaaaaaggtgacgagagcccagacgttcccagcccaataagcatgattcaagcctctggtaaaggggaaaagccttttcccaagctgaggaagatcacgcaaaaagggtccgagagaaacgaagaagacgaaaaccacaatggatcccagtttgatcagatttcgaggaagaaatgcgcctatcgaagagtgtagaagtttccatggcataaacttagctcaaagacaacagaacgacatatagcgtaacggacactcacggtttgaggagaagcagtaagacctgagcaagtatacaaaatacggaggcgcaagatatatgtatatatgtctatcagaccacagaatcacgagcgaatatgggtgagtgaaagttagtctctcagcaaacacaacaagatacccatataatagaaaaccttccgatcgtcaaacaggagcttacttgaagttcaagaggacagcaaacagggcagctccggccaaatggtttccctagaaatatccaaggaaaagagctaaatcagatggaagtcatctcaaccccaaaacaaagctcgaagaaaacttacctctttgataaaccacatgctccagattagtattccaaacatgaacccgttgtactgcaatgaatagcacagccttcagtgaccagcacatagcaaatcagagcgcacaatccgaggcttacttggaaatgaatatgatcaacgatcaagaacgctgggtgcattaatagagaagcgcataatacgagctgtgtttccggatccttcgatgtgcgcacataactgttctttgaacaaattggaaaggtcagtgccttggaagatctactccttacatctcctcctccttgtcaagagatttcttcatcctgactcacgccagtaatgaagttccaagaaccatagactcagtgacaatcacactgagtcgttgaaagatgatggtcagagggctggcataaccaagattggccagttgtaccatagctggatcgacaacatatgccaggttggagaggaagtgctcgaaatgggcaaagaacggagggtagtccctaaaagcaaggagtggatagcaaaccagagtaagagagacttgatttcaacccaaatacactctgacgtatgaatgcttacagagctagaaatgcaaaggccgtgatagatgatcagctctacgtccacacaccaagcttcacgtagatagactgtaggcgctcactccattctgacgtgttctgagtgatacatcgaagagaaccgaggtgcatgagcacatcttgatttacatacgtcaaatagagtcctgaagctcacatcataataccattgcaacaaggggagttgatgggtgattgccaaccaatttcgatgaacctcaaagtcggtagatctactgaaaatcatgtattcaagcagaaaccaacacgtttgaaggccatatagagtcaggttcatagggttcaagtctatggagcagctggtgctgaaaatgcttactatgatggaattagtagaagttttatgaagctagaaaggacaaatatatccttctcggctgaagaaagaagaaacaacgaggcccatcttgagcgagatttggaggacgaagcggaaggatgaggccttgttgtagattgagctgccatggctgatccgagaagcaaagatcaaagggccaacccagagatgggagctggacacacacacacccaggagatggaaagatgatggttgagaaaatggaaagtaggaaataatcaacatcaagtttcgtccttctccgacgaccatctacatctctccgttgcatcatccgagccgcctgatctgggcacactcgtcaccatggcaccgaataagaggaagactgctttctctaatgctgagctagaacagatgctctctcagatcaccttagcatccccagcatctcacctctccgctacatccaatactgagaactttgaatccttgggtcccctcgtccgaaatcttcaagcgctcaatcaacaggatgtcttccttagctcactcaacaggctcgtggaggacaaagaaagagagatcgaagctgtgtgtgcagagaactaccaagactttgtaggaagtgtaggtactttgacgggcgtcaggaaaggtacgggtaatctcagacggagaattgcagagctggatggagttatgagtgatgttggaaaggatctgttagaaaaggtgggtagcccctcatgtgcatagtctggcagcgttctcagctttctcttgcgatcgagcgtgtgaaccatcttgtgtatctctagaactgctgacgcgatgctatctatgcttatttcgttcatactgcctgccatctagaaaaaagcacttctgaagcagcggaagatcgccgagaatctagactcagccatcgagactctccaatcaagtctgcgtgtgttggatctcgttaatcgaattgatgggatgatcaaggaggaaaagtgctggggcgctctacgagttcgtatcctgttcctcatctggttggagcatactgccattgatatgtactcatatatatactttgtctcaacctacatacacagtcgctggaagacatccaacatctacccctacctccgacaccgtttctaactcatattctctcgtccttaccctcactccgcgctcagatcaaggacaaggtgaccgcgtcacagaaagcatggttgttcgagattcgagagaagagcgggtatgtcggcgagctcgccatagaggaaatggaaaggaggaaaaggagatgggcagccagaagggaccgagatctgggcgtcggagtcgcacaatgggggctcggaggagtaggtggatcgggaagagtaggtggagccatagaatgtttgatttacgaaaagactgaatgtgagtccatttggcgcatacgcttatcacttatccacaggctcgattcataaagacaatcagaaatagatctgataccatggtccctcctctctggtttcctttgttctgttgtctggatgcctcgtgagagataacagttgatccaatcgaggcagcctcgatcactttcaaaccactctatcagtgtattcatatctacgatgccttagatcttcgaggagagctccaacaaacatatggacaagatcgacaggtatgctcttcaatcaattcatccatggggtgttttatatcccaagctgatcatactgtcttttgaaccgaatcggaatcgtcatagactcaagcacacctcattctttcgcctccgccacatcctgttcctttagaccagctccttctttcattgacacgttctatcaccggcttctttgtgttggaatcccatgtactacgatctgcgccaaaggattttaggtctcagagagacgtcgactttttatgggatgaggtttgcagaggatttgtgatacgagtggagagggcgttgaaggaagagcgggctggacgaagagagcttttgagcgtacgagactgtgtgctaagatttggcagggttttagaagtaagtccagatatcgttgtctatgactatcaatagaaaggtcgccacaaactaatttcaccctccttcgcttgacagagttatgattacgcgatcgatcagctcacgaagctgctgctggatatgtttactcagtatatcgctttacttgaaaaagagttcagcgataagtttgacgaggtcagaccattcagatccatcttcttgtgcaattacgactttgtattcactctgcttcgttcgtgtttgacagataatcttgaatgatgattatgctcctaaaagagtagaccatccagaagcatttgaagagattactagcgtttgctggatgagtgatggggcggtgaagactctatccaagtgagtgcatcgtttgtagagtgaaatgagcttatcgcttacctcctgattacaacggtcgacgtgggtgtcgtttagtcaggaatatcctgtcacaatgcctttttcaagcagctatctatcatgttgcatatatattcgagaatttgtcgaaagattctacaattttgttgatgatttgccggatcatgggaaggatattgacgcgctgctccgatccgttcgtacttctctcgctctttatgcggccgtatcaagtcttgtggacactagctaatctcgtagtctctactacattacacacatcgtagtcgatagatcgtatcttaaccaatcatgtcagcgaaagcatagctaagaaactggaaggaacgaacaacttttcactcatcgctcagatcgtcatcaacttggaacatttcgagttggcttgtgaagaattgaacgtcgtgcttagcaatttaaggttcgtttctagtcgtatgtcaactggatttatccaaccaactaatctttcgattgtcatactttcaagattggattctcgactgcctcagatcaagttatcctctaccggatctttgtctcagacgctgattcaagcccaaggcaggatatccgacttgctatccaagaaactggattccttcttcgagctagctgaaattgacttcacaccggaccgtccgaggaaagaaggtgaatgctctgagtacttgagagaaatgatcggcttcttggcgaactatgtagattcggtgcttagtgggctgggagaagaaggtaggcaagggacatataggggcgcctgcaaatacatctgcgacacactgatggtcagtattttttgatatatatatacatcaaatacctcttgttcatcacatcttcttctcttctactgtggcatgctgactttaaattcattcttgtttgtttctgtattcttctggcaaccagaaatggctgacggggctcgattttgcgatgttgaacgagaatggccttcgggatgttttgttagacatcaagtttgttcagacagagatgaagagacttggcaagatggggctggaagatgtatttgaggagatcaattcagtaggtccttttcaacgggttgtcttacgataagctcaactgacccgatgatctctttttgtttactattcctgcgccggctaacactaaatcagactgtcagcttggtgttttctccatcgctttcgaaatacatccaaaatccaagattccgtccgtcttatccggctgtcagtccgcaacgactgagtgtgattcttcataaattaggaagacacggtctaacccttggtccgagcgcaggactagagtacgaaaaaggattgcgtcgacggaatgaagcagatgttctgaggaagttgccgagcgggatgtttgtaccttctggaggtcgatagtacgatttgataaagcggatacgttccaattgaggctctcatcaagagagatggtacttgtagattatgtgcgcgctgcgacaatgataccttctgatttatgaccatacgacttgactcgacattctgtgactttacttaccgttcagtatacatctatcctgaattatgagaattttgttgaacatatcaaggtggataagatcaatgctaccagagttgacgcaatattatcccgtgttgcatggatttttcttaccctgcgaattcagtacggcctaggaaatggccccagctgatggtgattgttcattcctccatccatcacctatcgacgacgacgacgacgacaacaacaccaataacaaatactctaacacagagacagagcagaacaacaggaggagtgactgaaaatatagatagcctccgtacttccatcatgtcatccactctcttatccaaatcctcccgggacaagatcgagaatctcccggcatatcgttcagcatcatcccctgtagagtatacaatgtcccagctaccactacacgtcaacctccctggtaaccaggcggcaaactttccgaaagcgttcaacccagagagagctctgctataccagcgggctatggctcgaagcttgcctaagaagacattcttgagcaagtgcgtcacgttggctgttttcgcgacagtaggaggtgagctggttttcttcgcttataacttttatctgagagataccaatacatggcgaagtatggctcttgagaacgggaggtgtcttgatgagcggggctttgtttcgcattacctgtgttctcgacaaggcaaatctgattgacgcttatattttatctaacgttgatcatctcaaccagcaatcgcttatcatctactgttcattgaggattacggacatgataatgtcatgtttgctgaggtatgtctgctccggtttgttttgtttggctggagagagctaagctcatctcagcgtctctctcttcttttctcttcatctgcatctttccgcgtgaggggggttcatcaggctcgaaaggaaagactccgccagatatctctaaaacgacctctcacagcgaaagaacaagctattctagaccgacctgctatagagactcatgagctagtctccgacgtcagtttcagtgacctcttcaggcgaatgggtcagcgtttccgcgatcgcgaagaagatcggctggctcgacaggatgcttacaagcgcaaaatcgggctgctggatgaactcgacggcacgtcggcagcaaccgttggtacatcagactctggaaccggcttaaattggcagcggtatcagcgaaaatcgaacgtaagggaggcattacctgaagatgtagagtgggataaggtcaaatctctcaattgaaaactcctcatggtgcctttgtatcaaccaatgtatatgttgtaattttcaaggtgttgtcataagacacaacggagagaacatatatgtatctctgcagcaaagatctaaacaagctgaaaggcgcacatagtaatacatggatcgtttccttaaagatacaacgccaccctctccgtttcatgctatctacctcgaagagtcgatcacaacaacacgactaaatcgagtcaaccaaagacgttcacctgatcttacggctaccgaacccgccgaatcccatcattcctgcaattccttcgtcttggacacccatcttggccttaagttccttttctcgcttttgttctttctccacccggatcttctgcttctcggcctctcgacgttggtcttctaatcgagtgacttccgccagacgtttttcaaaattgaagcgtttcgattcggattcttgagatgtctgcgctcgaagaaaggcaatcttagctcggacttgatctaatgtggaccgagcaacctgtgtggtctgacccaaacgacggaggtctgcaagacaggcaagaaagagaaaccaggcgttcattacggcgtgcagtagaggacgattctcaatcaagaaccgagtacctacgcgttttaccgttgacatgactcagataggcgatcgaatccttcgacactctcttgcaaaggtcacagtagaatccgggttggccagctccccgtcctccggggttattgacgaccatggtcttgttaaggttgttgtcgatgccaaggtcatgagttcgctgttctagaagtttggtcggtttgggaagatctggctttgtacgaggagctttctttcctgatgatgatgatgatagaggataaacaaagaaaactgtctagtgtttgaagacagagtagacgagaagagcagcaatccatgtatggagaagaacataccttttaaggcagcctcctcatgctccttagctttatcaaaagcttctttgtctcgttctttagctctctctttgaagacctccatgtcccactttccatctctgcccgatgcattctatgtacacccgacgacgatgtcatcgaagaaacacgaccatatcgaagggagaggttagacactaaccataatccgacgagaatctcacgagctcacctcttgtttgccataagctcctgttttttcggccatactgaacgcgaatagaaggcgattgcaagaatgaagagggacggcaagcaatgtagatgatgccgatgttgatggaggaagaaagaagagaagaagcgacgtggcctcgaaatttcgaattcaatcttgaactcgttcagcactcttcccatccgactctcttacttactcgtcttcatcggcactcaaccatcgtctcgttttggatggctcttctttttcgtccatcgtcgtttcgacatgcagcccatctcagaccaaacagggctatccatgtaacaccgttttgtcggtttccacccaaagcaagctctttagtccctcccacgacggatatctccaggatcaggaatatcgggattttcgctcacatcgactcgggaaagactacactaaccgagagtgtcctggttcattctggatagtaagtgaattcttgtttagcatcaaatctattgggcgctgcttgttgaaactggtttgacttcttttcttggtacttacagtattcctcatcctggcactgtcgatctaggaacaacatcaactgatttcttgccggcagaaagagaacgagggatcaccattcaatctgcttctagtcagttagcatcacttgagacttattcacgtcgctggctctcacacagactctctcgttgtttgatcttgtctagttcccgttcagtggtcgaatcataccgtcaacttggtcgacacgccaggtcatgtggattttactatggaagtcgagagagcagcaagagtggttgacggtgctgtgattgtaatggatggtgtcgaaggtgtcgaaggtcagaccgaaggggtttggaagcaactaactcggtaagcattgatatctgtatactgtctgtctgtctgtcgaacaccgttcacacctttcgttcttctccttcatcgacgatggactcttcataaaccaagatacgacgtagcaccccggattctattcatcaacaagcttgaccgacctggcgcctctctcccacattcccttacatctacacaaaatagacttcacccattacctctcttactgactctgccaatcaccactttggacagcaagaacggcaaaggtggagaacctggcattgtcggcttggttgatatcgtcaatggaaagatatggaagtgggaaggaaagaggggagaggaagtgaagacagaatcgagaatctttgacgaattcaaaggcgatggtcagggaggcgagatcttccaatgggatgagccctcacaatcatcattaaccggaaagaagaagtcaaccaccgtttcgccttcgtccactgcatcttcgtttcttccactcgatcatcccatcaggcaggaagccattgtcgctcgaacagcgctgatcgagaccctctcgacgtatcacctaccattgcttgaagagtttttcgacatcccctctccaaccacctcgattccctctcatttgctgcttccgccttcctctctcaaagcagcaatccgagcactcactctgcaaggcaaagtcttaccggtcttatgtggttcagcattcaagggcatgggtacagagttggttttagatggcgttgttgattatttgccttctccaggagaggtggcgcctgccgcgatagtaggtggcgatgatcccatcacccttccgtctgattcagaaaccaaatctggtaaagcggttaagaagaagggcgcgcccggctggaaaaacaagatcagaggaaacaaaaccgcattaatcaacccggagaagagggagttgttcgttgaagtaggcgataaaagggtggtcgcgttggccttcaaggtcgtttgggacgatatgagaggatggatgactttcgtgagagtctattcaggtaagccaacgtaatcatcatacggtgtatcggtatttgctactgattgcggaggtttcaactggcatatacatatatat

SEQ ID NO: 1054 - DNA, 11479 bp, Xanthophyllomyces dendrorhous
tacatatacaggtaccctcaccaaagaagcgctctttaacacgaccgttgatgaaccagaacgaccctccaagttactcttgttatacgcctcacagcccattgaggtcaactcccttccagccggatcgatcggtgtacttctaggattgaaacacaccagaacaggggacactcttctttctgccaacgatcctcgacggctgccaccgacgccaacccgtctgcgaggagttgagatacccagcgctgtatgctcggtggccattcagatcggaggaaaagaagaagaaaagatcgtcggcgaagcattagacaagctcgtccggcaggaccctagcttgcggttggagcgaccctccgagaacgaagaggcggggatggggcaagggagcggagatgaaggtcaaacacttcttcacggaatgggcccgcttcatctcgagatctcactcaaccggttggatgaggaacacggcgtcaaggttcggagcgggaagatgagggtgtctatgaaggaaagtgtgttccctcagctgacggaggatggaacaatagaagttgaggatacatgggaaggaacggtggttgggcttcctaacaaggtagaggcctctgtcaagatttcaattcaacgactgtcagatcaagagctgtttgctctccgagcttcttcgccttccgtctcggccgacatcaatgaatggggaggaaacgaggtatctatcgacatagatccggaagatcccctatatgcccttctgccatccatcacgtcttctctctatgcgtgcatcactagaggaggccctctgatgggccttcctttttcccaccttcggatcagcctcgaaccaatctcgcccttcgccggacaactagcgactgcagataccttgcctacctcttcctcccccaaagataaatctgggtctccttctccatccaactctggaggagctccagcatcttctctcccacctcctgcagcttacgctcgagcaataaaccaagctcttcagaaagctgttcgtctagctggaccgacagtcttggagcctttggttgagactcacatcacaggggtcggaccgacagatctaggtaaggtggtggctgatgtcgttgctagagggggtacgattcaagaattaggtgatgaggccgatgggtcaggttcaccttctgaaaagatagcggaaggagaagtgacgtatgtgccgcctggatgggtctctccttcagcctcggttgacctgctcctccaaggatcgtcggcggagaaggtaatgaaacggacaattgtggccatcatcccgctcgcagccatgtcggactattctggaaaattaagaagtttgagcgctggtggaggaacgttccaaactcgagacggcggttggggcgaagtcgaggttagcgtagtaagaaaaagagacgaggaagattgatcggtgaccgatcgaaaaactgcaaattctaatctatatatgttggaagtaatccttctgtttcttcctcactcgttctatgcactccttgcttgctagttcagaagattctgttctcttcttgaggatcaacatctatgagggttagtaaaaaagagaacggcaaagacgacaaagagaattagataaagaagtttactagctcgtaagcatcatcagtgaaattcaagtaagagtaagctgcccagtccttattctacttcatctcctctgaccagctcggatagaaacaacacttccgacaataccaacttggtttcctatcccattgaatatctccatcacatcttagagcaaagtccacacatattaaaccgaggaaaaattgagaggagcggcgtgacgtctatttttatttttcgtgtcagaagtcatttatcatttagagaggcttggccgggatctgggtgaggaggactccaaatcgcttcttgatctgttgcagaagcgtcaaacaaaggcaagtgagatatcgaaccaaatagagaaaaacgctcttgaaccgagcggtataccacccgcaacgtctcactccacgtcaaaactcgagaaagaaaggatgagagtagacgaacggtgactcggtgtcgggagaacttgtcatcaggagagaaccgagctgtcgaagaggaggataaatccaagcatacacgagtgagttttcaaccaggatgcgtccagataaatagtatgatgtgaagagggcctgctcaaaacaaacgtgatcacttaccagggtgtgccgacttggcgactcgtccggtctcggtcactttctgtatattcgtgcacattcgtaacaaaacacaaaggggaagatgaacaagggtccccagaagggaacgtttggattgacctaggagataggaagaaccttcaaagtgtagactctaaggtcggaaggacggattgacgattagttttagaacctcatcatttgtttctcgggtgaaaataagcaagtgaaaaaattctttcaaacactcaccgcttgccatccggaccaagggtgtacataagatgcatggcgaaagaagggtttgaagaaacaagagtagtcgagggagagaagggcgatagttatcaagtagagggtcgttagaaggtgaaagcgaaaagcgaacggtgcgagaaatttcatgacttgtgcgggcttaggcgaaaatgcgcagcactgactactacatcaggcgtccatacacgtacgtatccttgctacaaacattggacgaaagcgaccatgctatatcgtagagagttgatgacaccacggtggctccaaaaagatggggacaaaagcgagcttatggaaagatccaagagaaggagaaggacactcgatctgagaagtgattatctgcagagtgatgcccgagaaagaccacagttgcgtgcgcaccagaaaggaagaaaagggagcaaaaacaaaagaggggtgtgtgtatatatctgtaacgggtatcgaagaaaatgtttgggggtaacaacgtagagcaaagtattcgtagaatggtgtgggcagattgtagtagagaggcatcaaaggacaaacgaaaggaccatgcaaacatatataaagaaagaaagagaaacaaatggaggggaaacaaatccaaacgatataggagagaaggcagaaatacaaacaaatacccatcgttcatctccaagttccagcagaagttgttctacctcttaagctgctcgccagatcaaaagttcctatcgacgatgctgacgacgccgctgccgccgccgtttttgacgctgttggcattgcatagctcggtatcggacccgctgtaagcgccaacgatgctctaggtcttgcatatgacgttgctgtcgtcgacagcgacattctggtcggtcttcttgctgaacttgaaggtaagcttcccaatgcgcctagctttcttggcgagttccgtccaccgccgatggcaataccattagcactcgtcatctcggtctgaagcatccgacgagctccgccatcgagagcactccttgaggttcctgttcctgaagatggagtgatgaagtcctcaatagatggagaacctgttaggcttgatcgaccagaccggctcttcttctcatgtctgactggaccgatctggccggaaatccgacgcgacttgggcgaggaggttgagagtgacatccgatggcctgctggccgaccaggggatttcattcgcctgatcaagtttgacgaggaggatgccttggaatgatcgtgtgaaggtccactgcgacttgcagctgctgctaaggtgacattaatccggtcggttaccgacgcgccgccttcgcttagaatctgacgaccctcattgggcgttggcgcgcgcatgggagacaaggcaatttcgttttcttcggaaagagatttcatgttaggcgatcgcgaggacttatgaaggtgattcgtccatggggctagttttggcaatgcaggtgctttataggatgacgaggatgttgaggaagtggagcaacttgtggtagaaggagccgttgatggcagtagtggatgagaagaacaagattgggcaggtcggacaggagggcctaaggacgagcttgggggttgtccgtccggcttgtcatcttcccattctgcgtcctctgaggtcgtgtcttcggtgaaacttatcctcgtcgcgtcatcgatcgctccctctccggcttcgtccctccatctgaacgcttttttcgccgattcttttattgacggctccctagcaacgatcccgttagcggccgaccttgccgagcgaagtggggacattggcactaacggccttgatgtcttgagaaggcccttccggggggaggacaacaccggtctcgaggatagagaagcccgaccacccatgagggaatgccgagctcgaagaggttttgctggcgaggaaggtaggctgggtttggaatacgaaagagattgacggcggatggcagttgaagccagcggagcgtttgacaatcgacgcgcagtggtagcttgttttgttgctgggaacgaacttggatttggggggttggataaattggaagagggtagagtgaatgatgaaatcgtaggcggaggtgctttccaaccgttcgtgaaggaagagattgacgatgataaggtcgtaattgaagaggaggccattgatgttgccgaaacagactgaacctgggcagcatcggacgcgatcgatctcaacagagactcccagatggtcgtgttgagctgggcagcatcccctagggttcttgcagcctcggcgacctcagcaacctctggatctccgtctccttcccaagcgattccagccttgtcgagctttgcctttgcatcaaccatagctgttaacgacctagcaaacgcccctgcaaacgacgcgacccgatcggcctggttttgaagaatttcaatcagcttaccctcccgcgcgcgcattttggcgacctccatctctgagttgcataccgaggcggctcctctgacggtttccacactcaggtcatctagcttgtccaaccgtcgctcggagaccgctcggacgacaccttcaaacatggatgcggatttagaagccgactgaagccgttgctggactgaggccgaccgaagaacatcctcatctggacgggacaaccgctgaaggaattcgcgctcagcaagcatgaccgggttaagcgtgccgggcgtgcggtcgatatcagccagcctagatcggatgggtcgtagctttgcttcggtggcgaagatgacggcctcgcatgccgcgccatcaacgatgtggtcttttgtctgtgcggcttttgtcttgacgtccgaccgggctttgtcgacctcgactttaatatctgctcgcttccgtttctccatcgtgctctcgtctgaagccttgtcttccagctttttctgcagtgtagaaaccgtgtgggagagctcggcgatccgttggacgtactgcttgacgtgagtgttgacattatagagattccggctgacgtccgtctttatctgcttggctcgattagcatacttgagggtgttttgtgtgtcatcaaagtgaactgaggagggcgagacgcaaacgatcatgcacgtcttgcagtttccaccgagagaaaactcgagcagtcgggtgagttttgaatcccggtacggaatatgtcggtttcctcgctgacagagcgcgttgatacagttcccaagagcgagaagggacttgttgatggacgagccttccttcatccgggcacctaggttggaggttgcggcagcgcgctcacttccggcaagatcgatgatggataacgtggcgatggtcatagcgctctcgatgccggcctctctcggcttgacgacgacgttgatctggagaacggcatgtgaacgcgatgatgtcttgttcgcgtttgtcatctctgtccgtcgacgtttgtttccaagttcgatagcctcgtggatatcttccgggttggacggtcttatctcagtcaggccgggtacgctgatcctagacttttcatccttgcggagggcgagtccgttccggggcggttccgcgtcggtaagaaggtcacgaatggtctcgttgtatatctcaaggtatgaaaacgaaacctgagcctcaatcttatcagatttatcgtcaatcagctgaaacagatgatccatcgtgagttgtatgacccccttgtcgcgaagaaccttccgaactctcgaccgaccgtccaagggatctatccaagagtcttcatcatactggccgttgatggtgtgtgtcttaccacaacctgtcgcctagagaagatgagtagagaaatcgtgagaaaacagctaaaatgcccgaagatgcgcagaacactatcgacgagccggtcttgagagaaacactcactccatacgcgaaaactgtcgcattgaacccgtcaagaaggccgggaagaagcggaagggctgtgttctcgaagacttgctcctgagtggctgttctgtcaaagacacggtcgaagcaatacctgtttttggtgagtagatggaaagtatagtcaagtgagcaagtttcttattgacgatcaagaacataggcaggatcaacagaaacgatctatctaccgagcatctttgtaccgacgacctccagaggcaccgaggcccgaaccgaatcgagcaatgggattggtatctggagcgtcaaatacgagtgtccgatggtcgagcacatctgagggagtacaatagtaaaggtgctcaagttaacatttgggtgcctctcttaatacaagacatgatatccgttcgatcgactaggaagatataggatacgacaaacggaacgtactgataacctcgccaaagcctctgccaccgtgaccaaagccaatggagacttctttcctaggtgttccttttccggctaggaacccatcacccaagaaggtagttggctggctggacgggatacgggcctgctcggcttcgctcaacggtcgtacccggactaagaatcacaaaagaaacagaacgaaagagtcagtcacaggtctgagggtatactacggatgagactgtgctgtgagatgaagagaaggatcagagcgatcctcctcttcagatggaaagtgggtggtgatgacgatgatgacgaagaaaccgcggtcaatgcacgcagaaacgtaccggcgaccttgatcgaattttccgacatgagacccttgacttaaggccgagagggagatgtcgacaggtgaatgtaagtatgtctgtgtgtatctttgagcgttgatcaaaggagagacgaagaaggaagagcgtgaggttgatagttgaaagagtggaacaaaaaaatcaagaaaagaaaaacaggcgcgtccaacaacatctttgttggatggtcgatggtgaagacgacgaggatgatggtgaggatgatagttctctttcacagactcttgcagcatggtgttctcatccaaggactcttagatatccccgtcgtgtttgccttccctttcgtgtatgcatgtgttgctggttgtgagaacgctcatagaataaatgtattctcacaactctcctcattgccatcgacgatggcgaccctgttcatcccgttcagggtgtctctatccctcagctgatagacgaggagagccctatcagtccgtactgctgtatataatttgtgtgctttgtccagtttccataattcttgtccgacagtacacgagaagcagcgagacaacacttcatctcctaaccacccaatgtattaccccggccggtaaatgcttgaaaggatgatctaacatcaccctttcctcccgtatttctcccatccttcacattatcttgattggatctagctccagcacgttctccaaggtatccctcttgaatgagagcttgtcgaagatcatcccgatcagcgtagactcttcgggcgatgacccactggatccagctcgatggggtctcggcgagtgtttggccggcgtgttgcccaaaattgacgatgtacggagacgatgagtttgtcgatagtactgttcgagtggatgatggcgtttgggtttgagtacgagtatgagcaattatccgagacatctctagattgttggcgtcgtcggtttcgccgtcgatgttgttgcttgtcggatgttggcgaaggaaacgaaagtcgcctgttcaacaaccatcactcattcaccatcaccatcaccatcgatacaatcactcacccactcccaccaggtcatgtctggaccgcacgagaaattacttcgccatgaaccctcctcgccgtcgtctccattcatagaagaatctgtacaagaagacacatcgttcgaccaagaaccggatagtgccgtccctcagagcttcctaattgagcaaccgagcagaccagtaaatcgtcagcctgctcctgcttctactctcctacctcctggtcctccttttggtggtgttgagactgtaaaagcggaaagcatcacccctctcactttcacaaacgctccctctatccctcgagtgaagccggtggaggccgttctgcccttcccggttactacgcccttgacccatcatcatgctcacagccggcctcgtccgggctccccatcctcgactacatcctcatcctcttcgactatctctgcctcgacttcatccgcctcatcgtctcctcgctcatcgttttcccgctctccttcatcttcgaccaggcttagacggatacatcaatcgtcttctcatggtcactcagataaccatcaaaggaacgcttcgcttctcagtccgaagctcgatgcgtacgagaaagcgttgtgggactgggtcaatgtcgacgatcttgatctgttccttcaagatgtatgtcttttgttctcacacttttaagacgagatggtttctcaccaaacattctctttgctttgtacaaatcaactcttcaaggtgtatgagtactataaaggcaacggaatattctgtatcgttctctccagagccctgaacttgatgtaagcaaaactgaatcaagctcaaggcaaacaatacacgataagctcatccgtccagtcatcttgcttcaactcaacatgatgatctatagtactgttggctttgttgttggcttctctactttccttttgcgctgcgtagatttctctctattgcgcgctagagaaggtgaggtgacgtctttagaacaagttatcgttccacagtgtattgcgaggtatgcctaggtttatcactttcatcaattctctcattggatcctcatctcattctgtccattcatcctttgaaccacgcgtttacctatcagatcatctggaatcaccctgcttggtttcgttctgttcggtgcattttacatctggcagattgtcatgtttgcattgtcaatcaagaatttacgtgttctatccagattctactctcatctcctcaaaatacccgacgtgcgtttttctttagactatgaaatggtcactagagtttataagctaatcctccctcttctttgatcaaatccgactcaagaccgacatccaaacggtctcctgggcagaggttgtcacccgaatcggtcagattcgagaatccaaccccatcacctccctatcgtccagtgtccgtcggacaacaactggaatgtcctcagattcgtctcctctcaaactagacgctcatgagtaagatctcctttagtgtggttctttacattctttttcaaaaatttaatcaagtctgacgactcaaaatacctatgttcgacgccgtcgttcagcattgcaaacagaatccttcgacaagaaaattatcttgttgctctattcaacaaggacctgctcgatttgtctgtacctggagtaccgagtatcttcggcgggaacaagcaggttctcacgagagcgctagtgtggaacttgcgattctgtctgctcggctacttatgcagcccaaggaacgaaggaggcggcgtaagaaaggtgttcctcaaggaacgtaataaaacagcgcttgtagaagggcgagtcctttcgaacttgcattcacaccttctcatcttatggcttaccgaaggctgtcaattcacccgctcaggttgcgacagagattcatcttcatgggcatcatcaacgctcttttcgctcccttcattgtgctctacttactgttctattcgttcttccggtactttgaggtctgtttctattcaaatcatacagactagctctatttgttgctgacatcttgcatcctttcgtcacgtcttggtcaatcaaggaataccacaagaacccatcttcagctggcggccggacatacacacctctagctcaatggaagttcagagagtacaacgaactcccccacttgttcgagaggcgacttaatgcaagtcatccgatcgctaaaaagtatatcgatcaatttcccaaggaaaaaaccacgatagtcatgaggtatactctgttcctcttctttgtcatgtttccttcgactgaagtttatcgaatttaaacattctaaatctcgcgtccgtcgttatcactccgtcagattcctgtcgtttatagcgggtgcttttgcgagtgttctagtcctcgcctcaattttggatcccgatttggtgcttcatttcgaaatcaccccacatcggaccgttttattctacattaccgtatttggatcgatactagcaatcactagaggaatgattccagaagagggtcatgtagccgagccggaggttcttttggatggtatcgtacattacacgcactaccttccagacgagtggaaaggaaagcttcactctcgacaggtacgcctagtccttcagttcaacgatacttggtcttgtcttcactaagttgtgccaatcgatcggatctgcttctcatcctacgaacctttgtttgaatcgacatgccaggttctggaggaattcactcagttgttcgatatgaagattgctgtctttgccagagaacttctctcggtcctccttacccctttaatcctctgggtatcattgcctaactgtgcaccagcgattatcgacttcttcagagagtttaccgtacaggtcgatggtgtcggctacgtctgcagtttcgccgtattcgacttcgagcggcacggtaatgcgaaggtatgtttgaaatctgatttgaaaatcgatctgttcccaaataaccctaactgactgcttggttctgtgagcatgtgtagtacggcgctccaacagacgctccgcatgctcggttccaatctgaagatggcaagatggagaagagtttcctcaacttcaaagtacacttcctccttagtccttcttcttgtacacggtccaatgtcactgacactttcgtcgctctactcttaggcttctcatcctacttggaaccctaccgatccaaccgcctccatgttcc

SEQ ID NO: 1055 - DNA, 14376 bp, Xanthophyllomyces dendrorhous
cactccccccttccccctcactctcaccctcaagagttaacacgacggtactatcacctcctacagctcttcatttaggactcccttcgaccaaacacccctccctctcagttcattttggtccgtcttctcatccgaatcgcccgtcatcgtcatcaagtgctcttcggccacctcgatcatcaaacacacgagaccgaagcaggacaagtcggattgaagagcgtgaagaagatacagaccacctcgatatggactctgagggtccagaaagcataggtctcaaaggatgggatgatgtgtccaaagatagaaccaagactagattaggaagaaccgggcgaaagtatggacaaggacaagataatgaacgagagggtgaacaggagggcgacgagggcacccatccaaggttacctgatggcgacgtcttgagcttattgtccaacatctatgcaaccgctcgattgggacgctgaacgcgagcgctcaaaagggtttttttcttccacccgggcttgttcttggctgatgacggctcaacgtctctattcaaagttgtatatgatctttcctcactttactctactttcctcaaattccgtgcctcttgatgtccccttccccctccttttcatatatgtaaatccttgtgtcttttttatgatttgtttgacgatatatcctctatgacggtgtaatcatggcaagatgctagtaaaacagggaataataaatatatagatagaacgatgcagaaaaaagaataaagatgtcgtctgcatcacgacccggatcaaatcagccagctccggactctcaatacgatagaccaagccatcacataggccagctgaagtcttctccgaagttcatctgaacagctttcacgctctgtattccggtccgaaaagtgcccttacggtcagttaaaccagacttcgagagagaagggaaagcaaaggaaagaaagggcgaacagtgtagttctccagagcatgtgcccctagatctttcccaaaccctgactgcttcttaccacctggttcaacagaaaacaagacatcggatgaaacagatgagtaaagaatggatgactcagtgagtgcttgaagtggatcttggcggtaggatgatcgaagagtgaaggatacgtaccgaatgggatttgagggttcaggatgttcgtctaagtgaggttgtttcatatccgtaaagaattcatcagtggagttcaagtatggctagatacttccagatacgtctgaagaaacgacacaccatattgacccagacagttccagcttccaactcgcctacgactctcaaacactggttcatatctttcgaaaagaatccagcggccagtcctgagatgtaaaacaagaaaaaaacatatggaaagacgtatctcagtatggcagtgatgaaagcattgatgatcgggaagtagagagattggctgaccgtaggatgtgttgttagcgagcttgatgacttcttcctccgtctcgaacttctgaacggccatgacaggaccgactgaagacgtgaaggcaaatcagatagttagcttgcaaccatcaatgatcatgatatcaagatgcactgtttgtttgtttgtagatgactactcacaaatctcttcatcaacctaatggaacatcccaacaaagaagaaacaaggtctcttagaaacaagaagggagctatgtcagacagaaaaaaagagatactatgataacgaacaattttcatcccaggcttgcaatccgtgaagatggtaggctcaacccaccacccatcctctccccatgatttccctccagcagccaaggtcgcgccttctactttacctgcttcgatgaaagacataactttttcatactgggatttcgatacctgtgtaaagtgatagccttgttcaatcatgagacatagatgcgcaaagaagagcacacacataccaaaggtccgtgattgactccctctttgttttggtctccaatcgtgacaagtttcgatttggcaactagcctggtgatggttatacacgattacgttggttctgtcagtactattgataaagcacaaacaggatcaagaactagggacatacatctcgatgaccttgtcgtaaactgaggcttgaacgaacaccctcgagttgcaagtctaaacgtttcgactgaattcagtaaaaggcgcttctggacggccgtactgaatcatcgcgacgaatagcaggatacttacacaatcttgacctgtttgcgtttagtttgaggagaagaagagccattgaaatgaatacagatcccgctctgttgctagaacgggcgtagttgatggagacatacccatgttgaagaatgttcctataaagtccattgtgattcaaaacgagcaaagcgagttgtgagagacctatccatgacagcatgtgatcaacatctagtcttttaaatttacccagcattgcccagttagtagcttggtctagatcagccgactcaaagatgattcctgggctctttcctacaatgagaaagcccggttagcagttggatatctaagaactctcgtcaagctaaggagcaagtctcacctcctagctccaaagagacaggtttcaggttagacttagcagaggcttccataatctttcggccagtggcagtcgatccggtgaatgaaaccttaacgacccagaggatccgacaacgacgtaaatatgtgtgcatgcccgaggatatgagaacgacagagactgaccttgtcaataccttggtgggaggctaggacgccacccgtcttcccgtcacccgtaaggatctggaagactcctgggggatacccagcttcgacaacaagttctgcaaatttctgtttatcatgaaccccgtttatcaaagcgtgagcgctcattcaagcaaaggcgtaggtgccataaacaggcaactgaccagagcactgagactagtgaactcggacggcttgaggacaacacaacatccaaccgccagcgcaggcgcaatcttccagctcatcatcatcagtgggtaattccaagggacgatctgtgcgctgagtatctccacaacccatgcatatcagtcgatgctatgcacataaagagaaggatattgatcattctcaccagacaccaataggttcatgcttagtgaaagacagccttgtcatgtcgtttacttcagtcgtttgtccatggatcttatccgacctaaagagtgttgggagaacgaatgaaaagtaagaaattaatcaagtatcaagttgcaataggcgcgcaaagggatgaaaagatataccatcctacatagcaacgcgaagtacgtcccaaaagcaatgatcagtaatgaaggttttgatgggaactgacgttcaccaaaacgaaggatcaagtgctcttatactcaccggcatagtatcgaagagtggccactacgtccacaatatccaagtcgctgcaagccaaatttatcgatacttcaatcaattgacatatcaaacgaaccggaacgaaggatatattgcgtaccgaacgatgcccaaaggctttcccgagtcccaagcctcgatctctgataagacagatgcgttctgctcgatcagatcagccaacctgttcagtagcctggctctctctcctggcgcggcacgtttcccccaagtggtcttgaaagcggttcgtgcgtatgcgatcgcctggtcgacatcggctgaatgcgcttcagagatggtcgctaggtcggaatgaggaggcaggggtgagatcgacctatagttgacaacgtcagatccgagcagctcaaatgggtcaagtgactacggagacatcgagaagtatagttgatactgacttgaacgtctggcctccgatggaaggaacgaattcgttgttgaggaagagaccagtctggatagttgtagtcaacccggaaggaagagtgaaagaggatgtggatctgtgatgaagaacggagagtaagagacgactatgcgggtagggtttgaggagtctggaagcagaggatatgggaaaagagatcatcgatgctggacgaagggcaaactgaatggagattataagaagataaagagaaagccgattattaaattcaagcgatttaaacgcggttctggttgtaacagatccctcaggccctgagggacgttaagatcatgagctaggaacgagataaaagataggcgcggttgggaagcgccagcacacgattgtcatacaagacgttttctattgatcaaataatgtcgtttaacatcaaaggagtagtaatcaagtggttacgatgcttccctgctatatcagcaagttcaggaagtgccctctgggcgcgcaggttcgaatcctgtctacttcgttctctttttcttcttttcatcacctcttttggttcatcatcattttcttttcttttctatatatatttgattgtttcttccattcttctgcttgactctaatccgcacacacatacaccgattgatcgcatgcatcagctatatcataagaagaaaaatcacataacaagaaactacaagaataagtaagtaagcaggagagggagaagcatgtctacttatgcgcaataagatggaaactgaaagcggaaagatgcggggtaaaacacagaatgaatgaatgaatgaaaagagtacgacatgtcgatcgaggcgaaaaaagagaatacacaaaactctaaggggagacaaaagtaactaaagcatgaggacctcttcctcatcaggtcgggtactcgcccttcctcctcgaaccctaccccatatatttctccaagccctgccggctcgaccggccctaccctctccactccgtcttcctcgactgctatcatcatcatcatcatcctcgtgctcatccatatccacgtggagtaggccagcgtcccgcaaagcaatcattaccgggtcagccgacggacgatcagccggcaaagctccaccagcactggggttctcatccgaggcagtagctgagtcctgttcagcgctggtcgagcgacttcgagaagaccgaaggaatagaagccacctagataacccagaagcagccggctcgtccgacgtcgagtcctgagaagagagcagcgacttttcatatctatgcacacgccagtatcctcccaggcttgtaagaaggacaaacctacagaagaagagaaagagaggctcagtaattggaacggaaggaaaatcttgggggaaaaatgtatatgaagagcgaccaaaacacataccagccgaccgtcattaacacaaaactcaaccactcattcgcctgaccaacctcctccatcgtgggctggttgaattctggatgacgtcccgatgtcccggccgcactctcagatgtcgagaccggactcgaagtccaaccggttgcaggtgaccaagatagtccagtcgggcgagcttcactggcagatgtcatcgtggtgtggggatcgagcgggacgcctgtatctgaataaccgcctggccaggcccagcttcggtcggagagggcggcagcagtcgaggtagagttgtgaggcccgtagattccatccgggtcaatcccattctccagatcaagagctcggccacgaagctgccatccgtactgaatgagagtgagacccaggccggctcgggatccgaattttgccgcatgggattgatgtaaaacgtaggtgagaaggaaaccgatgaattgaaacgacacggagaccaagagtgaccagaggaacgaaaatagcgtcccgaccggcagagaatcgatcagaatcgtatcgcctgaagtcgcgatagatcccaatgggcctatgaaacagatagatgtcggagcatgagtccaagattaatctcgaaaaggtatatcgaaagtcccaatcttaccaaatgaaggagtcaacacattgtgttcccaatagggaggaaccgcatctctcaaggcaatgttgtatgcctttttaaaaaatgataaataccaaagtcagtacacactcctggccggggcaagtgcagataaggtcaaaactaacgggtggtccgtctttcgagctaaactctgccatcacctcagtattatctccatcgctatttgtcgccccctctccacgtatttgttccggttcgggcttcgcgttcaggttcgcccatacaccatcggaccctctgggcgcagaagcagcggcggaatggtttgactgaacgaaatgagtaggaagaattgagcggaagaaacgagaaggaccggaagacgatgaaccgttcggacgtgggtatgaaggggtcgtcagaagaggtgtcgggccggtgggcatgtagttttccggataagcacccggtggaggggatccaggagggggaagaaactgaaggggagcaaagagacagtcatgacgggcgaaacggtcaggtatagatcgacgaagaagcaacatttggaaaggttgatataagtttctgtcatgaaagacacagaacgcctcccgcttttgtcatgcaaagtctgccaagactttgccgtagtgatggaaacccaatgttagacacctcccttcagaactgatacctctacagaggtaatatctccaacacttgaggcgaagagacagcgacgagaagagaatggatcgaacagacggaacgaattaaaagaaaacaacgaaaggagaggaagagcaaaggggacccaagctcacgagacactcacgtaatcacgatcaaagtcatagctcgactctccgtcagtgttttgttcggctctattttgttctctcagcatggtagacaaatccattctagcaggatcaatcgcggcgttgttgttgttgtttcctccgagagctgatgactcgtccactggaggaagctcgctatcttcccctgcatcgaatatggttaccccacccccgccgatggtggtggtgctgctgctgctactgttatctccgattctatcgccacggccgttcccattatcgttcgagcctgatcggttggttgcgaatttctttgatcgagagagaggagcgttttcatcttccgatccactctcctcgtccgagtcatcgaacgccgcttccatttcttgatcatgatttgatgcacgagggggatagcttggagaaccggaagtggagtttgacatagatcccccagccgggagggacgagtacctagacatttgaagatataaatgtgcgtacgtgtatataaacgtttatgtctgcgtgtctgacgctaggctcagatagacttcaacaagaaccctgacgtgtcaggatgaaggaagagtctttgggatggaagacgagctgggttgacgctctgggggtggataggataagccgagatgggcgagggtgaggtgttccgtagtaggtctaattacggctgtatgcacagccttggttacggaagtaggttacgaccgtcagagttcatcagataggtatacggtgagaaatacaaaaacagcccatcacttctagttgagtgtacataggttttaatatatgagagtgagaaacactttatcgaaatagcgagagagatcaaacagtgctttattaaaatctgtgctaaatcagatccctcggtagagagccatctgagcgtcgatcctcatcacttgaccaggagtgaactgatcgcggcacgaatcgacggtatagctagtgtcaaggatggatatatgtttgtcagggtctgtatggatcgctatctagacatggatcaggctccttgagcgctactcactccatatgatttcggatagggtccagtcctaaatgttcacaaataccagtaggcaacgcctaacgatcagactctgagtcgcaccggtttcgcggacgagtacaaaatgatcaagagaatgagaagtgcgtacctcctccgggacaagtatctcgcccggtcgggcatccagcagcgttcgatccttcagcaggggtgtccgagacatagtctccgtttccgtaacatcctccctgcgtgacgagaacggagggaaaaggctgatcagcccaagaaagataggcaaggatgagaatatgttcaaatcagatgagaacccacctggaaggtatgataaagtccaagccaatgacccgtctcatgaactgcggtctttccggtgtctggatatatatacaccttgaatcagttctgcaggcattgtcaacgtctttttaatgaaggagtgaaagggaaagtgcttactatactggttgatatactgtttgtttgttcatttttgtatttttgtatttttttgttttcaaaaaaggataaagactcatgaatgaaacgaattcttctagcgcaagagagataaggaaacaacaacatactcctccgggaagagagccccaggtaaggacgactccatcatccataggtgcggactggtagctgaatgggaaagtcgcataactacacaattcatgtcaaacaaacacgcgcgcacggatgaagagggaagatcagtggtttggtctcagaaaggacagaaagagaacgcgctctcaccccaacaaacctggctgagttgaaaacccgacagaatagatattcaaatccgccacgcctccctttcgaagcgcttccttcatctcggtctgttcagaattccgtcaccaaagaagggaggccgttcaaatgtgagttcacggatgtgcgcgggacgatgattattgagagggtaaaggagaacaaacctgaagatcgttctcaggagcgacgtcatcgaaccagtcttcgttatcagttgtatccgttccggctttataacacagcagcaaagagaaacacgcgcgtaagctcatgaaccagataggaagagcgaaagaacgaggaagagcacgatagatgcgcacccagaacaaagctataagtcgtattcgcgtactgggtgttcatctgctggatctgactctgaatttgatcgtccccgacggcccctctggcggtatcatccgaagcacggatgacatgaaagtagacgtttataggcacacttgtatttgtcgagacggcctctttgttggccgctcgctcggctcggatcagttctactttagcagcgctgtcctccaggaaacagaaagcgcaaggataggatgagcacacctgaataattcgagggaagaaagaaagggaaacaaacatttgatcctcgacctcgaccgccgctatctcgacagatgcgcatttaaactcgaacccctgaggagcagccaaacaggttgataccatcccgagaaggaaaacagttccaaagagttgcatgctgtcagtcggatagtaagcttgggaaagttcaagaaagttggtgaactttggaggggtagcgagatgaagaggatctggtctccgttctccctcgtcttatatacgaaccctcccgtttgcccttcccgtttctctcttggttatttcctttcatccaacccgccttgaaatcggcaaatccataaatatcttgaggatgatggaggacagctcgttcccgcttatgtatataggggatccgtgtttttctgttctatcaatacctggtggaacgtgttcggcagatcttgtacggaacacatttaatctatctagccgtctagcggctgggaaggtggatcaaacgcatgtactcaagatcttcacttcatgttgactgatgttcccaaaacgcttggctacttgttgttatcatttttgtttctattgaatcatgtctcgctgatacggagcatagtaaactgaaactatttaataaacgaggacgacgtaggaatgaggacgacgtaggaattaggacaggtaggtagaagtaggattgacaggacagacagaagaagatgtccaaagaagtaaccccccaagaatcggccagaaatccaagaaaaccgaagaaaagtgaagggaagaagagagaagagaggaaaatgtccgggtgttatgatatgtcaggtcttgggttatacatgatgatacagaagagaagaaacaaaggcaacggcttgaaggaaaaaaagcagcgatcagaaagatgtctgatacaaaaacagaaagcaagaaagaaattcaagcaaacaaaacaaatcggaggtggggattgagttggattagatgagatgaaggtgaaacatgcaagtgatggcaagcaaatcgattgttcgatgattatatgatgtaaagaagaagaaagacaaagggggaagaacacagaataggaaacacaaaaagaatttcttccatctattcagcttgataaagcgaacagatctcacagcctcggaggctcagtcggttgaggctgaggctgtcgcttgacaagatccctcttagcgaaggtggcaactgggcctgaaccacagaccgtaccggtaggtgtttggccgcctgccgtccatggatccgggtaggtgcaccctgcgactttgacgaacgctctggctgtatcctgcgcgttggcccatccgtttccggggttgatggtttgagtagagcctggagatgtatacgtcggtccaggtagagtgatcggttgaccggtttgagtgaattgggacagaccggtcggcacggcgaacgcgttctggagggtcgccggtggccaggggtttttggtcgacacggtgagtccggcgcctgtaccgccggtcatccaagcgtcgtaaaccccatcaaacggagtggattgaccgagcgaggcgcacgtcccgatggcctcccttgggtcttctggtgcgtaaccctgggcgagggcaagttggtaggaccacatcgggttcggaataacccctgtcgacagggttccgatcttccaggtccagaaaaagtaatcctggagggagtccatcgaggcgagcatgaactgtttgaactcggccttgaaggtggcgttccagttggtgtagtccgtccagtcggaacagtctccatacttttgagtgaaaccggggtaagtaccctcccatctagtaccaaggccaaccccgttgacgttcaggccacagtcattcggtgcgaatgagaattctccaccgttggcgagtccgaagttttggctggtcgtgttgattctgctaccccatacctgacaggccagagttgagagccctgaaagaccggctgcgtgaggggttccatcaaaagcaaagtaggtgtgggtgtcgagggtgactctatctgctccgttaaggaagccgccccaagagccgctggaaaagccgtcgtgaatggagatccagggtcccttaccttgtccaagcccggtgatggaacgaatgaggtcgtaagcctcggtgtagaacgagccgagttggtccgtgccgatggtgggcgcgtagggctcgttcatgattccaaacatcggcacaacgtccttgtactggtcctgagagatgaactgggtcaacgtccggatgtactcgagcgttcgctgagcgttggcgatacccatttgtccgtataccgtgttgatatagtcgagccggccggaatggttccagccgttctgagaacccggaacggcgtgtaggtcgaggttgatccgaagaccgtactttctggcccactcgattgccttgaggaagtaagtccaagagacctttgccaagaacggctcgcccgggtaggtctcgatagcccagtaaccgatgggaattcggataaaattgaagccggccgcggcgatctccataaagtcttgttcagtgataaacgtctcgtagtgctcggtcatctctgcctctagattacttcccatggccagggaaagcgtccattcgtcctttgcctggggggttgagttatagtacttttcgtacagcgcgggtgcaataaatggctcagtattcaaccagccaccaaggttgacacctctgatcttgtcggttccgtactggaacgtctcgttcaatccaggcgaccagctttgggatcggccggcgtagttgacgttgaatgggtcgctcgcgttgtaaccccagtggccgccaaatgggtttttgtaggtaaatccgtttgagccgtcagcaaggatgacggtggagccgttcgtgccgaacacggcggccgagacgatggccgcgctcgctgagggcgtgacggcagaggcggaggtagcggtggctgaccgggaggaggaatgagactcaatggaggccgcgttagggtcggtggtcgcgttggatgactcgttcgacttgtttgcgttcagactgtaaagggagagaaagggagagcacgaggggacgttaagcggaaggaagaagacgatggaaaggaagaggaaaagatgcgcaagaaaagagaacgaagaagacttacgcaacgggaacagcaacggcgacgacgatgactgtcaacaaaccaaatgctcccaagagaatccatttttttcgtctggcccagagactaccgttcgaattggcgatcgtatccttctccggttgatcgtagtactcggggtggttagaacgagcagagtcgtatctctctgcctgtgcagtagtgaaagcgccgctctcgaggcctgcagaagacgtccctgcaggttggtagctatagcttcggtcgttcaacagaggaaggaatgacttcattcgatctgtcgcaggtataggcggagtcgaggatccagtgccagagtagagctgtgatgacgggtgatgcaaggcagaaggaaagagctgatcagttttttgaaaataaaaaaatcttggcatgtatctagacgatacagacaatacttgtaagaaacaaagagagagagagagaaacgcatagaacaacgtacaccatcaacagagcctgaatcggaaaccgcaccagagtcggatcgtgcgagacctgggatcgactgagttgagattccggaaaagctgctccctcggactatacatatatgcgcgcgcaaggagaaaagaagaaaagagaagaggagggagtgtttctatcagcggttgtccatgttcgggttcggttgtatatacaagtcactctgacggaactcgatcgacacaaacatgatacaaagaaaagagagcgcaagaaaagaactcacagccggctatgtcgggagacaacatccccggcgcacccagaccggtgattccgtcgtcgggctcgtcgtcgttgatcgacctatgggtatctgatgagtttgatagtgggcggaaggacatttggtggtgaaagaaggagaagactaaagaggggaacgaagaagagaaggtatcgataggatcggactaggtgtgtttgaggtccgtacgtgcagcagatgtcccaggtcggacgtcgtcaggcacaccgagaggacgaaggcacgaggagaaaggagagggaagagaaaggagagagaggagagaaagaacagtgatgggagaaggagaaggagaggtacctgagtgaatgtgaatgagagagagagagagagaagagagaacggaggaaaggaaaagaggagaaaagaaaagaaggaaaagaaagaaacggtgtattcttatgtgacgatgatggagtgagtgcacacgcatgcttgagaccaagagaagcgtgtgtgtgagtgggtgcactgttgggcgagcgatcagtttgggtctctttctctcttggtgttagtcttgctctctccctccgttgctgtcatcttcttggagatttcatcggccaagagaaagagaccagcgccatgaggggaaatcagtcgggtaaatgacggcagacagggcagaataggccaatcggtcacacgcttgatatcaacttgccctgaatttgccctgtgtcctctatgccctgtgccctgtgccctgtggctttgtcgcccttactgtttttcccctttaacgtcttcccatgaatccactcggtggctcatcagtcaaccggtcagtcacactcgctcaactctctgcctctctcggacgcaatcatctctctggtgcagcattgtatgctgtgtttgtactctggtatacttgggtacattcgtaccagcacacacgcatgcacatgcgtttacatacatacacttatgtccgcacacagacgaatacacagacacgcatactatagcttgttcgttcactcactcattcattcattcacacacagacaccgctcgggtcgaatgccatcgggttggtgcatgaagatctactgcgctacgcgaatcatccttccgatcgctcggctcgatccgaagagcgtttaaattagaaggagacagtaaaagaaccgagtcccgtcggcccggtgacttacctccggcttgacccctaccctcagcctcttttcttttatgtttcgtatatt

SEQ ID NO: 1056 - DNA, 82984 bp, Xanthophyllomyces dendrorhous
  misc_feature (26330)..(26339): n is a, c, g, or t
ataattgattcctattctccccttccgctgactgtgctttgttttgttttgttttgttttctatctctttctttccacttcctacttgactatgctccgatcgatcctattgactgtcaaccattcatcctgttttacactctcggatacactcactcacacacgcaaacactaaacaagcaagcatacaaactgcaactacaactgcaaacgcatccagacactcactcactcactcacacgagagaacgatgcatccgatttacgtggctaagccatatgtggcagcggtataaaagtaatatgtaaaacacacagacaaaaacaggttggccagacacacagaggatgagaaaatgacagagggagagttagaacagaagaaaatgaaagaaaccgaacacagaggaaaaggtcagagaggcacaagaaactctggataaaggaagaaagaaaggagggagagctcatatcgcagatcgatgatggtggaagataggacaataggagggcgatttgggaaagtacacatagagaaagggggtgattgaacatgagagatagcttattataaatctggtaaacggagagagatggttgacaaagaagaacaaagatagaggaattcaatagatgaatattagaagttggcaagagaagagatatctgctttcggaaaggaaagaagaaaatgtcgcgtgagcccaagcagagatttttgtagacttcgatcaagagacacacactttaagagatccagctttagaatctcattggacttccaggatcctgcgccgacgtgggcaccactccattgttcgccaacggcgatggcttctttgttcgtcgacctagtaatgtcgcacccgacatatcaagctcaaaaccggcccctctgcccttcttcgcacctccctgatctcgctgaccagcccgaccgtcgtacaagacggcctcggccattcgcctgtcggctccacccgcaggctgataacccccattgttgttgttgttgtgctgctgggcacgactgttcccggcatgtccaccaccagagtgggacgacgtattcgaagccgtcgagccatcccggacatgtcgttgttgactctgaatcgtccgggcggcttcctccccatgcttcgccctggcttctgccacctcgtgctcttcctcggcctcttcgtcatcctcgttcaatccgccaaggaacccacgagcgcccgccccgccaggaccattgtaggctcgacgacgagcgccttcttcctccatccggtggacggcgtaggtgatatcgaatgcctccttgagcgaggccaccccaggcgagcgaccttccctcgcaccagggcctcgcatcgactgcaacaacggagagtccatcggggcgttcgaggccgaaagcccggcagcctgagtttggatatgtttcggaggagcctgctcgttgcaccacgggtgagcgaggaactcgtcaattgtgtatcgctgggccggatcgacattcaacagatgagagatcagatcctttgacgaagcagagatatcgtcccaccaaggcgaaaggaaagtgtagtatccacgagcgaccttctcggttaatactgcgattgactcatcatagaatggacttgcgtccccaagacataggaagagaggacgattctgtcagcccgaaccgttcttgatgaggacagacaggaaaaaaatcaactcacgggaaaccacatagtagcgtgtacaacacacaacccaatgcccacatgtcgacactcttcgaatacctctcgtccttgacgatctctggagcagtgtaaccgaccgttccacaaggcgtggcagtgtcctccgcccagacgaccttggatagaccaaaatcggcaatcttaactcgaccgatcccaccacctccgacgccaagagtaaattctccttcatcaaccttgtcctcgtcgtattgtcgctggaccggatgacgggacgggatgatcgggattcgatcgaacaagatgttttcgggtttgatatcactgtttcgaaagaaagatatactctgttcagtctttgtaccccaatacagagctctatagacgactgaccggtggacgactcctcgctcttcatgaagataacggataccgtgggcgacttgaaggattacatgccgagagagttgctcggaaaagtaggtaagtttgacactgagggaaccatgtatagacggtcagtctttattcagatctctagtcgggaccttgtcagcaacttacatctggtggaacaattctcctccctccattactacgagatgacgaatacaacgtaagcacatgacgacgtcgccgagaacttatcaaacttggacgtacattcgaggaccaaaaagtaatgctccgggctttccgaaaagctgacgagcttgatgacggacgggtggtcggttccacgcataatctgtacttctttgagaatgttggctctctaagaaagaagaaaagtagaagaatgaaagaaagaaaaagaggaagcaagggggggagaaaagacaggggaagtccgtattaagagggaggataagagaaaggagcatatgtaaggggaagaaaaagagatcaggcagaacgagagaaaagaagaaggaaagaaaaaggaacaaaagacgaatcaatgtcagaccgtctgcacacttctccattgagagaaagaaggttgtgcaggaagacagcagagcaagggcaaaacataggagggacagagcgacgaacctccgtcacccgaggcctctttttgaagttggggttcaggtgtttgtttccctcctaagtatagagattgagaaggagaacaagaaagagagccgtggtatagaaagggtagagaacaggagaggataaggtcgacagacacaatggaaaagaaaggggaacggaattgggatcagcggactgatacatgttggaggtaggcaaacatccggaaaacaaaacaggtagtgaaagtggcagagagaaaggtagatcgtgggtggaagtggatgcgggagggcagggactagcgtcatgaaaagatgcaagttaaatggaacgaataggacgggagcgagttttttttttactcccttagaatgtagatggagacggaaagaagacggccacgaaagaatggaagaagaaaagggcaaaagaaaagacaaaggacaaagagaagatcggagacaagcaagacgaaggaaagaaagtcttacctgagaagcgttgagttcgtatttcctgacgaccttgacggccgtcttgaagccagtccttcgatcgatggctttgtaaacgttggagaatgcaccactggaatagaaaagaggcaggacggacggacagggaggacgagaaagaaagaacgacgtaggcaaaagaaaggaaaatgatcgatggtgatgacatcagcaaacttttcaaatgagatgggggaggaaagcgacatcgaacgggagccgacacaatcgctgtcgaccagaggagagagagaaacagaacgacgtactctcccatcttttcgaccaggtggaaaccttctagaccagtgtagaccggcattcgttccttattcctcttttcctcctgaaccagatcctcagcctccttcctgtaagctggctccgcagtctgagtcttgtgctgttgttgttgtgccgcctgggcctgttgctgaattacattggacgattgcttggctgcctggttgtgggaagagtgtggttgggcatgggcatggacggtcgtctgcgtgggggcggctggcatagctgatgacgtagggtggtaggcggctgacggagcgctgtgatctcgttgttgagtaggagaagtggaagcagaggaagatgcagatgtcgaaccgggttctttggcgttcttgccgtgtcgaacaaagtctggagaagaccagaacggaaagataaaagcgggaagaaaccacgattaataagtgaccgaacgtcgagagaaatcaagatagcaagcgtataaacgatggatgggaaaacaaggaagaagagaaaaaaacaaggacgtacttctcagactatcgacaaaaggcattgaaggtatgcaaactgaacagagagcgagtttctaatagatacagctgatctcttttatgatgatgtgctattaacctgacaatatcctttgaaaaggaaaaagagaagaagacggtaaaacgacaaataaggatggaagaggaaaggggagaaaagaagtcgaggggaagaagaaagtgtagatccaaaagattatgataaattataatcgagttttttctcctatttggtttgggcgagtcgtctaagggcaatagaggggccttctagggaacgtcaaacactcccccgcctgctagaaggcgggtcagagaacgtaaccacatcggaaagtctgtggggtgtgtgacgacagcctcaatttattgacgtcaccaatttctctcccttgtctgcctgattgcttccacgtgctgttttcaagtaagttcgagctttgtatgacatcatccatggttacgcgttcgatcgaattctacatccgatagtggttaaggttacattcagatccctagacagaccctaagagtcttgttcgttcgtcaacagtagcgtcttcttgtccagcttggtgatcaactgaacctccttcagagatgtcgtagtgttgcctcgctcctagcgtctggagagcgactagagcattttggaagaatccaatgatgaacgtaaacactgctttggagatctgtcagccagaacgagattatctgtcagcatgaggccagaatcatttgtcttttcttatcgtgttctctcgtgcacgtgctgttgaaccatatgagacaagatgtaactccaggccacatacctctgtagcccatagatgaccatcggcggcgctcatcgatttgtgagagtagataggagccaggattgcgatcgaaattggcctggcagggaggttgaatccaagtagatacgagatgtcatcctttctctaagattatctattcctagttctacttctactcttgagtgaaaactcgccaagagatagcactcaccagaacagaaagaacaggacagctccccagatgacacccttgataatttcccgaccgacttttgccaggacggcactcgcgctgacctcctttccatcccgtctcgctctccaatacccgtaaggtaagagcaacactcccatcccgtccattccctccgcccagaacctcagtaaacctccaggaacagaccgccagtcgacctttccggacggaccgttccaagcctcggacaaggccggcagatgagccgttcgtggccaaggaccgtctggtagttttgaaacgcgggatgcgttgacgtctgggagaatcaggcagggtacgataaggtacgtcgctaggccctggacaaggcatgttaccccaaggtctacgtaggtcgatgggttcgttggcaatagcaggccgagtattggttcacatccatcagcactcgatacaaattatttcggatgaagcaagaaaatagcgctcaccaccagcgaacggaagaggaaagagccaaaagctcgtattaggttcgtactcatacatgttcatcgcttaaagagcccatttgaaccagttccaacacgaagtaagttagtcctccgattgttctcccataagtacttgtctctttcgattggatgacaagcgtagtatccggagaaggaagaacgaaccaatcttgaaattgatggctgcatcaatcagccctgctataaatccctgcataatccagatgtaactccattggacccagcttgccgttcttggcagagggaaaaagaccccacctttcgtttcagtaatcgtttgaggtgacatcctaaagcacaataacacgtatttgaagcgtcagtgttgtcagctgattgtcttcttgaagagatgatgagagaaggctgatctgccttacgagtagaatatatgttgatgaaagagcgaggatggaagggataagcagatgattttcggtaatcgccggaagcagctcaatggttacggtatttcttgtcttaggctatgtacagattgcttgtcgtctttctgtcctctctctccttgccatccttatactttgactcttggccttttatgacgcgtaatgtggaatcaaacagtacaccgccatgctgctacataaacaatcataaattattttgacataacctcctcctactgtcctgctccattcttctctagtcttctctactctataccacttcactctgatatctcaatacaaatccgctctcggacgctctgctctgaaatatggtacatttcatcgatgagcgcagatcggaaggtattcggccccttggtttccggtcgggcagctgccacctcggctgcaatcgtcatagctaatattctgtatcaggcgaagggtgattatacaatgttcactagttgctctcgcgaatattcgaaattccgatattggagaaaaagaagagatggaacgaacccagagagggctccgaggagcatatctcctcgtacaagattgttcgagtcgtcagtgtttccagaagaaagagacttcaaccgagcggccgcgcagaagcaagctactaatgaaccggtcatgcaaccagatccggtgatcacccccagctgttagtggccatatcagaaaaggaaggagaaaagaggttgaaatactgggtcaaaacaggtaaaattgatggaagagaaggaaagacagcccgtaccagtttgtctccgttcgacagcttgacaacagtctctccgtcagaaatgtaatcatccacaccggtacagacaacaatacagcctatgattttaaaccggacaacgcaaataaaggcgattggtaccgaaatagacatcagtaagtaaaaaccaagtgagctgatcaaagtacccttggttcactcacgttgtttcctagccaagtcttttactactttctttggatccttgaacaaagttgacccggagtctacacctctagaaacaacttcgtttgagcctgccaagtacgcaatctcacccgcatttcctttgataactgtaggctggaaggtatccagcatttcttcagttacaagtaaagtatcaaaaagagaaagattcgtgtcattgacagtaacacaggtagacaaaatatggatcggagatatttcttactcttggcagaagttcgtcgaaggtcagaggcacctacagccacaggatcaaatactaccggttttccatttcggttggccgctgcgcctgcagcaaggaacccatcgaggtccttgatcgtcccaaagttgatgagcaatcctccgatgattttgctaagttcagttacttccgaaggcaccgtcgccatgattggtgaagctccgacggcaagggttgcgttagcagagtcgttcgtgactacgatatttgtcagttggttgatcacggggccttctgccttgagcacgcttaacagctctccaaatgattgaacgattcgttctttcgtcagacctggctgcttttggaccgggacagccgaccgagctttctttatgatagccgataggctcgacgcagcgttcttaggtacaggcgaagatacaatgtcggagatgatggccgcaccagccagagatggagaagcatggaggaggagaggaaggtttgttgatttgataccaccttcgaagaaagagttgttctcccagttcagcttgaaacgaggatttacgactgaaaagattaaactcaccgatggcgactgctggacctccaaacgctttgacaacatcttctacgcctctgaccccaagaatgatcttcttgctcacatccttacttccagtccaccaaaccggaccaactccaatgtagtctgcgccttgttctttggcaatttcggcgtcctgtacgctagacgtagaaattccgatgatggcatccgggcaaccaaatgagtctagtagctgtcgggctagagggagaggaaggtctgtctgtccaatatgaataccagccggtggagaagatgaggtatgaagaagagcgaggaagatgtcgagtcgatcgttgataattaacggaacagaatactgatgaatatgtatgcttgggcatcagtatcgactctcggtgatcggaggcaggccgagatgacggaagaatctctcaccttgtcacaaagttctttcgtccttctggctacctcgaagaactctcctgtatcgacatccttctctcggacttgaacgatagtgacgcctccttgtagactttcttcgagagattcgtagtagtcctaagaatagacgagaaaatgcatcagatggagagttcgaagcagaaggaggatctatatcatctgtgccgtctcgagagacaaaccttagaaggaggaagaagatctctaccagtcacaaggtatagcgaataatcgatgtctggcttgaccatgaggaataaacgatgaataagatcaagatggtaggagagatgagattcacggggaagacgaagtcgagtttttcaagtcgttcatccgtccggacaataatttcaattccgctccgccgagtttgccgatatccaataatctccaccttgatgttttgttcatctgttcagctccttgcttttctctcgaggttaacccaagagcttgtggcttcaaattgatcatgggttctgaaggcataaatgacaacagtaacagcgatggcggcgttctctcaggtatctcgtccataatggtctcctccggcttcataaccgtacgtgtctgtgagcaaatatgttagggttatagaagatgaaaaagtgaatgtagagacgacacgaagcctccatccaatatcatcatcatcatcatcatcaactcaccatcatcaccattactccaggtccttgacgatcaatatggaagaacaatctgaatctccttcaacagaatctccagaggtctcttctggtatcttctccgacatcatcaactctgtatttgagcctggggtcaactcgttcgtctgcttttctctctcattcattgctgacatgatcatatactgatttgatacctactatgatctcctctctgcgcatgttgtcacgggtgtatacgcattcagaggactgataattggaatgcacctctccttcctcggcctgttctccgtcctgatctgtctctgggttcttacaaattggaacggtcatgtgctggtactgtctggtgtcagtttagctttatggggttcgacagcgtggtatgtttcctttgtctcacggtgttctggtgtttcattcggtctttgagctaactaattatgccgaatcggaccttatcacccactgtaggttcgttaacgaacttctgatagttcaggctcaacagaaagccagctctccttcagacgaaaaggacgcgacgacagcttcgattacagctgttgagctagaaaaccccttggcttcctctacaatcccttcggagcctcaatcagaacccaagaaaaagcgatgatgcgctagattgaaccgtgacttgtcgactgtatgaataaaaatatgtagatttggtaatcggcaagacggaagcctcgtgtagattggtatacagtactaacgggatatgtgataggaggggcgaaaaaggcaatagtacagaagaggaaagggtatatgcaaatgccaaacttcaacgaagcctgtgagatcatgatgagctatttgaatcgtaccaatgcttcatccgtcgagccgaatcttgagcgatagcaaacactagattttcacatgacaaaaataaggaaaagctctatcagcagcggcccatcggttgtattctaaaacatcttgcagcgagagaaccagacttacattcccgctcctctccctccaaaccatccctgaactctccggcacctgtaccagaacctaaactagcctgagcatgacttgtgattgatgccgcgtgttgagcttggtcctggatttcaggtgcccggaacttgaatgttgttaatagtagagtcgataaataggttgcctgaggatcatccagactgtcggccaccaaacacgaaaacaaagtcagtcagcaagagcttagatggcctgaacgcatcttgagtgaggagaaaacatatgggatacccacatgcctacgagtcgcctaccaaatccataccacattccaagaccacctaccaagttcgaaagcttaactgatcgtgattctgcgttcagggcgttccgaacccgattagaaaatgcctgtgggatattgaacgtgacaaaatcactacaatcgggacaattgtttaactgacacatcatcaagaccttcgggaagagatggcagagaaggagaagcagaagcggaagaacaaagaacacacttaatagctagtgtttggaccagccagaaaggtatctctgatttagctaattctttgatctgtagcgtcggccatatggatagtgagctcgagtcatcttgtgtaggaaatggccgacggtaaatccatcaacgaagactcacgtctgattcatttcctccatcaagataacctagtccttgtacatctagctggaaagtacatggtagtttctaaaagtatcagttgaacccagaaagaaccaccagttcagtttcatgacaaacaaatgcaggtcagacaggagagaattcttacctggttgtcagcaatgatagcatctatggaccagtagtcatcgttgtccatctctcttaagatcgactgagagtcgaagcctggtcgaatgtgatgtgtacagcagtgaaggttgaggacgaggagttcatttgtgaattgttcatcaaaagacacgtacgagacgcgacgcgtcatgacgcgtaatttcagaatactcgaggatgacccatagcgagaacgcagggcagaaagagactcgtaaaaacctcaagaacttcccagacttgacgtcacgtcgtttcgataatatcatgtatacacatatgcttataaatgagttcaatagacttttacagagaacgggaagtcatacacttttcggcccagtttccacccgattgaccaaatcgaacatgttcacttttgaggaaatttttgagagaaaccaatccggaaggattttctgacgttttttgtactacatcactgaacatgagtatgagaaatgtttgtcgaaagttaatgaagatgcacatgaatggtttggtaagatatgctggactgactttacgaacgtccgcaagaagatgttatcatctttggcgaaattggaaggagcaccgcatgttaagcgctcaaagacaatccttgctccaaacggaacgacggatgagactatgaacggagatggtaccggtggaggacccttgggtggcaagttttctccatcctagatcgacggagaatacatcgttcgagaaagtttagaaggattagcttgcgctgaattgactataactcaaatagcatacaccttacctctgggtatccgagagcagcgaggatggaaaccatagtattgtcatgactcatgtctggcaacagagagacctccattacattcagctgtacgttctatgctcttgacagagatgaaacagatagcagacctataaatattcgtcgacctccgggtggtgccagagaactcatgttggatgcacctccttgaactacatcactagtgtcagtcaagcgagctacaagctcattcaggtatgagatccccttggtctttccaaacggtgatccgtaagagtgactgtagtatttggaaaggtcgtagctgcatattgcgtgacagattcgatgttaaatacgaatcaggatgagtgactgagatcaagctggatggttaaaactcacaaatactcgttacttttccattcatccaaggtgaacacattacaccaagggctgagccgcccttttaccggtctcacactatcaaacccgcagagactcatcaagctaattgctccagaggttataagttagaacccaagtagacatgtgaggagtggaaagaatcaggaggagagaagagcttacgcaagagtgtcaacaggtgtcagattggctcctgggattaatgagttgagtctagaggcaattggtaaacctttagatttgatccatgcattgggtatgatgactcctgggagctgtaaaacacactccgtagaagccaaccagaacagaattgctacttcagatttcaatcgcaaaatggataagaaagagaaatatactcacatctatgctatcgctctctgaagcgcaggtagataccgaaagtgaattgttcattcccttgagagacgtcaaaaagtaggaatgaactttgcaactgagattctaaacgcaaagagacaagagaaactcacagtttccttctccattaccaaatctattgaaggaagtcgagtagtgccgtgatagccctagtgtattaataaagaaaaggctcgtctattagcatattcattcatatacgagccaaacgatgtacaacggacctgggagaaatgtcgaccgctttctgttgtccgtctcgatccggacgagcgtatgaacactgagtccgcgattttaccagcaaacaccttataacggtttcgatagaaccttccggcatcgtacgccctgaagaacacagacgagccgatggttgagagcacaaatcaacagaacaacataagcttttcatccgattgagtttggggctgagggttaaattaacgcagatgagcgcactcagttctaccataggcagttaaatcgccccatatttctccttcttcaagttcaagcttgaaatttttgataaacaagagtgtttgatcttggatcgaaccggaagcagcaaccactttatttaaagctgcttggatcaaggtatgtcccttttccgtaggatctgtcgcccagaaagaaagcatattagctcagttttagcagatgagaaatacaaagagagttgtgcccatacaccgtgacatgtgtcgttgtagctacaagaagaatcccccagaaatgtacagcccaacctgagctgagtgatagaacaacaagccttgagccgagaaaggaagaagggacctcactatggttacctgggttatttcacatccagcgggcacatagtactcaacatgcttcatcatatatggcgtgtaagcgccagtctaacatgaatcaggccgaggcagttggaccaattcaagagatgagatgccgttcgaaagtgaaagcttgtgatgttcaggtcgatacgcacatagttgaaaactagatcatccttccaatctacatgtttcgcttccaaactccagaacagggaagggcgaacaaagatatattctggagaaaagaacgttacataaatcgatagcactaagagacccggaaggagaattagagaacctggtgagggtatcttcgttagcatcgttagtgagagctcatcgtggtcttcttttggattagtcgactgcatcaagaagagatgatctaactgatgattggtcacgtgctttctctattgcttttgaccgtttgtctgctataactcattcgaggtgattttggagtgtcatatacatcgacagggacaaaacaaaatgcgattcagacgggagaaacagaatgtgatgatgacgaagatggtaaagaaggaagagggtaaaaaacaatgcagtgtgtatgtgtgtatgtatgacatataacatgatggatgagatggtcgattttagatgagttaaataaagttatgccaagaataaggaatacgatatggcagaaagggacgaaggaaagaagagaacaaggcgagaacgaaactagaaaaaaggaaaggaagaaaaaagacactaggtttgtccggacatgaccacactcggcttttcgatttcctcctctaaccgaggtttcttcaagctcccctcctcaactccgttcgagtcagattttgatccgtcatcttgaatggcttgtcctattgaggtttctaaagcgttaccctccagcttcctctttcccaagatcccactgtcggcatttaatgcaaccaattcaggagtctgtatcggggaagcttccggcaaggactcaacagattggtgacttattggaatgggttcggacaaaagttgggttccttgaatggacactggcggtttggcctctaacttagcaacagattctgtcgaaggaacagaaaacacgtcgttcccttgcggctcagttttaaccgaggacagtccttgcgccaaaagttttgccacgttggacaacgaagtggctggttcgatgggagcctctgaagttggttcagctttctcctgtttgacgactctgtcggcgatgggtgacatcggtggaggcgtcaatgaggataaccggttggaagaacctagattaccgtttgcggtagagagaagccgggtagtgagtgcattggggtgaatagagtcgtgtcggcaggtggcgtggaagatctgaggatgaagagaaggatacgatatcagtcaagctgcaactgtatctaggtattgaggtattatcgtagtgagagaaagatatacgaaccactccatcttcttcgactgcattgaaccaaagccactcctcctcgtcttccgaaaactcgcccttgaaggcctctttacaaatcggacaaggtctcgacgccacttccggattcgatggctggacaacaaacttcttgagtagggcttgtcgagcggaggctgataatccaccttgggatgaggcttcctgagctgatttggtgggatgagagccggtaggcgggatcgaatcaggcgaaggtgaaaagtcatttacccaatcctatttagaattcagaccaagtgtcaatacacagtcagaaccccgaaccaacatcaaaagcagagtcagctcctcctctccaaataaaggttgaaaacaggagggcaagagaaggaaatacaaaccttggcatctacaaaccaagcccggctattacccctaccttcgctttctcttgtccgcttattttgtctaaagtgccaatcgagatgcaaatctagtttggccttacccttggctgttgccggcgctcggagtccacactgtctacattgcagggggagttgagcagacaacaggctagaaatccttggaagatcactattgaaaaattataccaacagccaatctcagatgtcgatcttcgttaaagctgcaatgaacagtttgatacatatcggacatacgctttcaagtttaagttatctagcctcacgttcaaccccaaaatcatcttttcgtactcatccggctcactttccttgtcctcattttcctctttttgttgttctacttcctctaccgatggcacttcggacacgatctcctttttgggtacctgaggagagttggatgcctctcttggcttgagaacgctcgccatcaagctcaatagatctgcacctagagatgaaggcgtgcccgttctaggggcatttcctgagggtggcaagggcgagcgagctgttggttggaaaacctgaggcgacacagccggaacagacaaggaaggaacaggagcggatgaaggagggagtgtgaaaggtgtagaatgggatggtgttggatagggaggcgatgaagctagtgtaggaggaggcattcctatcggtatctgactcggaataggcgtcggaacagcaacggatggtgaagggacaacaggagggggcgcggaagtggaagcgtcgatctcttgaagttgagtctcgattgctcgaaggtcggtttcagagacattgcttgtctcgacgagctgttgaagttgctttaggatatcaatatgacgacggatgttctcgtccataggtgacagcgcggccgctcggtatcgtctggtgagaacctgttgtaacgtggctaggagagcttgtcgagtgagcactggaggtgagccatacgtaggggtcatctgagcagatggtgcttgtgggggatagctgtactgagtttgatatgtggtctgcaaacattgaacatagtccttagtttatggattgactttcaaggaaagaaagccacgattgacgaacctgctgatgcattctagtcacatagtcacgtccccaaattctcatctcaatttcttcttggacttctatgccaaacacagccgaccctccgggaccacccgttcgccaggtccgaagcatctcctccatcctggattttgtggatccatcgacagatgcatatgtggacgcaaagagagatgaaaggtatcgcaggaagagtgtagcataaggcgtcggaaagtttttcgagacggagtccaagagaaagaacggaggaagcttctgatgcggtggagcctgaagacaaagatcggacaaaagaaagcggagaagaagccaagaagggttaaaagttagagttagttgataaactcattgtttcgcttcctcgtttttgtattttctctctttctctttctccttattgcgcgttagaatccgacagaaagagaaacaaggagaacagagatagccatgtatgtgggcaaaaccgacggtcgctcgctcgctctacacgcgcgtttctgactgtggccaagaggaagagaaaaaaaggtagagaagaagggtcttacctcgttaattcttttgacgagctcttcggcaatgaccatggcgttggcaaagttagcttgttgctcgtaagccaactgggtgagttggttgatgatcggacgagagttgactgtcagaatggctagatggcttcggtagaagactcggaaagcctcctgggccgacatcggtggcggaggtggaggggcttgataggccccgtaatagggttggccagcagaaggataggaaggctgctggtaggtagactgaattgacgatgaggagggagcaggagcagcatatgaggtagacggatatgaggcaggttgaccgccgtaatgaaaagacatggcaaagaagaagaaaaggaggacgggagtttttactttgtttctctaacaaactctctttgatgtgtataggttaagcttcgttcactctctctctcgacaggcagagataaacaagaacggagatgaagtagacagagaaaggtgagtctgagcttcctttgagtatgtatgtgtgtgtgtgtgtatgtgtatgtgtatatatatgtgtgtgtgcgtgagatgagtattttatccccggaaacggaaagatgtgacttggacgggagaaccaagcaggcagcacgtaagaatatttcctttctgttctgtttgattgaattctctctcaaaaagaaggagcaacaggcaaagaagaagaggccgccaccagtgaaggagaagaaggcaaagagtggatggatggatcaaggtggatctgttggccgttggggatcgatggtgggaggttagagctggaggtgaacgctggcgggaaaaacctttcgtttgagggctggttacacgtgaaatcacgtgattgtatgattacataagccggcgtcatcaactacaacaaacacatatacaactgaggaaaaacacatactctctcttctttcttattcttgttcttgttctagatacgatcgcgtctcgttcggacgctcgttcatacagccgcttcagatgatattcggcaggagacagacagtggaagagaaccaggctagttcgcttcaatgccatttctgcctccagaccaccgtgttttcttcttcagatccggttccacatcggccgaattcgggttctttgaaggtcgatcagtttgcgccttctaccaactgccatcaagcaggcttcaaatggagatgtgaccgatgtgggtgttggaacggctgggacgatgtttgtccatgtttttttacgcttgaatcgatgcccactgtgttatattcattgaaacttgaggggacttatgttcctcttgtcatattttgcagagaggagagaccttgtcgtttcattcacaaatgcaagacccatccctcaatgcgggttcctttcagaaaagaggttagcgttgcgttgtcttcctcagcgttgagaatcgttttctctcacaggcatgttcgctcaaatctgtttctacaacagcgacctatccgtcgacaacatttccactcccaacactttcctcaaagtctccgttctgcagctcgtgcaccacaaatcatatgatagtcatcaacctgctcgcgaactacctacctgaagagaccgatcctggctatgaagatctcctcagcgcgcttccagcgtacaggaggaggctgtacgagaggtatccgccggtttgtgaacgatgtgagccgattgcagaggaagagatcagaaaaggcgattacaggttcgaatcttggtcgcatctttgcatctttgcgttttgtatcatcaatctggacccattcggactgactgatcaatggtcgacgttgtttacctgtcattggtaaactcttctccagggcaaagacctcggcgcttaacgggtttctcgtgaacacttcaacagttcttccctcaaggatacacggacctggtccctcctctttaatctcaccggaggtcccagcgtcatccgagtcaaatcaaccgaggggcccttcattcgctatcaaggtgctttgggaactcaaacggatcctctggttatctagtgcgggtgtaaacctagtcatttcatctgcttgtatgtgatttggcgttctctttcgacctcactttccttgttcgatgcaagccccgtcacctgaatctgtctatatgtatttgtgtacttggaaacgggggaaaagccatctcatcgacaatccgccgtgttgtccattcgattgatatcgttccggttaatttttcctcgtccgtaatctctgccggtgcggtactttcgattttatggatagcatgggatccaacatggaaaggtcttatcaaggcccgatcaattgtcggtccgacaggacttacaccaggtggtcgtctgagaaggaaaagatgggtcgttagtcctcgttcattcatcctttctttttgcgcttagtcaatcgtcgaaagacagaatagtttgaggttgacattctggaatttgacagcaaacaatgctaatactgtacccgatccggatcatcagcgggctgatcgtggacctcggttcgagagagatccgcggagtttgtcctactgagcgagcgattcagatcgcgaaatgctggatgggtctccatctcgttgttgaactttttgttagtcttcgcttccttaaaaccagttgcctctttgattcatgatttaactgattcagatcggctgccgactcatccttgcgctgcaggttctttcattctacgtgtacattgtcaacctgcccctcgtccgacttccccggcctatccatctcacgcggacggagccttcgtctggttctgttcaaaaactccagcgccccgattcattcgatcctaacaccggtgccaaagtcagcagtgactatcagatacgttcgacgtcgggaccgacttacagtagtccgtcttcggtcgacgttttcggaagacctcatcatcctcttttcggttcgggcactttccctgcttggcccgtttccgctgcttctttcgctggtcctggttccggttcaaatgccggtgctggtcccgctcagttctcttcttcttaccaggtcaaccgagcgggagacattgatggaagcccgatggactggcaacctacgttatcaccttctcaacccggtcaagtaacaaacatggatgtcgacaaaatcaagagcgataggaaagataagatcaagaaaaagagagcaaagacaggagcgcgtggatcagtgttcgctattaagaaatccgtgtttgatcctgcccctcccgatagtggagctgtagacggttccgacagagagggttcagaggaggatgaagaggaagaagaagaagaggacacgacctggctagggttcaaccgagctcctagggtctttcctctatccactcgtctagaaaatcaaggcgggaacggaattgggcctgacgcggccggtggattggagagattgtttgaaggctggtcgattggtgaagaacatgtgccggtggaaacgacagggagtggacttggtgaccggtcggacggccaacgacctgaaggtctcggtcggttggttagatcattctttgcgcgcgggtagactaggaaatgtgctgtgtatgtatatgtgccgtgtgcagatatcatgtgtatgagaaccgatgtgaatatgctagcgtgttcgcggaactagaacctggcatctggctcgcctaggatttttttttctcaatacatcccacgcagcaaaagccaagacgtcaccggtgatgcggtcacctacacgcactcttcatccatagttggagtaagttttccttaattgggtcgcctgcttccatcatcttcctcattcaatcctcatctcttgcatctcttcttgtcgtttcttgttctttccgttttccataccttactctcctttcaaaagtcaactcgaatcattatgcgatttaccgctgccgccgctcttcctctcctcgccgtcttcggtggccttgcctcggcttctcctgtgaacgagatccaaggtaactggaaatattttgtctctttgtcactctccctgtccattgctcttgcacttctcgactgtatttttgtagtttactccttgactgacagtcatccgtttttgctctctgaaaggccgaaaaatcgaggagcgagtggatcttacctcgctcttggcctcggtcacctcggctgccggaggcgacctctccagtgttctcgcttcagtcaccggggatctctcgagtgttctcgcgagcgctaccggtctcgcgagcagtgtcgctgcggaggcaagcagtgttggggcgaatccaagcagtgcattcgagaggtgggtcatatttcttccatcatctgtgatatgtatgttcaacacatgtcgagcctttactgactgctaaggaattctcgtctctggtaccgtcataccgacatctagcgctctctcttcgatctctgcttctggtacggccgctgtgtcttcggttgctagtgcggcggcgagcaagacatcatccgccggtgtggtcggctctgcctcgtctgctgcgacttctagagccagtgcattagcttcttccgcggctgctgccactaattctgccgctgctgccgtctcctctgtcgtctctgcaggatccaaggcaaccgttatgggatctggaactggacttgtcgtctgtgtggctgcaggactcgtcggtgctatcgctgtgttggcctagtctatgatagagaagggtaactcccgtgtattttttcctttatcatccatcttccatctgaatctagtaaactagtatagatttagttgtatctttttgatgtgattatacatgttgtcactttccgatagttccgttgacgtcaacagtcagttctgcctcaactaaaagtcatttctgtgctccatgtctcacctggtatagggaactacggaagggaatcatggatgagaaagatgaggagatcaaacgtgacgagatgttacgtaagcggttgcttatgtgtttcttcccatcacctcctcagaaatatcccggtatataaacctgatgggctgggttcagccctcttgatctcccttgtacatattgatctcctcatctctacacctccctcttcgttatccaataaactccttcagcaagaaaacatcatggttgctaaaatcgctgtggttatctactccctgtacgtcgatttcatgtatgtttctttgttcgaatgcacgaattgctgaccatccctattcttctttgctttctcttctctccatctctattttatattgtccttttagttacggacacacctcaaccgtttgttttcgcttttatctgtgtgcgcgccgaccggctcgatctttgttccgtctggttaatgatctccatctccgattcctaatttgtccaaaagctctctgagtccgtcgtcgccggtctcaaagaggctggagcacatgtcgaggtgttccagtttcaggagattctctctgatgaaattcgaggaaaaatgcacgctggtcctaagtcggatctccctgtgatcactcctggagatctcgcaaaggtatttcccttgtcttgagacgtttcttcgatgatggctgctggggctgatcgcgttcggtatgattgctatgacaatgcgggtagttcgacggcttcctctttggtttcggcactcggtacgttcttagcctttttttttgttttcgtttttgtttttgttttgtttttttcgttagcctcatcagagcttcctcttttggctgaccagatctctgtatgtcttgtgttgtcccaattagatacggtcgagctccagccgcggtgtcctcgttttttgacgcaaccggttagtcgacaacatcgagcatctaaatgagtaacatgaagtttaatcttctctctattattccttctcgaccttcacctcgtcttcctccttaatcaccttgtcccatcctataggtggactttgggcttctggagctttggtcggcgtgagtcgttctatgatcccgtcaatctctccgttcgacgctccgcatgtttctttttttgcgagcaatgtctgaatgcagttttcttggatggctttgagatagaaattcgccggagtcttcttcggcactggtagcgcccacggagggcaagagactaccgctttggtgtgtatgctttcggatatcgtcgccagacaccacatctcggcatgatcaacttatcgctctcttttctttccatatcgtcctacgtacagaccaccatcccgttctttgctcaccacggaatcatctatgtccccatcggattcgtccgacctgagcttagcatcgtcgacaagaccgtcggtggaagcgcttacggagctggctagtcagtctccgtttcctctgttctcttgaaattttctatcctccatccttcaaaccagacatctaagctgacaagtcgagcatgcaacccatcgcttctttcctcttctacatctctcacagcgtcgccggtgggcagggacaactcccagtgaccgaggaggacaagctggttggccattaccagggacactcgttcggaaccctggtcaacacctttgtcaagggacgagacctttaaatagaactctttcctccaatctatcgttacatcgtgtaccaagatagaatttctttatggaccatcggtcagacactgttgtccatatagatatgttagatctctatatgaatatcttgtagacttgttagacagagaacacccgtgagggcgataacaaggatcaaagaggagtgaaagatagaggaggagtaaatgagaggagtggaaaaaaaaaagcgagtcatcaattcaaaattacagaccgcgcccacggcgttgtccggtccgagtgtaccgagccacctgtatccgacaaagacggtctctgaggctcttgtgcttcattcaatcctcaacgatcatcctgattccttctcgcacacacatacacacacgtacatccacacttgtgtttcctcattgacaatgccgacagctggaagtttgatctggtcaggcttggtgccagtgttcaagctatatcgtacgtgtcatgccatccttgtgaagatcaagaacggcgtatataccggatggggaacgcttatcgctttcaaccttgattctcttcttctctttctctttctctttctttcctctcctctgtgtttctgcatgttcgatgtgcagtgagtgagtgcaagaactattctgatgtggtccatcatcatcgtcctttccatcgtcgtccgacgattcggatgtgaatcacgggtcttttgcgcgtaagaaaaattcgagaaagaaaggcgctgattgcaggctttctcttaattccgaatctcttctccaactccatctgctcccgtatgacctctgaaaatcaaacaaaaattgatggcaacattccgaattcaccaattctaatctttggtcgcatgtaatctaacgcaataatcacacggactgcctttttacgaacttgctatcggatttgggtgacatgcagccatcgcggctgggttcgttctcaccaagaagggaatgttctcgcctgctgcctctaaaggactgggacaaatcactttggttagtcttctgcttcttccctatctctatcggaattcttttgagtcgcaagtcgtcaaaagttgctacagttgtgagagttaagataagagctgattcattcggtttttctcctttatctgtgcgtcgacttgtgcgaatgaaacatcacccttgtttctttatcttgactgttatcctaacgggtacgacacaacgacaccattaaaaaaacatttccctggttggactcgacagaacatctcgttaccatgtttgatattcgcatcgatcgtcccaagtttttcagcagataatgtatgtatcgagtttccatttcttcttctgtctctgtctatcggccgactcggttctccttcatgaattcaggtttcggctctgggaccgttaattatgtcggcagtattgtatgaactcatcgtaagtcggcgagaaggttccatatcgctctcgtcttcctccatcgcctcgtcctcttctacatatcggcgaaaagagagcgaaccgatgagtttgatgtgagtttggttaaaagactgatcgaggatctcccttatcacaccagggtctcgtattctcactcatcatccgagaaatcttctgggtatgtcatgtatcaatttcctcctgcttgctctctctctctctctctctctctctctctctctctctctttctctttcgatcctacacaggcttgagctcagatggtctactcgtctttctgtatctttcatcttaggtcccgagaaactttcaatggggtattctgatggcaggaagtgtgtatctatcccttccatcagcctcctgtctctatcatctatgttgccgagactgacaagtttccttcgtttattctatcttctcgcctcaaaaagcactgtcaaattggggtaatttaccgacggccatcgtacagagtgtagcgacaaacgcgccgtttgatccagatacggatcctacgttgggtgtggcttacatctcggtctttatgattgtttacaacctttcatttttctcaggtacggagcaactttttagaaagcatgtgtctgtccggtcgattcgcttgctgatgattgctctcttcttcgatcacggccaaccctaggcgcgtacaaggtctgtgcgtgggatttcttgggcgatccgaacgagccagatgtccgaatcagcttcaaggaaaaatggcgtcgacgaggacaaagattccaggcatggagaggaaccggtcggaaatctgttgaactggggtcggatccagagaaacagaaagtagccggcccagccgctgctgctgcttctatcgccggtggtggacatcgacctgcttcgttgagagaggaggatgaggcagaagaatatgcggaagaaaagaaagcgtcgaaacatagctcgatggccgtccagtcgacactctcaccggatagcatggtcaaccaactggagaaacatcaggccggcactcttcggccacggacaggcagcttcaacagggaacgtgcagaccgattaacaagacagatctcggccgttactgttgaatcgattctgcctatgcctctggtcgggtcatctttgcagccagataaccgggaacaccaaagtcctattccttctcacccaaacagatccgagatgatggatgataagccggaatcagcccaggtcgcggctgctatcgccgccagaaaccgatcaggtttccatcgttggttccatgcggtcggttccgtcctagccaccatcgtctcgcccgtcgtggcagccctgatcctggcgttgttatttgcgctcgtgccaccgatgaaggctctgttagtagatgatgtgagtggatggagtgatggaaaggtaccaaactcgccgaatgggacaccaattcttgcttttgtgcaggacgtgagtcaattcttctttcttgtgtgtgtgtgtgtgtgnnnnnnnnnntgtgtgtgtgtggaaatggcctgtatacggctctggagttttcaaattcagtggctgacatatgaatcctgtatacagaccgctactttcgtcggtggaatctgcattccggccagtttgatgttgttgggcgcgagctttgctcgattgaaaagaccgagctcatggtccagtctgcctgtgcctgcgatcctcagtctgatgataacaaagatggtgttgttacccgtcatcggctgttttttcatccaaggtctctccaacaagacgacgttgttcccgaaagatcaaaaagtcctgtcattcgtcgcgatgcttctggtgtgtaccggtgtttctttgttgttctctcgtccggtacaaactacgtcggacgatcaagttggcttacctttctacgtgggtgtgattgcgctcgtcactccaacagtctggaactccaacggcattgaaccaaatggtactgacccaattggtagcacctgaaggaggaacagacacattgatcgccttccttctacctcaatacatcttcttgtgcgttcattcttttctttcggctacttacgttgtcctctcactcggttgttgacttggtcaagaggttcaactgacatgtttcgcgctctatttccttctgagataggtttttggctagcacggtcctgacagctgtggctctgaacctgatcagctgaacggccaatcttggagccctcttcctcactcccttgtttcatctttcttgctcgtaccttacaatctcatttcatctctaaggacgtctttcgccgttttcctttgtcccctatcagtcctttgctttccttcctgcctttccttcttgtcaatttcaacacccaccgctaagttcttcgttggataattataaatatagattcaaactaattcaagtccaactgtagatcagcatcatttgccgttcatcatatctcattcatgaacttttggttcccctctctcttcgttctaccttgcttatatcttcttttttcttttcttttcctcgttttttttcttcttcttcttctctctcttgcgcgttcacgttttattggttcaaccatgaaacccacatgtctcctgtatcattattatatttgaactttccaaacacatacacaaacagagacagacagattgacaagaagaacagagacggttgtttggtgataggtttgatcgtacaatgcccatctttattatcgttacaacggatcgagaacaactggaaaggatgcgaaaagagggaaaaggcaaaggggaaaagatgtctgtggatggatcgattcggtcgggcgcggatgcgatccatgagtgaacgaaggaagatgatgaaacgagatagggagtaagaagagggtgtcgggctaggctaagtagcgtaagactctcatcgggtcgtcgtcctgaatttccggtccacagcgatacaaccagaacggatgaggcggatgaggaagagggaagagtcagattgaaggaaatatcttgaggacgagaagatcacccagagatagagatagattaagaaaccagggaacatacatctctggctagatattctctttctagaagagattcgatctgatgtttgatcgctttcggttccggtggaaatttgtttcgacttttctcaaagatgatccacaaagagatgaacagacaagcgcataagtaaacaagaaatgagaacatgaagaacaaggggggaaagaagaacagtaggatgaagaaacgtacacggcatctacacagagattcgtcaactctacccacgtacaaacctttttcgatttcatgattctcacgatcgctgcgtctaacaagtgggacctatcatgcatcactctattctctgtttgaacgtcttcttccacctatgtgtcaaaaacatcacgagaaaaaaggaaccgagcaaataatggaaaaacgtctattagtcgtgaatcgtctatgatgttttggcaatatatagcaagaaggaaaaaaagaaaaagaaagacagaacaaaccgtttggttctgctgaacctgattgatcttgatctttactctaggatgagtaaacttttcgttaaatgtgaaactatccgttcgaagaacgtcctttcccgttggatgtttcgtcaacactcggactcttccacaagccagggactgtaaagttcgcgacagctctggttcctctggatgccgcccaaaaaaatcgatcaaccattcagatggagagacatgaaggataaaaagtcggcgatattatgaggcagaagatgaaatgacgattggacgaaccgatgcctgtcttctccataatttcctcccagctcaacttactatgtccatcgggagtgatatccacctgattgaatgccaataagacaagaccttggaacagactaacgttgagctctttagtacctgaggggaaactagccttgagagtcattgaaaagagctgatatcgataatctagtagtctggattgatgggattgggtgtagaactgcttgaagctctcgagaggatgggccaactgtttttgttcgtttgcaatacaaaaagtaaaagagaggaattaacgacgaagattgatatcgaggcattttgctctcagacaaaggagagtatcatacaaaggagggaaggacaaaagctttccatgcttctgtgacagcaggatatctgtttcagttaagaacacctttgagtcagtatgttataatgcctttgacctaaaaagagtgttaattgaaaagatggcacgaacgtcggccaattagccgagctgagaacggctaccgatagatcagagtcatccacagggtcatgtttgattcgataagacttcatcaacctatgtcgcgcgttgtaaaccccggagaaatggacccaggcagaacaatcgtaagtggctctgtgactgtagaagacaacaagaaagagagtagtcgtactcagtggaaaggtttaggtccgccagcattctgcagtgatggagaagaggaaaattcgcatcagagtccagttttgtgatcgaagcaaaaacgacggcaagacaaataagcatacccatctccggtgatgaaatcctctcccagttcttttttaagtcggctgatcatgcccagttctgcatcgtccgatgcactcttccccaacaagagacgtttggccaaggcattcacgtagaacgccttgaactgaaaggctcgatgaaaagaatgtcaagatctgatgaggagaaggatagaacaagtaagaaaacggacgcacgacgtctttatcccgaacggatctaacgagatccaagagatcatcaagatctttctcgagctcatcggatgaggttgaccgggatctaagaaggttgtccatcgctttggctagagagacgataaggaaacgagatggggtgtttgttagagaaaagaaaattcctcgaaaggaaacaagaaaagagagatgcgtaccgatcagttctgcccctcttgcccctcgagtctgaagacctcgttcaaacccactcctgaccgaatctgctagtgatttatccctctctaataagacagcctgttcttctgttctgatcgggttttcggtcgggtttaagggcgaagggcaagaaggaactctgatggcgagcgattgggatacgagccgctcgagtaatgctcttgctgtgagaagtgttgtgatcgtggtcgagtctttgaggaagatatgtcaagatgagatgtgcggacggtcgaaataagaatggaactaattgagacatacctttagacgcatcttttatcagctcggccaccataagagctacccatttcccgatggccgtcctgagcgtactctcttttccaacttttctcgtcaaggaactcaagatttcaagtccttcctcttcaacctgcccttctccccatcggacggtaccagttccagcggcgtctttctcatcgagaatgacctcaaacggtctgattataatccactcggctagacacctctcgacggtctgttcggcgatgccattctgtccgatcatttcatccagcacaactctttcgagctcactcgcttgctcctgggaaagactcaggatctggtaaagggttgactccgaatgaacggaccggaatgtctgtgtaagaaaatccagaaccggcacggacgcctggaagagtttattgtgaagggactgatagtgagcttgagtgagggcatatatagttgggtggatcaggaaatggagaggagtcaacgaggcgacgagcgcacgagagtccagtgggctaggaagaagaacattggatagcagagacgccagatgagcatgagtcaaatggtattcagcttggagcaaaacggaatagcgaatgaggggaaagaaggagactcacccggcctgtcgatcttgctcgatccaaagtgtcaagctagctagactagttgcttgtaaagactgattgaggaacacgagctgatgaaaggtcgtttgtgcaagatccctatcaaagtgtttgccaaaaaggcgagtagaaagtagggagaaacggtcaacgatgagcttctgtctgtttcagagggacccagatcacacggacctaatagactttatctctggatgactatggcgaatcgatcttgctaggggcgacagcatcaaactcagtacgtccttttggaagcagtacggatccagagagactggttagttcgttgttctcaaaaggagggtaaacttaatcgatatagattcctcaggaaacacgttgtacatacgattctcgccttccaccaggaccatgctctctcaatctgttccagccagctaagacctcggccggccaggccctgttcacgtgcagtatgtacgagagtcttggcgatatcactcgcagacttctcgagctcgagctgaaccttatctacgatggtccgtacgttttcagcgtccttggcgagctgggaactgagcgcataaattgactgaagtgatcggggcagcctggagagtgccgaggagagaggagggtgttcagtgcagggaacggaaggatctgtgggcgagaatggctggggagatagtatgacagaaacactatggaggatgagttgaggtgtcggctgtggtgttgctttggacgatgatgacaaacaaggtgattcggaaggaatttggttgagttatctcttgtaatatcacaggggagtaggtagtgatctcgagagggatcgagacaaataggaggacctaccgggagcaaccagataaacctgtctgacagccggctttcctgaaatagcggacgctacagacggtccgttcagatgattctggccgagtgcgaagaactgggtggattgaaaggacagcatggtcgtatgaaggtttaggaacggatgagatcgagtttcccaagatggagagcataggtggagggctagggttgcggggatagggaatgtatcacgtgattatgtggctgctacatcctgacgatccatttgtaaccatatctgtgttcgaaagtaaccggccgagcgccaagtgttgatctccggatcaccttcagaaacgggacggaaacgcgtgcgtgggcccacgcgaggagacggaacatgtcgttatgaccgtcctgcttgatcgtacgcccagggctgaatctaataagacgatcaggcacagtcagggcggcaggccagtaccaacactctttctgctcatccttcttctcaagaagatcgaaccatcaaagttctcgatcggcgctggtcggaagagtcaaataagattaagatcaaagggatccgaactctaaacgaatgaaattctgaccaacagagagaccaagtaaggattacgcctcaaataagagcgcaggtatgcatatgtgtgggtgtctaaacgttttctctaaaggacgtatgtgagtcttggattgaggaatgcctgaccaccgcttgggtgtctaaagatgtttcgtcctgatgtgctgcacgatgctttgccaattccttcgatgtgatcttcttttctgtgttccttcctcgttaccaattgttatcattatgattattctccttctccctttgtacgtgcacacgggtttgtatgtgagagtgcgtttcttgatcgggctctgtctttgtccttcggaagttaatcgataccagatctcgtatactatataagaccgaggtcagatttgacaagacccaaagacctcgttgggaaaaacctcttccttccttccctcatcccttcctcgttcagcactacatttttcctcattccttgatattcctcttcgttccttccttctctctctcggactcgctcctttacctatcgctcctttatacatcgttcgctaaccatcttcaccttctcgggtcgctctttttattcccatcaagacatgaaatccaccatgttgacacagcacaccttgcccgatctcgtcctttcttttctctttgtccttctgacggtcaatttgatcatggccccagtctcgcccaccgcctttttctctttctcatctttggccctgtcgcttgcccaatcagccgacccatcgaccaaccggtttgtcctctccgccacctctcttctcgccattttgctcctccgcgcacggtccctcctccggtccctttcttcgtcgcccgtccaaataactgcgccttcagcagccgacgcttctcttggctttctcggtctgttcctctgggcatcgaaccctctggaatctagcacgtcacccaatgtaattcattatggcatcaagtcatgccttgttgttttcgtcgcgctcactttatgcggcctctacctcgaagctgatgacgacgctggaagagaagacaagcaatgccttcgggcggtgaccgaaaagagccccctccttcctcgccgcgagatgtctatcgggcagtcaagcaccgttgatgctcccatcagaattgatattcacaacaccttgctctggatcaccctcttgctcacggccttcattgcgtttagcacctctagtattctgacctggatattgggtggtgagcttctcttcttcccttctcctctcgcgctcgcgctagacttcgttctgataccggtatacatcaatcattctcacagccagcccagccatgcttcccctcatccctgccgcgctttccatcactctctccttgtcttcgatgtgagctgattctcatgtttttgctctccaactgatgttcatttttctcacacgcattcattttcctatccccgcagaacgctctctcgcccgatctcggcttttttttccgagttgacacttctcacttcatttcatgctgtcctgtcttacacaatccaagtctcgaacgcacctacctgtggagtttgggatccgctgtcaagacctgatctgaaagatgtcgtacctgcactttgcatgatcgcgaaagttctttactatgtatgtttgcttgtgctattcttcttttgcgtgctgttgtctcaccagaccctgatatccgcacggatgttcttctttctactcattcctcatgctctctcttatcaacaggcttcatggacgactgttgtcatgctcttctacaagatctcgaaagatcatttagacaccatttccggcccagatcctattctatcttccaagaagacagatgctgacgttgaggtggcccttttcggaatctaagctgagccgtctcaagcctcaagtggcaggctaccactggcaggccgcgagtcgcaggtttcaggtggaacgactcagacgcaacctccagcggattgtctgaggcgttcttcctcctttctttttctccttcattttccccatcaattgttcactttaggtttccttttgggcttctctaattcctctgttcttccgggttcctcttcttttctcctctcttctttttttctaaactctgcatcttcagttttctgaaacagtttccttctcggcctcatctgacacttatctcactcagcgctcctgtacttttacgaccaagcctatactctactcctggatacacacacacacatacatatacactcggttggattcatcctatactcatacgtctcattctgtttcctgatgacggtgttatctattcatgttgttctcatattcttctcaatctgtctgtcttgagctacgatgcaggtgtgtatcagggttctggggttttagaagatctaattatagttctttttagaaaagagacaaattcagcctcatctttcttcgaagctcggatgcgatcaccctaagagaggaatgtttgctgctgttcctttccctctgccaatcctagaggaaaaagaagaaagagagagccactcctttcatggatgtcaacacgtttaaggcaagaagaacaagaagacgaaggatcagagtggatttaaaaaaaagatatttagacagacaaacaactaaacagatagatgcttggaataaagtatgtaaacaagaggctaccaagaggattccatcatgaccaactgtcttctatattctcctcaccagcgcgcggtagggtgatcgataaattaaggtatggcagtatcggatcaatgcaattccctcactagatgattccttcggtctcaacgtctttcttatttattacttttatttatttaacctattgaagttctgggtctgaattgatcttctccgatgtcaatatcgatggtcttcttctccttttgagatgtttctctttgaatgttcagactcaaaaggtttaacgtaatagtgtttgggttgttcacttacactctctgtcgttctagttgatcggatcgagagcgatcgaattagttcagaagataaaggacaggcgaaggccggcttgggcgcaggtagcttcccactgctaaaacacacacacacgcactgatacacatagagacagaaatagagacagagacatagagtcaagatgagcatagaatggacctagtctcatctcctaatatctcatcatcttcgatgaagctcatcttttcgatccttaccctacctgttgcaaattctttgatctgtgatcttgatacattcatgccttcaatctgttgattccaaagaaaatgtgtaagaggctgataacgcaagatgactcgctggagacgtgcacatagctcttcggtagctcaactcttgcccgagtacgagaatgtcacggtctttcccatgcgtcacataatctttttaccccatgccagtaacgaaagaaaaagacagagagagaaaaaaacaatacatatacatatcatgctgaatcgatatccagagatgcaaagctggatagccaaatggcgagtgtgatagaagtgtactacagttgagttatgcaagaagcgcgtcgactgcgttcatcgatccttttaagatcgcccactacatattttcagacaaaaccgcataggtttcaggaagaaggtttgtcagtccaatcccatcgattgcgcgagagacacttgaaataaacgagacagaggacagacttgatcaggtgagagcgaaatccccttagacccaggcttagcctcgcccgtcgtcttgtcggtataatactatttatccagatcgcaggtcaggaacaagggtaagtgccgatcgcgtttgtcaatacgatttgttttgtgaaggaagaaaaatgcatctagtacaaggaaacgaaagaccgacttctcgaagatcaatcaatggcttgccctgtccatccgaatagcaagacacatagaaaacgttaacacggttaggagcaagaaaaagaaacgagactccaatcgatcgttcagagaatgaggcctagactcaccttaaattctcgaacacttaaacgtctcgtggccgaaagctttttgatattataatgatgatgcagagatcgttctttaaccctctttgatatccaattacaaaacttcagtaaagaaaaaatggtatcgtctcacctcgacatatttctcgccttcaccgttcgttttccatgtccctgatagtgaagctgctgagggagctgacgttcgaggtttcttctatagaacaatgatagcaaccacgtatagagcttataaacacacagctgcacgaatctttgaaggaaggcaaacaaaacagaagacttgccttcgggggagcggcctccttcttgacagactttgtcttcggggacttttttgatttactctttaggccttcctcttcagaatccggattggcaacccctagatgctcatcatcagtatcctttgagggattaggaggatgaagaagtaaggggaatccgaaatcgataagccagggtgttcatgactatggcgatgcaacactgttctcggatgaggcctgagcgaaactcacctcaacatcatcctgaagagcccagccgacaaattccgaccagacagataggcagacataacgaaacgatcagaaataagtctctggaaaaccaaaaacgagatgaaacatacaccgacaacgaacgaatccattggttcttgttttgctcgcttgaccattttaaacgttcgaagatcagatctaggaagcgatgagcgtgtgcgaatgtggatatgagatcgagtgtatgtgaccgaagaatgatctgtggcaatttacgatctttttctgtggacgtgtcgcgtcgcgtcgatcatgacgcgctgtaaagaggaaaaaatttagtccgttcaaatccatccgtcctccctccttttcttgctcaggagaagcactacttccattatccaatagaacctcatcaaaagttgctcttcacaatgattacatcgataagagttccaaccactatccctcctcacccgtgcgccctttgttgttctctttgctcttgcgcataaagaaaggcttacctcttttcttcgaagtcttttcaatgtagaacctattgcgggtaaggagcttggggcagtagccaataaacctatcaaaaagggggatctcgtgatctcggagagaccgcttttcctattgttagtttccaactgcttgtttccatcaagcctagcgggcaagacattggtttgatgaactgaataccgagttggggaaaatatttactatcagcgacgcaccgttctcggcctttctattctcaagatcggccgacctcgacccagaggagaattcctctttcagcgctctggaccgacatattgggtccgtctctctttccctttttctgagtaggcttctctcggtaactcttcgttagccaaagttcaaccagccctttctttgcttgcttctctagtcgagcgatcgatcaattgatggagttcaagtcggcgcaggacaagcaatgcttgatggatctagcaaatacccacccagagcttccctctacttacgtgagtacttcacttttgtcaagtcagaattgtagtctctcaaagaggggttctccggagcttgaacaacctactttgacatacagggagtattcaaaacgaacgcggtgtgcaccagactttcacaaggcggactgttccctcatctatctagagtaaactcgtcctgtcgaccgaacctttctcgacctcagtgggatagatcgagaggattgatcgagacttgggctctcagagatatcgaattaggggaagaactggtatgcaaattccatccggtttaaaattgcgcatgcgcctttggatctgacagaggctctgagcttattaacaacgtagggctggatgtatctggacaattcgttccgaacgtcagaagaaagacaggaagaaactcttcgtgtgctaggtacggctctctctctctcttcttatttgttctctttgtgcctcgcttgtgaaggtcggacctgttcaaactgatgtctaactttcctttccttttggcgggggaacttgttgcatattatacaatacacaggattcaaatgcggttgcccgggatgtacgctttgcccccttgagcgcggtctctcggatgaccgagttcttcggctccgagagctttcccaaatgctaccctcaccgccgttgtcgtcgtcgtcatcatcatcatctacttctgccgggcctctggatgacagcgaggaagtcaacgggtcgataggccgagagacatacgatcagatccaaacgattaaacaaatgttacctctagcgagcatggaaggcatgtacgatctcgtgaatgagttgaacgagaggctccgagttttgagcctcacttggggaggaccgagaggaatgggtcggctcgagtgggtcggagaagtctttggtgatctcgggtcggagctcaccggttcgaatggagggttgagttgtagatgctgtatctaggaaaatttgatagtacgtcgacgaacgcgcgagacgaagatcgtgacgacgaaaggacttcttcgtcggctgaaacgataacaaaggattgacctcagaagaaagacacaacatataagaaatctttactattctgcgttctgtcggacgaggggagaagagatattgggaatgaattagaattgaagtacgttggagtatattggagtaggaaaagtatagaaggtcggatcggatgaatcggaaaaacccgagtattgtacagaacctcagatatgtacttgttctccgctccaacaaaaagaaaaaattacgagacgaggaggcgagaaaaggaaaggaataacgaactgcgaagaaagattgagactacgaagaaagaacgaatatgacctctacaaataagacgaaatcaagtatgacgatatccaaataacggggaatttaaagggaattttgtttacttggaacacaacgctctaaagatcgtacgcctcgtcgatcaagatgctcttgtatctgtatactcaaacgtttcccatcttcaagcttctatgacaaatccaagggatgctgtccaggtgccgagtgaaagagtgttatagccttcaatacgatctatcaattgggatgctaaggtatctcaacagcatcaaagttgtgctcggatagacgctctatgttcctctcatacttttattgacttctaacgatcgatgctgtgacacgtttctgtattttagtcggatgctctctctcgcttctacctatattacccggccgatcttcgtaaaggatccgcattccaacactacatagtcttgcggagaattggatgtataggggactacactcgctcgagaaggccgtttaaaataccgagcggagctcgaagagcgaacaagagcgagatagaagatgaaagacagtacagcgcttctccggtagacacaaaggcccgttcttgccgtcggctttgcttccatggctcgacttcctcatgcatcgaaaccggtctattccacatcactgacatcaagggccctccagccattgtcgggctttccggccgtccgtcggctcacttcttgtttctccatcttgtcctacgtttattgaatcgacggaagaaaaaagtagaaagaaaagaaaagaacacaacagagtatgaaatacagagttgacctccgctttgctttcgactttatcggccgcacggtgacttctgcgggactgtttatctatgaaaatcatcatcgtagagatacatccatgggtaggagatgcacagttcgtcggttccctatcttcctactatacatgtattcttgtttccacttgggatatcgtcgtatgttctctcagcctggtaccccgcttcagcatagagcaccgatagaatactatttgtattgaagaagaaaagaataaaggacaatacaaaataaaaataaaaataaaacccaaaatcaaaaccagaacgacataacctgagcgaacgatcggatgagcagccgcacgggtcgggatagcttcgagaaagagagacgagtgaactactaggcccgaaatggatttttttaacctttctctcgctgttctttctctatcttttcgtcggctggtagtccagaggagagggagagaagagcttgagtggatgcatcggatgatttgatttgatttaggcagtatcaggcactctgtggcgggggacaatagagccggtcgaaaactttaaacggaattaaaacgaaaataaaacatgtggcctgtgagtttgtacgtgcccgtcggttgccggccgaaaaaaggttttgtgcctgatcagatcagattttcccgtctttgtgcctgtgcttgagcttgagcttgtgcctgtgcctgctcccgctcctctgagcccaaacatgccgggcgtaatttccgtaggtccttctccttgctctcctgctttggagttcaatcacccatgctcgggttcggatccctctcttcttttaccttcactctctaacctccaaccccaactccaacctgcacttatcactcgtacgaacagtccgtcttccaattcccagaatcgtttaataagtacgaagggagaaaaaaattcaaaagggatagataggagacagcaggaggaaaaaggtcgagcgttataaaccgaggagtcccaacccactttttccatagacagatcgacaaacaatccccttttcttcaaagaaaacttcttcgccctatctgttcaggggtttctctttcctttcgcttttgtctctcgtcccctatctctctctgtcttctactcctactcgttcggtcactaccggcctggtatcctgtcgtttctctcggcgttctttgtgtgttgttttacctgttgggtctgcttctgttcatcctcggacttctcatctaaagcggacaacgcaacgaactcagcctaatagtccgtcgtctcctgctgtatgacctgggcaccccacacttttccacacgtacatgcccatcacgatagtcaatccggcccacttctctgcgtattcttctcaacggtttcctaaaccacatcatccctcacagccgcatccacaactagccatgtcgctctcctacccggatcatcatcatacccaaccggctttgcctcatccgccgagtacggcatcttcgcctttcgcgtgggctcctccccctttgacaacgaatccacagtcgtcaattgtggaacaacatcaaaaggcacatatcccacactacctcaatcattcaccgtcctcatcctcgtccacgatggccaatccgatgctcccgccacaatcggccagcccgtttgcgtacccaccacctcctcttcacgtgtatcctcaacagacagcctacccgtcccagggggctccaggcccagcctcccaaccaacgctttacacgttcaacgatcattttcaatcctatcaccaccagccctcaaacatccttccagatagacaactagttcggttggacggggccgaagaccatcactcgccggacttgtccgatgagccgcaacatgcttttcaatcctcatcagccacagcttatccgaatccccctgcttacaaccaatccgttccagcccaggttggtagcagatacgtcgttcatcaagcatacccgcccgtgtctgatgggattctgtcgatgacacagagggtggagcctatcgaatggaaagcagagaacggcaggtcagatcttgatgcctcgactggttcggtcatcaaaagcgcgcctaccgatagaccgttcagatgcgatcaatgcgcccaatcttttgtaagttttgtcccggtggtcatctttcggcctctttcaaagagatagtcagaaagaactccttcgaaaaacagtcgatgtgaattttgtcggaaccttttcctgacaccatcttcctctttctcggtacttcttatgatagaatcgaaaccatgacctgaagagacacaagcaaattcacttgaccatcaagtatgttctaaacccatcccaaattgtctacatccatatcttccttcgagatactacgctaacttcgacggttaatcactcgttcctaggccattcccatgtgataaatgccaaaaagccttctcgaggaaggacgcgctccgaagacattggctcgtcaagggatgtagagtgaatgctcctcggcaggtggcttctgatcctggagatcgtaagatccttctctttttacacacatgtctctttatctgtttcaatcttctcatgaacttcactcataatccgcttgcttcgcagtcaacggagccgacgccgagcctccatttatgtctcgatctggtagcttgatgacgcacgcgtcgaagcacaggcgtctccccaaggaccataaagcaaaagagaagacatcgccagagtcgagggtacccagacagacagaatctttgaagagggacggaagttctatcagctcgaaaagctcactcgcagactcttacggcaagaaggaagatcatcttgatgagcaatcagtctccgaggggttctcagaagttggtttctgctttctgaaatctcatcttcaatcttatctcacgtgctgatctagatcgcccgatcgtttggggtttcttttcgtctcatagcaccaaataccttacgggcatcgaattcatccatatcggcactcaaacatgtctccttcaccgagacatcttcacaatacgccactgcttcggactagtcagccctatgctaggctcccctcgccccaaccaataccgatctcgtcctcgtcatcttacccttcggtatcttacctgtctgtccagccgtcgagtatatctatgccccgcgcttcgtcctacaccgatttatcgttcgtttcttcatccgagtacattagccgaagttccacatcgaatctgaccgggcaaatcccttacggtcaatctaatctttatatgcctccatatccgttgccatacgctggaccctcatcacatagtcagccagctgatcagggatcgtcgtataacgagcatcaagcgcaacaacaaagccatagccaatcggtcgatcattccgccgctggttatcaaccatcatccttcagcgagtctccctcggtcgcacagacagaaagatccggtccatggaattcttcatcgtcctctatcgggttgacagaccaagtcgatcaaaacagacggactcaaatggtttatcaatctgctcacgaacgaacgagccaaggcgccaacaccctaggatccacatcggccccaaattttctgtccaggccgtccaataggtcggacggaaggttctcaagatcagaagatggtcgacaggaaggttaccccgaacaaagttaccagtcctcgtcctcctcgttggttccaaacaatcatcatctgcaacaccagcagcaattatctcttgggctggaatctcgacagcatccgcttcatcaataccagcagtctcaaccttccggccaacttcattcacagcatatacacttgtcctccaatacacagtcatcggttcatgtacaacaccatcagcaacagtcggaacaggcagaactgactggctcatatccatctcattccttcgttcgatcggttcccacgcttcagcatcctatgccattgaatctaaactctagtcggccgtaaaaacaaaaacaatccccccacccaatttttctcatgaggctgcatattcatagagtttcgaaagcattcgactttcgggttcccatattctttatctcttttgatttcttgttcaccttctttctaagaaaaatagtttccttctcagttcgatctgtcttctcttggtttgtttgtacaaatgtgataagtatacacgccgtcgtcgcatcacctgttgtcaagttttcatatcccgcattcagtcctccgcatccactcctttgtttctatttacatttttcatctatttcttctctcaaactaacaaatattctcaaaattcacgatacgacgcttctgacatcatgacatgtacacgttagtttttcctcttgttatttccttctctttcttatctttgccttgatcttttctcttcgttcttttctttcctttcaggtcctgtatgtctcgtctctattggatttgctattcttcctgttcttctattctattgagtttttgtttgcccgtctttctttccgtttgttttcttgtctgtgtatgtccgtttgttgctttgcgtcatgttctgtctcgtttctacacgttctgttggttcatccttttatcaggcatgcacacgttcacattataggtcctttactttctacacatactgtttacattggatcaccagatcatcggattttatctcatcttttgtaaatcaatcgattcttggtctttggtgcttttcctctctctccttcgtttttatcttacacgaaagatcttactatcttacttgcgtttcattgaggttgatcgggaagtaatcataaaccaagcaagtccgaacatcataatccctttcctccctctcttccatcactggaaaaaaaagaagagaaaactctggagacatctttcaatctctccatccttgggagttctggagaagcttgtaaaaccattcggtcgtgctcaggtgtgcatcgatatggatcctttcgtcgacggtgtggaaattctattaagtttgagatttgggtgcatcaggccggtccaaagaaacaaaaagagatgtacagatatcagtgagggggtcctcctatcttgagggacttgaaaattcattgtggtcacgaagacaaagggatgtcttgaaccgctaacagatggacaaaggtaacatatgaagaaaagtgataagaagcaaaaaagaaaaagggggttcagacgaaccttgacgagttcaaggctggcgggaacaaatctgtagatatgttccgtcaaattccaatcccatttagcttaaaatggcaattcacacaaagagccaaacaaacaaataaacagagaaggagaagaacagtcacgtcagtttcatcggtttctttcttaatcatcccatcttgagttctacatcatcccgtctgtgtttcgtattgttttgataccaagagagacacaagaaggacttactgtcagtgttggcaatcatcccactcggagaaattcccaccggctcaaatacttttcttgttgtacccgccaccaattcgaatacctttccctcggctggtgtgatgggcgccggttctaacccgcgtccgtcctgtactttcatccttatcccgtatgaacttgatgagaccgagtgcggttcgatggcgagtatagaagagtcgtcgaggccgttggagaaatgagcatcgacatgaacgtgggcgtggtcgtgtgattggatagaatcagcagtaaccagcggactgatatcaagtgtcatgttgagcgatcgggcgattcgagaaacaatctcttgggtgtggacataggtctcgttgacggacgagaggaaatcgattcgatagttgatcacagcggtcgctacctcgggaagcgcgttggatttactaagttcgtgaagggagatttcgtttgatcgattgatcaacctcagttccagcacaagtgagataagaaggaaaagaagaaaaacaaaatagggacgaacattcctccagaaaagatgtctacagcttgggttgtacccaaaaatgctctgatagttcggtcctctccaatctcctctgccagatcgtcccactcggcagggtttcggattcgtctcttcaaatcggtaggcatgtccggcccgaatcgttcagcacattgaaggtacttcaggtaaggagttgccgccgtcaactttggtcggaaaggggatgcttcaaggtgggtgatcaaaagagagaggattccgattgaggtgtgttcaggagggacactaagtaaaagaatgtactgatgttaaacttcttcataacggacgagtaagagatagtaagcaacaatcgaacctggaatgaccacctggggtatcaacctccaaaaccaaattcatactacccttctcagccaagccaagactggcaaacttggctccataggcttcgtctactccagtaaatccctcatcgacaaggaaagaactatgaaaattacggcagacatcgagtgagcgacgaacggaagtgagcaggagaaaagatgacaaacattccgttaggaccatatcgtttcaacataaggtcagccagtggtccggctcctcgaggacctccgatctctgatgcatcagtatgtgtacacctctcggggtatcagcggaaaagcttcgtgaaccattcgagtatagtgagtcttaccttcatcgaatccaaatgagagcagaatggtcctgaaaaccggagcgtgcagaagatatttccgcctcaatacacgaacgaacgcaagtaacttaatgagatttagaatcaaggacacacctctctggctcaaaaccttcttcgattagtttttctgccaccgccaagatagccaatagagtgtttttacaatccgctgatcctcgaccccaaatccatccatctttgtccatcttgccctattttgtaaaaataatagtaaatataaaaatcagtcaaatcagatcatcctgggtaacacgaaagattaaaaacaaaaaacaaaacgatgttatgtacctcgaatggggggtgggtccatcggtgaaccgtagcgtccggaacagggacgacatccatctgttgatagagaacaacaaaagagtcaatccagagcataaatctagccacatcagcaggcgagtttgtaggagaaaagacgtacgtgcgccatgaggaggataggtttcagagaaggatcagtccccttccaagtataaagtcgggcgaacgagttgacgatttccaagtccagatgctccgttctatcagtttcagaagagatatgcaatcagacaaaaatcagcttctgaaggacttttgattcttgcgtctagaatatacgctatcagcagagaaaaaagtcacaaacacggtagggaactctaaatccaagaactcattgaaacgactgatttctttccaaacgggatccaaaggatctacgtgtcgaggcagatcgtcatatgagacaccagggatttgaactgatcgttatccatcgaccgcaattatcagaggatcgccagcttacgattagtatcatgatcgattaagaaaaggagtgtacgaatgattaactcaactggctctttgaagtcgggcagcggccttggcagcgtacgcattgtccttcataacatgctgtgttggtgatcgatcaggacagaaatcagacggaccaaaacggatcacagaagaagcgtaagttatctcttgttcttgtctttctatgaccttagctagctagatagacatgtgtggctgagaagataagaaaatgtagatagaacgatatgaatcaacacgtacccaactcgaaccaatatcaagcggatcgacctgtgtcgggcatctgccctctttttctaaacctgaccatccatgatctctgatttcacctgtgtcagtcacttgccgtccgagcacgctcgagttgacttttcggctggaaacagtcacgaatagatagacacaaccgaaaaggaaggcccactggaagagcaagattttggtaatttttctggatgcagctggaggatcggccactgcagcaccaggggaaggtaggacataatgtttctcttcgagtgacatcttgaggtatctcggattatgaaggcaacagttggagagaagaagagaagaggaatcggatggaagatcttcctctttttaatcattgtctcaggtagatgatgttcggacttgaccgatctaattttaccttccgtttacgcttcacttttcttttttcctcagtctggggctcgcttaatgacttgaacgaataatctatcaattcatgattctcacttgcccagtctggccttctcccagaatgaaatctcttcagtcacggcctttcccgttccaaatgaggtctgcacaaagaagaccaatgcggggtggcgcataagtttgatttcagtcgaccaatcttttctgtcaacaaagtgaagagatatacgagaaggtttgtgattgagcataaaacttacacgtaaggcttggactagaccgtcataaatggtgaatgtgaagatctctcttggacctgactctttgatcttgcctgcttgtgaggtaatcagccgggccaactcttggcgtagtcttgtcatactatattcgtttgtccgatagacataaagtagtcgacgagataagcgagaatcttgaaaagaaaagacaagaggaaagaagagaacgagcctgccaataatcatcgcttcgtctgctggtgtgctcaagctcaatagagcgttaaacaaagtgacatattgtacagcgacctacgacaggacgagacgaaatatttagcaagccttctatacaatttgcacaagtctgatttgaaagaaaggcaaggatatcgactcacgctctctacctttgaatccttgacttttgtcgctcccagccccaggaatgaagcgcccaacccggctgtttccgccaactttctcaaagactcgacgttcgtgcccatgtgcttctgaaacaccggccagagagcaagtcgttgacgaataacgaatggctcaagcggaatacaacctcggtcgagaagcgcttgaaaaattgagtcgtttagtcggatcatggatagcagcgaaggaagtgatggaggaagtggggtgagaagcgtagtgagaagttgctacgatggccattggcaacattgtcgggattaaacggtgatgagttgaatgtgcttgacgtcaacacaggaaagagtgacagaagacaggaggaaagaaaacaaacctgaacgtagttcaaagcaggatcgaatatctcatgccacatcttttgtaaccgctccttgtcctctttgtcttccttttccggctccttactccctttccagccgtcagccagtccacctccggcgcctacagagctgattattgaattctttcttactgatcttcctgccccaccacttcctgattcagttgcatgctcactttggatatttagcaatctatcttgagtcgccaaagtgtccggtcgagttgagtacaaacttagtcgggaaaagaatcgagtcaaaaaggtgtattctgcacaggcgttgtcgagaagaacgaccataatcgatctgaatagagcttctaatgggagtttctgtgacaaacaagaaagatatatacgagtgagatcttatcttcgaaactaaaagaggcaaacaggcaggtagcgagacacacgagatctttctcatccgcttgccatgcaagcaagaccccttcgccctcaatccgagagttagccaagagggaaccttcgagctctcggtcagtctgttcattgcctccgttaggtttgacagccgatgttgatgctatatgaatgaaacggaacaaaacaagagaagtcgccgaacacttaagcgacgaatataggaaggaagtccaattacactagaagaataaaccaaaaactgactattcagatgtgtggtcggcagagaagaggaagacgtgagcgacccgattggttctgatgtatctggacatcgtgtctagcaagagttgaagagatcccatatacagatgttgagccttttctcttccctttcatccgcctatgcaacgaggatcaaactgaccttgagcgtttgaatcactcggcagtatctcctgaaggatgtttcatagtagcctcttgtcctccacacataactccgtttgatctccgccgcaatcgctggtgcctctctttccaagaactcccagagtggtttgtttttgagtaaaactcccgtctgaagtgtcggcaaatttgtgctcacactcgcactgatcggattgagaatttttaaaagatatgttttaatctttcctaccgctgtcactctcagagtttccgcggtggtcaatagagaagatgccgcctgaactctggtcttacgaaggtgaatttcagaaagaatggtcgacagagtatgtgcagcaggataccaagcttcggagacaggcgtgtcgaggatcaaagtcacgagtgatggaggaaatgttatgctctctatcagagactttaatggtttctcgatagacttgagaaagcgaggagctctcagcgcaaaacttgtaaaagctgaggataaagggaggcaggagactcacacggcgtccttttcccctgcgttcaattgcttgacttctcgaccgtagatccttcagttgaccggagacagcttgtagatcagtttggaatgatgttagaaaggaggaaagattcgtaaggagttctgtagaagcctagcatggtgatggaccccggaccatggagggttagttctcaagtcgaaccaatggcatattaatgaagataaatacctcgatctgatcatgaagctcatgatattcttgctctcttgattcaactgttgtaatcgaaaggcagatacggtgaaatttatagctcttaggaccaggtattgtgaaaacgatcagagtcagaaacgaacagatagcgaggatggcttcatcttcgtcgtcttcttcaaacgaataatcctcctgattaattgcgtccagaagctcattctgatcaggtagaggagcgtcctcaaagtcggaaaacactgataatacagagcaaacgagtgagatcgtcatgagaatatgcaggccaggagaaaatcagaatctgaattacgaggaggaaggatctcttggatattgagctcagcaggctgatgaagtgacaacacagatcagcaaaacgcccggtcaggaccgacagcatgataagggcaatgtgacattcttagatggagtgttaaacatacctctatcgttgtgtctgcttccataggatagtttcgttcttttctgtattcaagctgagaggtacagagagagtgacaatagccaaaagtgtgaagaagaacagaagggcgatgggatgtggatagaagggaaagagtcgaaagccaaattcgttctcgttcttgacaccaacaacatcttgatcttgatcttcaatctcacctacagcttcatctcatctcatcccatcaatcttccttcttaatcttctgctcttaatccgatgaataccattcaagtacgatccatgttctgcattgcctcacttgtgccttttgtattattgactaaccactcatcggtcacagagctctttctgggctgtcagagattatctcgcaccggtacgtcagatcgcctcgatcactttctgttctgtttgttctcttctttcctaggcacggtgtgtctcatgaatataaaagttcatctggttctcatgggtggcaggttctcaaagaatccaaattcaaggaacacggtcgaatcacgcctggtatgtctattccctgatctatgttagcgggtggaggtcgaaatgcgagaacacagggatagaaatattgacacatgactgagcaaggagagcatggaacggttaatatacacctcagtgactattcttcactagctgactatgtgttttgtttctgtcatcgtcttcatgttcgcttggcaaccaccatggccattgtcaacagaggaatttgtggctgccggcgagttcctgacatacaagtttcccgtttggacatggtctgtctagctatatttttttgctatcacacgatgtctccgactaacatccacttcgctccctcccatcttctttttccatttgcccaaatctatatagggagcagggaaatccgtcaaaaattcgagactttcttccgccgacgaagcagtaccttatcactcgtaatgtgccttgcttaagacgagcggctaacctagcatacactgatctggacgaggtatgtctgctctcatcgtctattcggatacatgtcagccatcggatcgaatgatggatgagcgcgctcactcatctctcttctctcttcgtggcaacccaggacacggagagaatggtctcattcttggacgaggctgaagaggatgctccccctcctggaaacacaaaccctagccacaagtcatcagcagaggatgacgaaggctgggtagagacccatgctggaagatgttcgtcattcacgcttttctgtctcttagcaacatttccttgatcattcgcttactcatcaatattatcatcgcggatctgtatagcgacaaacccagggtttaattctcaaatcccacaagacattcctgatctagaggatgatgaatcatctcatttcacgcatggttcttcaatctcggcgaatgctagtacatctaatgagcctccctcgctggatgggctaaacctgaacgagcacacgctggatgagatcccagacatggatgatattccagacatggacgatgaggacgaggacgggtttggaggtgtaaaggaggtagaggatgaggccactgtaccgtaagcctctttccgccactcttggctgtggcttatcttcagttccagcatgcagatcaacactgacattgacatgtatctatgataaactccgtagaactcaacctgtcaagaccggctcatcaagaaacaataatttgctggctatccggacatacgacgtcatgatcacgtaagtcttgatagcaagagggcgatgtggtattgggataccgtggcttcgaatattaacgacgtttggttgccggaaccgtttacacagctacgacaaatactatcaaactcctcgagtatggcttcaaggttatgatgaagttcgtggaaacagtctttctatcctatttgcgctaccttctcacgtgttttgttcgtgatctttcttatttctgtttgttgatgtctgcaaatcgaaacgaatacgtattatagaataaaaacccgcttactcaggtcgaaacgtttcaagacattcctcttgatcatgccaacaagaccgtgacgtacgaggcgttcccccactcgactctcccactcgcatctgtccacccatgcaagcatgcaagcgtcatgaagaaggtaattgagaagatgggagccaaagcaggagaggaacagagaagagctttgggaaccaagacatctcttccgtcctcttcgacaacttcgggaacggcttctgcgacaggagcaaacacaggtggaaaggacaaggacaaggataaaaggaggtggttgggaggagccatcaggaaggtcactggaggagacaaagagaagtccacaacgacagcaacgagcgcgggcacaaaagatggtgaagaagacgaagacggaggattgcaggtcgatttttatctggtcatcgtaagtctcacctgcggcttatgtgttcatcgctaacgttacaatcatcgttaaccaagttacgttttcctctggataatagttcctgaagttcattgccaggtatgtgttcttgttccaaccaatgttatattattactgatttgtcatgatcgaaatttgtttattgcagtattgttcccactatcgaagttgactctacgacctcattctgagcttttcaatcggttatagtgaatgcgttatggaagctatctcgacatatgtttctttttagatcctgcaattctctatcgaccctatgtcttctcgacgatcacttgagtcttctatattcatcgttttgtttgtttgctcgtatcagtcgtgattcggagtgtgatgacgtgaacaaactagatgcacatggaacattcttggatacaagctcccgggtgtgcattccgaagtgaacatctaacgaaaaaattcttctatctcttccctccttttccctttccgcccttcggaccacctttgccttttgtcccgccaccctttcctttttttcctccaaggccaacaccatcatacctaccagctctagccccctcggtcctggctgcctcacccttcttcccgaactccgtatcgaacgccccctttccaatcttgatctttttccctcctccaccggctcctccaacagtgggtttcttcttctttggcttagaaagcgaggcaaccttaggttgatcctcggtgatcttgacgggtcgaagagccttcttgacacctcggatggaagcagcgatctggttgccgtcgttgtattcagcatcctcctcgatagccatctttcgccgtttgtctcgtcgggagagaccatcgtatttatctcgcttacgctgtttttatgtcgaattcatccgtgagtgaagtagacaataaaaaaggttagctcttgaggatgtattcgttgacgaggcaaagtgaagaaagaaacataccttctctttaggttcgggagcagcaaccttcttgcccttgttatcaaatccacctacataagtcgccttggaggcatcggcagctgctttcttctccttttcagattggaaccaagttcgagcaggtcgggacatgatctcgtctctgtgctcaatcaggttctgtccttttcgaatctccatatctgccatcctcaactatttacgaagcggtcatcagagatagatgttgatcttagtttgggttgcaataagataaagggcgaaaagagagaggaaggtcaaagaagaatagcgcaaaaaatgattggaggacgaacagctttttcttccttctcttccttcaaaacctcttggacttcagtcttcaactcgtccaacctctttgccatcttgacaatggcttccgtaggaatcactcggtgcctaacttggtcggctggggatgctttaacacataacttgagcatcttccggtcagcttcacctacaagggagatcgatctggtttgcattaaagattgaaaacaggaaggaacaataatcagtcgatgcagttaagaaagacagatagataatagaaaaagtacgaaccgtcctttctttccagctcgagctgttcgaccaactcgatggacataagctgatagttgtccaggcaaatcatagttgattacaacttcaacaccctaaaatttataagaacaccctcgatatgacacgtcagtttgtttcgctaaatggaaggaaggaagattgtgaaagagcaaaaacagaccttgatatctaatccacgggaagcaagatcggtagcgagaagatattgaactgtcccatttttgaagtcgtccaaagcttgtaaacgctattgaaagtgatggtgagttagtaagaagatgacttcaatgacgattcgagattaagaaagactcaaccaacctgttcttgagtgaggttaccgtgcagctctccagccatcaagccgcaaagtccgaataaaactctcatctgatgagccagagccttactcctaaagaacacaatacacttgtccttgacggttcgcttgcaaagcgccaaaagaatggccgctctgtttccaccggccatgccttcctcatccaattcctctccccttttcctctctctaactcggacaaactcttgaacgagactccttgcggtcttcttaccagaatcgacaaacagtcgaacgggtttctctaaagagagtcgaacgagctcgtctacagagtcagtcatagtggcagagaagagcatggtttgtctcgatcgaggacaactggtgatgatttcgttcaattcatcagagaatccagcttcaagcattcgatcggcctcatcgatgatcaacacgtctaacgcgtcgagggtaaatgactgagaatttcgaatgtggtcgattaatcgaccgggagtagcgatcaagatatcgggcaacgttcgaaggagagcggattgagcggaaagagaaagtcctcccaccaaaagggcgaacctgacgtctagtcctttagcaagagcttctccaacggcttgacattgaacagccaactctcgagtagggcagagtacaaggactcgactagcgcttccctttccgttctttcccttatctctgtagatcaaccgttccaggaccggaatcatgaacgcagcggtctttccactacctgtttcggctgaaccaaggatgtctcgaccaagaagtgcaagcgggatcgctcggttttgaatcggcgtcggattggtgaatccgagggcagtgatatttcgaaggagtggtcgagagagagacatctgggcaaaagtcgtacttgactttttcgaactatttggggcaggagctgtaggatcttcggagaagaacgcagcttttcgggcgatttgcgcgtcggtctcgggattagaggtggtggaggaggcggaggaggcgatggacacgttgtcatcgtcagacgaggcggcctcgtcatcatcatcatcggagggagcttcttcgtttccgttttgggaagagagatcgatttcatcatcggatgccagaggatcggctgcttcggggtcttcctcataaacgacacccattccaaatccttcctctgccaatgaccaagaatattgtgtataagagtatgaacagaaccgcgttggttataatgaccaagaacttgatttgggcaatgtcagatgagacgaaacgaaccttcactttcatcttcttcgtcttcattctcgctttccacgcctccccagctctcagcgtcttcctcatcttcagacgattcgtcgtttccattggaagagtcgtcctcgtcctcctcttctgccttggctctcttgtcggttgatgttggcttctgtttcgacttcttaagggctgttcttcgacgagcaatgatatcatctatcgaagtcccggcctgtagagaataggtgaccagatatacaggggatgttagaccaatgaataaacttgcacgcagtccaaacgtaccccttttccactagcccccacgtcttggacgaagtctgccccaccccaagacttggtatcattatcgaagcctgacgcggtgagatcgaagtcaaagtccggattaagatcctcgacatcctttgccaaagcggcgggcgtgttggagtcttgctcgttatctgaatctattgtaagaatgaaatcttccgacatggctgctgctgtgaagtagagtgaaggaatggttgaagaattagggcaagtaggatcaaggtgtcgaaatttggaatccaggctgtgcagctgggacgagcctgacaaataatttgttacagcatcgctcgatgttgttgtgaccactgtgaccagtaacatgattacactttgaaacacacaaccgcctcagcccagtttcattgagcatcacccactacgtccatcccaatcaatcaatcaatcaatcaatcactcactctgcatcttcttctttgatccatttctgcatctatttgaatacatatgggtcgtaagtagtcagcactcctatctgtttactgagagtagagaaatacagctgatgacgattgtgtctatctggattaatcttagtcgcgttctctagtttgtgggacaagttgttcgggctagcagagatcaaagtattgatcttggggttcgaccttttcaaactctctctgtctattctcagctttcaaaagcatcttggttgactgaagacatgatctctttacttgaaactattgtcgttaaatctgatcagactcgataacgccggaaagacaaccatcttggtgagtcgtctgccaggcccactcttgccacgtcgatccttcgaatatctcatttctttactcgatcattttgctgtagtataaaatttcgctgggagaagtcgttgccacagcacccacgtatgtgatttgtcctgttggagctcttcactctttcagctcgcgtcgcttcactcaattctgatcttgtttgctcgatcatcacagagtggggtctaaccaagaaacatatgtttacaaaaacctgaagttagtctttatcccatactgagtctttaacatcagatgtgttatctggctgacaccgtacgcgaaacttttcagattcaacttatggtatgttgaactcataatttatttataccaaactctttcgagccaatcttacttctcgtattctctaaaatgcttacgtacgcgcacttcaacagggatattggaggacaatctagcttacggcagtcatgggtaagcctttgatctcttgttcctgagctttcggtcctccgcctgacatatagatgccttgtattgaactctcgtggtctttcgaaaaccagtcctcgtactattcaaaaacccaggcagtcatccttgtagtcgattcgacggatcgagcacgtttgggactcgttagagatgaacttgcccgaatggtcggtgacgaaaaccttcgagattcacttttgttgatattggcaaataagcaggatgtaccaaactgtctgacggcagcagtcatttcagacacccttgggtaagtctcttcttcctcatcttcaagtctgcagctatctctgtctacgtccactcatttagtatattttcttctctgcgcgacacaatcataggttaacaaacttgaaggatcgagagtggcagatcgttccgacctcagctctgacaggcaaaggtttgccattttcctctttcgctcacgcgcactccttgtccatccgatgtcggatttcaagaacgctcgactgatctttaatgttcttctgtgatacagggttgacagaaggattcgactggttggctacaaagcttggtggtacaagccggtcatgatcacttccaatgttcgcttcgctattatcatcagaacgtctatctttcgccatcctagacgttccttcttagattttcattatccacttctttcttcttcagctttttttttgggtctgtttgcttgttgcttccttatatctcacactccactcacttcgacttccggttcttgatctgtatccagcctgtttcttttggcgtgcttctacttcttggtcttctccttcaatacaacgatgaacgtataagtcagaatgacgaacaacagaatttctcttccttttcgcagtcattcccaacatattcaagttatgtttgaagggaacgaagcttcctatgcgctcaatgacgtcctctcgatcgcgacaacgacgagaattaagagtatactgcgtgttgaagtggtcaaagaggatagaacatgccttcctgatgatcttcaactgagctgtcactgcgttgctatcagcaaaagagagggaagatttgtaattaatcgaccagattatctactgctgtattctctttctccaaccacgtcttccaccctgtttctcctggatgcggcaagacgacagggtcgttcttctctccctctccgactttgcttgaggtgtcgtttttagagcctgaggatgaggttaagggagaagtagaggcaagaatcgaggacacgaggagtcggttgtacgttgttgttgcttgttgaatttttttgattgtccctagaagaaacagtatttggggtaaccacagtagaaatgagaaagcttaaggattgaatcccattgtgaaggagaggaagcagtgaccactcaccagaacatcgaatgacacgagcgacaactctttctgaattgataggaccgagcatcgatagcgcagcccaaacagttctgtagtgatctcttgcgcaacgtataatgcacaaatttgtttgagggcaatagtatttcactgttgccattgaacgtatcaaacgatcgagaagggaaatagtatgatatccatttcaaaaccggcatcggagtaaagagacaggagcgacaaaagaaagaacaaaccgttagttcctccactaactcttccccagccgtcgtctccaaagatctgaatcacgctgttcttgatccccaagaagatggacttctcatccaacgctctccgctttcctgtctttgagttcggcggaggaggcagaagcaaaggcagcacgttcaaagcaggaaacaacaagtcctcttctaccgtggtttcttcttcttctccgtcttcatcttgactctcatcagaagacaaaccggactttgtgtgtgttgtttttgttcgttttgagggtcgaggagaggattctaccgggacaaacgagtcgggggaggatgaagacagagaggccgaggctgaggttggttgggacgtaggaaagagaaactccacaaggagccaacgattctgatcagagatagagatggaaggtcagtctagctgaaaggcggcactggagatcgagaacgggcgaagaagacacggttcaccttgaatctaaccatggctaatgaacgagtgagagttgaagtaaacctgttgatacaacagggagagagaaagtagtagagggtggttaagctgtgcaaaaattcgagtcacgtgcaaagttcctcacgtgccatgaatgaaacactggcgatgcccacgtcatcacattcggggtttcactcggagagatcaactggggaagaagaagagacggatgaatggccaggaagaaaggaagtaactgaagaaggaatagaagaaagaggttattctatcatgctgaatagtagcttataagaacaggggtctattactggacagtcaatcggaattcaaaaacatgctcgatatatgaccatcggtgttgaagagaaagagagtgcggaagacgacgacgacgacgatgatggtggagaaatgccatggtgatcggagcaacacaagaaaaggacgacgaattttttcgaacctcagatcgcttatatagaacttggtcttccagtttttagttcttgtgttcactcactctcatccacccacttgttcacctttcttcctttatatcctttacaatggtccttccgatggcaatgttcgatccggccgtcaagccaagagttgtaccaggaatctcgaaccacgccatgattggaaaccttcggagtgccgcgtgagtttgaacggttgtcgcccctatgatctggcaagcaatatcgtcgatcggagtgctcatgtcgtattttcttgatgatgtgcaattctctcagaatggtatctgaagatgcctcgatcgagagttactgtgtgccctactttgattcacccaggtttgttcttgttctcgagttgttatacttcctcagcgaaatatctgccttatggctgatcgtgtatcgatcgacggtcctttcagcgtgtttgcccggatcgtggacgccaagaaggggggtcatttctccatacaacctagagacatgaagtgtatgatcaaacaatcatatctgccatcttccaacgtactcagcaccaaagtacgtcttttactctgctctctcgttgccacgcgcgtactgtcgctttgctaactctttgacctctagttcttgcatgaagacgctgttggacaagtcatcgacctgcttgtgcctaagaaggcgatggaacctggaaagacacatctgccttggttgattcggtcagttggatctaattgtttctgtctttcacttgaactctcaacctgacgtttcttgatcgcctcatcgtgctctctacttataaatcacagtcgggtcaaggttctcagaggaaagatgacattccgactcgaatgcgcgcctgcctttaactacgctcgagatgaacataaacttgaagttcgtctccttttgttgctctttgcccacacgacctccatccatctatatccgcaacatcctcacagttcttttttttctctgtgacgatagattatagaggacgactcccaagtggacagtggaaaatacaaaaagcaaaaagcactatttacctcgtcggatgtgactatggacctgagagtggtcgtatcgggagagaacatcacttcagaggcagctcaaactgaggctgaacaggcaaagatcaatgctggaactgatggaggaaaggaatttcaaggagaaggtggacccgaggtttgtgtcggcttcgattttccaccctgcacgagttacaagtttgtccttacagttgtccctaccacggctcgtccttatgtcgctcaactataggtcatttttaaagagttagatcttagcaaggacggtctcctaagcaatgcggtctactccgagtttgaggtgcgttcttctctatccataccttccgcgctctagtttcctccgacgtctgcatcgatctcacaaccattgtatcaactaaacaggtcaacgcaggggagattgttgatttcatcttccgagacattcctgtcggcggatttgagctcaagacagagaaaggaaaagctacgatggcctttgctgaagagctcggcgtaagcctagttgatttgactaaggcggctagcaaaattcgatcgccgatagacccggttctgaacggtcatctagtggagaacctcatcagggtgagttcgtcgtattattttttttggttctgacactagagtttgatatgagatttcacctctcgacaacctgttgatcctgatctatctatcgattgtgatgggaacgtaaacacagaataccactcactattggaagaactggattgctaaatcaacttatcgaggtcgatggagagaagtggttcatcgacaggcgctcacccttaagatgcttatctatgaggaaacgggggccatcatcgtaagttttattttcgtatttttaaacattctctttgctctcaaatatgatactgaagagttgagatgttcgtaaaaccggataggctgcgcctacgttctcacttccagaagaaattggaggagagaggaactgggactaccggtatacttggattcgagattcctctttttcatgttatgcgtttattcgtttgggtttcaccgacgaggtttgttctgcccttatgcctgttttcaattagcggcttgctgacgattgtatcttctttggctctatcaaataggctaatgcgttcatggagtatcttatgcgagttgctacggacgagagagacgatgggaccttgcagattatgtatgagcccgttcttttttctcttctaacctatcttcagtatcaatcagacttcaggctatagaggtgtgcgttagctaacacattcctatctcaaatcatgtaggtatactatccatggtggaaaggtaagtatttaacctctttcgtctatagactaggttaaaacacgttttgaacgatagtatagaccatttacgattcgacctctgtgttttccagaaagcgccggaggaagtcttagatcatttggctggacatagagatagccagcctgtccgaatcggagtatgtcttattttctttgtgatgagagtaatgcctctgattacgcgtaactcattgcttgtcgtctattgaaatctgtctttctaaataaaagaacggagccgtgtaagtccttgttggctttcgttcggttcagcttctctatactaattcgtcttgggtctggctcgcgcttatttcatcagagaccatcttcaactagacatctacggtgaacttctcgatgctgtatgtctcttgtgttacctttttattgatcgattcatgacagaggctaatcttgcatcttctatctcatcagatttacttgacgcaacgtatgtatgctactagagatacgtacaaaaagaaaaaagaacttaatggctgattaccctgttataaaatatcgttgaatggcatgtatagggttgtccaagcctttatcttgggaccggtaggttccattcttgtacttgatattcatacgcctacgggtaaacctgacacccgcaatgtgatcttgtttagatggcgcgctgtacgaagaatggtagactgggtttgcgatagtttgtctcattttccttccgctctctagtataaaccctctcgaaagaatatttttttaaattaggtcgctcgtaattgattgcttgcggttgatatagactgggatcaacctgatctctccatctgggaggtccgagatcagagtacgtcttctttcatacgtctacgtgttctttcagagcggctctctaatttatcgtctcttcaatgtctctatctctctagagaaacactttgtgtactcaaagatcatgctctgggtggcggtcgatcgagggattaggttgtcagagaaacggtctctgccacttcctcagagggagaaatggttgggtgttcgagacaagatatatggttcgcctctttctttccatcctaactatgcgcgagattggattgtgttctgacggggtttgttggggtttgatctacagaacaagtgatggagaaaggatggaagttagttgtacctgtgattgaattgtcctcatttcggctccttctgatcgaagttttctttacgatggactgattagcgaggaaaagcagttcttcgctcaatcctacgagaacctggaggtcctcgagtatgtttcttcctagccctgttcattgatgcgcacatgtcatatgtctgactgatgccgaacataaactttctgattacttagctcggcagtcctcgtcatgagtctcacgttcttcctctctgctgccgatcctcggttcaggtcgactttggaacaaatcctgaaagtaccgtacgtctcttcgcagactcatgctttcttctctttcgaggattatatatcttgcacttctgatgaagcgcccttgtgaaaactaattgagctaacattcggatttggctatgtatccgggggggatctgtagtgagttgggaggattgacttcgaacaacgtacggatttctccttctatcattctcattcaccttctacatttactcacatatcgatttactttacatacgatgaactgtcaaatcggcttaacatcgagcagttggtccaccggtatgaccaagagaaagcggaggacggaatggatggtaaagaaggagctttctctctctgtacactttgggccggtacgtccttttgttctgctttgctttacattttattttattctgcaaagaacgaacctgacagtctgattacccggggttcgtctggatttcaaacgatataaaacttctgatgaaaacaaaagttgaagcgcttactagagcaggagagttcgataaggagtgcgtagaacgagcagaaacaatgtttgaggacttcctgggatacggtaaccacgttggtctgttcagcgaagaaatctcgttgggaggtgagggtttaggaaatcttccacagggcttttcgtccatcaccttgatctccactgtttttaatttggatagaagaatgggttgaaagaagactatctgactcagttgtatctcgttcccaagtttcttcaattatttattcatcccaagattaaatagatttctttgtagttctttttgctgtgtttctctctcgcacagattgtatcgatggtatattctttggttgtgcgttcaatcaagagagatccgctgaatgaagaatgatacataatattcagaaattgaaaatgaaaatgaacaagagtgaagggatacgacatgtcaagtaaggcagacgggaaaacgcaaagaaggggagaagagtggatgggaaacatgtgagggtgttagaacgtccatagcaaataaaacaacaaatcaagcagatagagaagaggtgatggaagtatggacaaagaaggaagactacttctttcccagtcttccgaccacaaacactccaagaacaaccacccccaggaatccgatactcgctggtaagagcaaatctttcgggatccctgccaccttctcttcctcctctctctccgactttttcgatgacgacgtgggtagttctggaataggagccggtgcagaatgagaatgaaccttcgcggaggggaccattgctggttccaaagctgggtccaccgaaaatgcggtcaatcgttcgttcagcccaggtgtagaagcagccgcgacttccatcagatcttcctccgtcaaggcaggtaggccagccatagttccgggtgttcctactggaggtgaaaatagagaggaaggagcagcagaagcttcggtagcttgtcgttgagctttcaaagcatcttcccaagctttcccgccggaaaggacgagcaggactttatccgtcttttgggcccgggctaccgtgacagcgtctgtcacgtcgctatcagacgtcatgtgaacgagatcgccatcgtcgtccgtgtaggacagagtgaaatcagctgggtcgggcacgacgtgatcttcctcggacgaaggaaggaaaaacgggtcagagactagcttgccccctacaatctcccgaaggttctcaatcatgtccgacctggcttggaatcggtgggttcgtccactgggagtcttgaacttgaagacgtacgttccgtcatcgaccagcactgccactggcgcgcttaccgaaacagattggccatgcccaccgacatcggatccatcgtcctgcattccgacggcagaagcagaatctccaggaaggacctcgggcacggaagaggcgtatgagtcgtttcggatgtgctgattccttgacggtgttcgcagtgcgttgggtgcagaggatgaagcgggtgcgtgagagctcgagatgccggaaattgcatcgtcgtccattgcacctccaatggactcgaagaacttgccccacatcgggcctccagcgtcactgcccgttccgctatcagtgttcatgttgccgatctgtatgtgaagcaaattaggttatcagtacaggtgtggatgataaacaaacgctacgaagaggaaccccacctgttcaagtgtagcgtaggtcaacttcaagacgtcgacgatcccgaccaaccgtgcttccgaatcaaccacaggaagattgagatagtgcccgtctattgagcacgcgaaaaaggaagagattatcgatgattatccaatcgagccagatgtatgaagagaagatgttgaacatactgtgcatcttctttagggcgtcttgcacgctaagcgtcggcaaggcggtatccggatgaggggtcatcaccctgaccacactgcatctggtggcatcgaggccagcggcaatcaccctgagcacaacatccttgctggtaaagatacctacgatcttgttctgaccaccgatgacctccatcacgcagacagccgttgttcttcgctctttcataagaatagccgcttcccggacgctcgttcgaggtgagaccgtcgcagctggtttcgatgggtcaagcacggtcgtcaagtctggcaaagccatcttttctttgagtgagtctacataagcaagcatggcagctgcctgagggttatgggccatgttgggaccaagctcagactgaacgccggccaaggcagcggaaagctgagcggaagcgctcgaacccctctcgaccttggcaagtgcttcgtggaagactttggtaatgtcgagcagaccaacgacatctccctcttcattacaaacaggcttggatgatcaaagagctatagatgagcaagagggcttggtgatctggtggaggggtatgatgctgaagactcactaagtgtcggaagccccgagacaccatgagctggagagcttcggtggcgcttgtagtatctcgagtaaccataggatttcgggtcatgatagcggagacaggagtattccgagggtctagagactcggcagtgatcttgattgaaacgaagaagtagacggttcagcaaacagaggcgactttggttatagttgtcatgaatgttcttaccctgaaagccagatctttggcggtaaaaattccactgagcccttcctcatcgtcgacaaccaacacacagtctgtcctctttgccgcacaaagctgactagcatcagctacgctcatcccttccggcaccgtcagagccgggcttggctttagcccggcgaccgtgcccttcttgggcacggtttgctttcgatgactgttgtttctgttgtttgaagggaacgctccggttcgcttccttgagagttcggattcaatcttttttcggattgcctgatgtgaggtaagagtgagatgagtgatttgtcattggttacgacatcagatatgtcagtcaaatagtccagtctattcaggcgcatagacacagaacagaacatgagcaacgagcacgagcacgtcgttctaacagtctccaagaccagagaaggcggagggatcattgacaagaagatgaagagacaagaaaagatggagcgattacacaaagcgctgatacccagatcaggaactgaatctcgtccgcatctgatgtcttcatctcacactctctcgattccctcaaggaagccaatctctatctccttacatcatcctccgggactttctacaaattctcactcagagcagtgcggagagaaatttatgaaagttgacggaacaagagagatcaaagatggaagaacgatgatgacgaactgacctcgtctcgtttaccctgcttcaaacgggttcctcgatcggcaggactgtccctgccttgaaggggcgactccctaccgctagtttgagagaatacagacctaaaagaggagaaatgtgcatgatagacagcagagagaataaaaacaaaagaagacacaaagagaggaaccacaacggaacaagatatcaacgtctatcagtcaacatgttgattggcgatagccctcaagggactaaacgacaagattcgccagcgaaaaaagaacatacatgggtgattgagctggatgagatggaacagggatcctagacatgtaccaaggccgagatgaaagtaagggaacaagaagagtgagtaggaaaaggaaacaagaaggaaagaaagagagtctggaaaacgagaaagagaaaaagaaagatggaatgtttaatgaggagacgcgtcgcttgtttggttacgattgggttacaatcgttcgtaaccctaacacgtatgagacgcgtccaacgcgacgtgtgcagtgaggaagtacggctacaacccaagtcttgtggctggtgtccctaggactttatagtcttgcattgtgatcgtccatttgtcaataaggtggagaagcagacactcagataggtatcatagtttgtatgattgacatcatattcaatcagctggggagggatcatcttcctgaaggagaatgaattgcacgtctgacagacgttctatcaatcgttcttccgactaaatgcacactgattcatacttcatacatatacacgcgcatcaaatacccttattcacgagacatatctagtccttcaaagctcctgctaactattcgtctggtcttgcgctgctgaattttgagatacatatgtcccaagctgaacgagctggaagcgcaggcaaaacagataatatcccaagtgaaaggtcagattacaatcatgtttgttcatcaaatagcgacagtgagaaaaggcgagaagagacttactctttgatgagcataagaaccataccgcccaccgcgtttctccaccacacaggatctaacccctctccagcgtaccccttgcctacgaaagcgaggccgaggccaagtccgtgacctaacccccctacccaatcactccatccggatccggcccttccacctaagctcaaccctacagttccgactcgggaccgcacacccaaaaaccttgctaacgaagggctgtaatattgagcaacccatagcagaacatctcctgcgcaggaagcaaagataggcatgagcagagcgctgcaagccaacctggacaacgacgtccgtctaatgaacattgtctcagctggaggctggtcttcttcgtcgaccaattcaccgccgattgcatcttcggccccgttttcgaaacgaacaggatctacgcctccaaaaatgtgggcgaagaaaggatgcaactctctttcttcatcgtcactatcatcctcttcatcatcatcatcttgcgcttcttcctcgccgaatccttgatcaaattcctcctcgtcgacaaccccgatgatttcgtgctcattgatgtctgtccaatctgccggtggttgatcaaggtgaggctcccctcctgatataggatcaacaatgggctgatctataggggtaggcgcaagaacgggttctgcatcaacaggggccatcgctggtagcggagtggcaggatcagggacgggagcgaaagcaggagcaggtaaaggtaatcgatggatgattgtacgtcgattccatggaagacgtttgccttccactacgtatggataaaggaagcgtttcaaaccagctgttgaagaacaagaaaaaaatcgtttctcaagatcaatattgacctttgtttgatgacagtccatcgctggcagagccaaaggttgactgaccatatgctaagttgatcagaggaatcatagccaacgttaatcccggcccggggggatatgaccaacccacagagaagagctcttgaacaggagatcgatagaagcctacagtcggagggaatgcccgaggccgtgggaggaaaaagaatggagcgagcgcagtggttgtctcgatcagttgagatcgggaaaaatttaaatattcggatgccattgactggtttatcaacatcaaattgattgttctgtcagcaagatatatccaagctgaggaacggctgcatagttaacatacgttgaggatcaatgcgtaaggctaccaagatgagaagtactgaatcatcagcttcgactaagaaggtagtgatcagttgtaaaagcgcaactcacaattataggcaatccggtccaggcccaaagaggccaaccggcagggcctctggctcctagcgcgatccgtgacacttccggaccgaagaagaagcggaaggacgaaaaccctagtatagtcgaagtcgtgaccagcgaagaagctaaggctgtacatgttcaatgatgagcgatccataagaaacggacaaagcattggactatgtaagaatttagatcaaatagtcgtttcagatgatcaagcaaggacacttacttccaaccaagactagaaagaaggcgaggaggagaaatgtgtgatgatttgtcagaaagatcttcgaatctctatgagacaagacgaccaactcacaatacttgcaacctctccctaccaaagaatcgatcttgttgaacacttgcattgtcccgctcattgtctgaccaatcaatccagtttgtatctctgacgatcaaaaacaatgaaacgagagcgaagctgacaagaaaatagaaatacaaagaatgagaacttacttcagctagtacatatgtggatttacattgtggacaggtcaccgggcctttgccgcttgtacttgtttgctgttttgatgcaatccagacgagcaagcattgttcgtgcgcgagtaaagtgcatgagctgttaggtttgcgttcgatgatgatggcagtcacaagaatcgaaagggtcatgttgagccttctatcgaatgttgaacagaagagaccagagcacaaagggaagagactaaccagggatgaacccacttcatagctgaaggttccgaatcatcctccatacagatccaacatgtctgatcagataagaccaagatcaagataaaaagactcccagaattagcgctcaaagagtatcgtagaggatacacacatagcacactcaaaagtactacatggagatcatcctataaagtagaccacacacttacttttccttgaatatcattcaccgtgcgtggcctcgtcgaattagatgttgattccgctcgctcagtcgtatttgtctccgctgcaggcctcgaatacgatcttgatggagatggttctccaggcccggatttgacatccactaagggaggcatcgagccgagatcatcatcatcatcatgacttagcgtttgagcaaggttggcagcatcaacatcagccgggtgagcaagtggcggctgatcagcaggcagatgggtgaatagctgggacgaatccatatggtttccgagctgatcggcctctctttgataagacggcttggttgtttgaacgttgggatggtcgaaagatcacgatgacagaagtggaaggaaagtggaggaaaggacgaaaaaggttcactcccgctcgtctccgaaagcggctttctcaaatctccaaaggcgttcgttcttccttgctctcccaactcacatacgcactcgctcaagcaactcgtcgacaccatcagatgatcaacacccttcgattgtctactcggtctattccatcgccatcaatctgttcttctaggacattctcccgatccgtatcaagagtcatggcttctccgtcatcacctcctcgtcagcgagtttcattacccccgtccagcatggaggcttccattcgtgtcaaggtagccatctctcttctctttctttgaggctctttctatgtttctccgggtatgtctgacatgaatactgagcaatatcatctgagtaatcgtgataagctggaggatatcttgaagccgatccatctatctattagaaatgactcgtctaaacattcccaccatcaaccgatgaaggttcccggagcgtacaccgtatgttattgttcttgtcctttctttattccgttcttcacctccatctgtcaatacggtgaagcttatcgaagacacgtcttgatcttttgatgaaacagggagaaactcgtatgttccgaatatcattccctctgtcgcaaaagttgaaggaataactatactaagccgatcctattttctctgctccctgcaatccgtcttcagatttcttcattcatgctgtctcggctgagttcaacggaaagactcgaatagctcgtcatcgactcgtcaacaacgcactggtggatgaattcgctcgggggttacacgcactcagcttaaaattggagacggaggatgaatcgactcattgatcatatatagaggggttaaaagagcgctatcatcagagtagacatcatgtagttcaatatgatcaatgttgtgcttcaagataccatctaccgtcctttcatttgagtcttctctgatcaagagtttgttgaagcgtacgtcaattgatggtatccgataggtcggcgcggcttcgatggactctgatggaaaagtagtccccaatttatcatctgtgatgtacaacacgtccatctcccactccatcagtaaacataagcacaaacacatatatagtcctttgaatggagagcaaacttccttctgaaacacacacacgaacaaatgagcatggagatgtgataattctcacttcggaacctctagatgagcgaaatttgatcgaatcggtaaagtcatcaaaagctggagctgtatgcactttcatcgggacgaccagagacaactttgaaggttcatctcctcttcgttatcaatgttaccacatgctcttcttgattgattgatcttaccacgttctttagacaaactagtctcacatctatcgtacacgacctacgctcctctcgctctcaagacattgctctctattctttccgaggtccactctgtgccctgtccgtctctctatggaaactcacacgaactttcacctggcccttcagcaaagattcatcgaatatcggttgctcatcgactccgagccgttcctatgggtgaaacgtcgatcgtgatcgctgtatcgagtagtcaccgacgggaaggattcgatgtgtgtgagtgggtattggagcagattaaacgacgagtacaaatatggaagaaagaggtctatgtcaacggacagactctcgatgaagctctgtcgactcctctgctctcgtctgtgccatcatctgaaccaccatctttatcagtctggaaggagaactttccagagggccgatgggaatgaatgatcagagtccggccgggaaccgggccgggacaaccgcggtcgagagataaaacagacagagttctcttcgttgctcgctcaccttcgataaccgggagttcttgttttctccgttctctcattgactgtatggaaacccgcttccagataagctctatatgttggcgttcttggttctcttctgctgagtgtatcatataaggagatcgttctttcccgtttcttcgactgaccccgtcgttgtctctgacttacaattcacacttactgctggtcttcctgattctttccttcttgtgttcccatcatgcccatcaacaacaccgttccactgctgattgctcaacctatgacgtacgagttaattgagccatatggaaattgtgcgtctctgcagagctatcttagactctgcacagctcacactgacttatcgttctattcggcatctgcgctacgagcgatgtagtgattcaaggatcctgggatccatccactatgccagctaggattaagactaacgttgtgtaggtcttatttcattgcacaactgtgatcatttcttggacgatattcgatctcttgacgtttctcttgaggcgttcacaacgggttttaccagaccaaatcctcaaacggcttacaagtacaacagacaggcaccaatcatctctagtttcgtccgcttcacgaaattacattccccgcatggtcttgcactcggctgacgtatctaattatcaaactaattttacagcctaccccgctacatcaaatgcccacacggccattgctatctacagagccacaccacctaccggcatcaacctcgctcgggggctctcattcgacctccgaatgtttgaacgacactctttttcttctcaagcgttcctacctctagccagaggcacaggatcagatagcgtaggtgaaagtgaaggaggaatggtcgtcatcgttgccctcaatggatcaggtttgtcgctcattgatttgagagcgacgtcttgtctgcttcatcgagcctaaccagtgatattttcgaatgggcttacagatgataagccagatatgtctacactaaaggcgtttctgctggagccatggcagggaatttcttataacgccggcgtaagcccttgttttagtcgtacttgaaagctcaacggcatccaatctctgaccctcctttccttttttggtcttctaggtttggcaccattccgtgctaacgctatctccagtcgattacgcctgtgtcgatactcaaatcactcaagattcatccctcaaagcagactgcgaggcactgcgtcgagggacagatgtcgctccgtgggcaaaagtttatcttccattgcgcggtgaagaaatcaccgtttaggatttctgaatcaagtctttttctttgtttatcttcttaccgagttgagtttctgtcttgttgtatcaatatgtacatgcgtgaatatatgtcatattataatctcaacagaatggatctcgaggccaaaaaaatcgctggcgaagggcaacattgactaagaatatttacccctcgtacaatgacaatctatacatcagtcgacctgctgagatctgtcggttctatgctctgagggaagtaagatgggtggccatcaatcttgaaaacagcgtcaccgatgatcgatcttcacaatgaaatccaatccagacgtcactggacaagccgctgtcttgatcaaatctttttgaagccctctcaagagagaggcagacatcaagatagatttacgcataagtggacctccttcggggacgtagctcgtgtaagctgcgtagatctagtttcgtcgagctggaaatgatctgcttaagaggtttttttgatcgaatgaataaagtagatagacaagacggacaagaaacaaagaagggaggagaagaagaaagaagataatataaaacagaaaaatcaaattataaatcgagtaagatgaacttgataagatgagagcaagaaacgaggaagtaagcaagtgagcacgtagaggtttgatttgggaggatgtgtactgtcaattttgtgtgtgcgagaaagtcacaaggcgtggaagattgtacaacgtgcgtggagagaagagagagaggacaagatgaaagagatgtcggttcatttcctctttaattgaaaccgaaagaaaaaaaaagattcgtatgctttgagagctcgagatatgtatgtaaaagagagaaagagatcttgctgcttttggctacaaccgcaagagaatgaatcaggaaatcatacgaagtacgatggcactccctgtagcacgaaacaagggttagaatcgatgataataatatacagcaaaaaatgtcagaaaggtttaaaaaaccaaaaggaagaaggaaagccggtaagagaggcaagactcataactaacctgtcttcggctagccgggtttctctcatctgtctcgttctctggagcagcttcgaatgtcttgaatgaagtcgaacccgcatcgcctacttccattattgatgccaggtttccgcatcggtaacagtaactagatcagtacacaagcaatcgtcattgttagctgaagtcgttctacagtttgtatagttttgagatttgcgagagtattgacacagttctcactttggtgcactccaaacggtgacgagctggttatcaaacatatgcttgtaaccctcctggacaagctgatgggctcgggcaattaagctgaggccattcagatggttgaactgggtgtgaaagccgaaagaaacaatcgcgaattagaaattcgtagatcctcaacgggatgtcaaacagcttatgtagacaaagtcatagaacgtacttcgtgggtgaccttcgccccaaacaactacgtgacaatgtttttgagttcacacacaatgagctttaaacgataggtccagagcaatcgatgacagtaagaaaagagaggataaaaaagaaggaaacaactaacccaacctgccccacgtggactgacggcccaagtatcgacatcgtcctgtggattcgggatcgagaaatcagacacaagaaggaaaagaaaatacgggttgtgaaagtggagaagacagagaaaacataccggatcagaccacatcacgtcgcaaaacgcgccctcatgcggaatctcctgcgctcgggcgattgtcctgatctgatcaatcgttctgatatcaggggaaagaccaccatgcacacacaagatctgtccatcaatcacctataaaccatccatagcccaagcgagcccatccgagatattagcgaagagagcagaacgatttcacagagaatacggggggagacaggtcgatataaggaccagaggttttgtacgcaatggatacagaagagaagataaaatggtgaaggacgaacggctcctaacggaagatgatcaaacacctgacaacacgctttccacacgctggcatttccgtatttttgttgacactcgtcatagaacccatagacctggtttgtgcagagtgagaagggataaatcagaattcaagatattggactgaattaggcctctcccgaacggatgtgagtaacaagagcaagaaggatagagaaagtcgatacctgagtaatctgtcttgactcatgatttcctcttaatagagttactttattcggatacctgtccattcgtgtacaggataggcacaaaggtttataacaaacagcgaatgaagaagaaatgtcgtaagtccagctgcacaaaacacaatgctcccaaaagatgcacatgagcaggaacgacatgacatagagcgaacctggctttgagagctagtaagagggagagagtctccaacgagctaattgatcatgacggcaatttcagtaagtccgcttggacagctatagagccgtgatgaaaactcaaataagggagaaagagacgtgacttactataaacctcgatcgacaaagtcgcctataatgttcgttcccccccattcagatccaataagcaagtgaaacacacgaacagtatagaaaagaaacaaccaaaggaacgcatcatatgagcagttatgagtaagtcgacccattggaaggtgcgaatagactagaagaaggaaacgtacccatgaaaacataacctctgccgccctcatcgtcacctaccattccgccttgtctgagaagttcgatgacatcccaaaattgaccatgaatatctccacaaacggtcacaggggatgagaccggctgaacgttagattcctcgagaaggattgatctgacacggaggcagagctgtttgatagtatgttccggcaggtgctgagaggaaagaaggaagcgacaggtccagagccacagatgaggatttgtaaggttgagcggatcaggaaagacaaaacaaattgacacgaaagactgaccttgcacttcaacaagtgagatattaactgatgcgagttaagggaccaggcaggcaaagaatgagcaacgattgatacagaaagtccgactgaccgaccgaccaatcatcctcatagcaacgtcggtagctcggacagagagaactgatcagaaagagagacgaaccgggtcatctgattcgatcttttccgacatgacgaatgtggtaaagcgttatggttgaccaaggaatatggatgagacgaatgatgccagagcgggatgataattaaggaagtgatgtgagtgaggtaagcatttggtctgtcgcctcgatcggaaccgaataccaatctacaccaagatcgcttctttcggttctctactgtttcttcagcttcatgtgttctacacgtttctctagcaccattgatgtacagttgtgttgtttccaagagacaataaagggacaagcatccatcaatcaaaatgataacaaggacaactagggtacagaagacaaagtacaagatggtatgtacggccagaatgcaaagcaaaaagaaaacatataaactacatccttccccaaatttagaagggggtcagaccggttatccagagcgggcctgttgtatgtaacaagatatggtttgaagccgcccgcccgagttcatcgcttcaatctctctcaccaccccaaacccgaatcccaacgaggggtttcaagggtctagagcgggaaagaggcgaggcgggatcatctcgttgctccgtggatattgtcatcagatgtctcaaaaagactagatggaaaaccgatgagaaacgttaggaatcattactgcaaagaagccgaaggatgggtatggaagaggagcttacgaggaaggataaagaaaagaagcagaaagaaagaccaagacaagcacaaatttataggtgcacctgagagggatttcacacgtgaccagctatggctgtggcttcgagtggcaagctactctgacgcgtcatctaatagcgtttcaaacgcgtccggagagccgcgtcaggatagaatatacaaccaatctttcgcctgtgatctcatcaaacgctctgaatagtatcaacacgaacgatgtttaactttcagaccaaaggactcccgacatttcagctcaaaagacagcgcgatcggatcgatgaacagatcactaggcaggagcaagaggaagtcaataggaagaaggctagagaggcggcgatgcttgcaaggagtgggacagtgctcgtgccagccagtccgccgaaggagaaaggtgtgtgtgagtgtttttttggtgcttggaaagaggaactcggcttgcgttgttgcaagttcctccagaaactcccgtccattgtttttgttggtcttattgacgctgttctttttgttaaatgtttttgctaaatgttcaccttgtcatctgttacacctaactcatttgaggagattagcaagacaacaggagagctcgaatggctctatctctccttctaaaaaagcacgtttagatcccaagaagggagcatttgaatgtaagatattagtcctcgctgaagcaagcctttctgatgtatgttgatgtcacctttgcaacccttcattctcgtttagctatccctgttaaagcgacacaagcctccaattcgaacgcaataatcccaccgagtagaccacaatcatcttttcttacgtctctcccccaggctgtaaaagctgtatcgaacgcgaaccgatgggaaagcgtcgatcgttcgatctcatttcattctaattccctcaagccaaatttcgatgatggcaagggcgcaggcgcgaaagctgagggtacgatatgcgacaaggacagggcagaggggatgagaacaacgtcggcggagaagaaatctacaagaagagagaccgatctgacagtcgttgaggatctcaccatgggaccgaaagaattcggtaaagatccctccggatcagatctttgggagagtgtggaaccaaacactggaattagacttgcgtttgtctcttcattctttttcggatgcgctgttgttcctgttgggtttctctctgattattgactgaatcttcattctctctatacccattactccaaaagcaagaggacatactcccatgaccttctccaagcgcatctttctgacagataccacgttccgccctcactcctctactcaattgtccgtctctccagggatggaacgttctaccacgttccactcgatggagatttcgtcatcatcgctgtcgtggctgaacagatcggtgggatcaagaccacgaaagctggaccttccataggaggcgagctctcgtctgacgaggaagagagcgagaagaaggagaacagatcgagaacggacagtatggcgactcgaaagaagaaaacagaacggaaggaacagagagtgaagaagtttgtatcattcaagctgacacagttgccacctaggggttctacagttggcgctgcttctggcgatgcaacgttgacactgttgatgttcgagtctgattcttctaacctcgttgccggaggaagcggtgggaatgcggaggttgccggaaatggaggggataactacgcgaaaagggtctatcgaggagggagcggtggagccttcgaagagttctggaaattaaaagttggcacggtgatcgcgatactcaacccaaaaatcttacgtccgctaaagaattcccaaagcccacacccaatgacaaatgcgcttgctatcaacccactctcggcagagagtgtgattgagatcgggcaggctagagatttaggaagatgtgcaagtttgaagatcgatggggagagatgtttgaactgggtcgacaagttcgtattttgctttccattcttctcttcgtcaggtctagacaggacggcagaaatgaatgaatgtgaataacgggatatcttccttttttttctgtctctctagacgagtaggtgaagtttgcgagtaccacgttcacgccgctatgaaacgaaaccgggccagtcgagccgaatttggtgcttcgttcgttggagattttctgttgttcacttgtactcttaaagacgactgccaccatctgactgaagttcaatcttctcttctatcagaacgtccaccttcgcgatcgggactcggccagtctcatatgcaacccaaggcaatggcgcaggcaacaccgccaaaagaacgcttacccgatcgacctcgtttccctcgacgttcccgtctagtcaaaaacgtcctctcggttcatcctccagtaacactacctacgatcctatccgcaagactgggcttttgccccgggataccatcagctcgtcgtcatcagcttctttcgtggtcaatgggcacgttgtacacccgggtagacagagagacccgagtgcaacttttggtccagagttcacacatgaaaagatcggtcgtcataaggaaggtttgttgaaacgacaaagagaagagcgagaaagtgagaaggagattgtcgatttgttgggcagggatggagggaaaactcagggtggacggtttttggaggctgcgcgaaggcaggcagaggcagcgggagagggaaacaataaggccgaggaaagaagaacgactgaaggaaaactgaaagatatagagaaaaagaaagaattatcggaagaactgatagaggtcaagaagcgaaagaagaacgcgttctcggcagagatgatcaaacatattggctttgatccaacggtgctcgccagtggaaatgttcgtggggacgagaccgctgaggagaagaaacgacgagtgagtcttagttctgtcggtgtagattatgtgttggttatttgacgcatgtgcacgcgcacgctaactcttcatgattctgtccctctgccccttccagctcgaggcgatctcactattggcagggattgatccagtttcgagaacgatctcgaagccagaaccacaactgggccctgtacccggtcgtaaggtccgtgggtggagttccgtccgggctccgaccgaatcatcgaaagtagccgattcggctgccaagatcggtgaagccgtcaaggagggaagcaagactgaagtgacaaaagaaaggaagacaccgaaatacgtggatctttcttcgtccgatgtcgagttggactgagagagagcatctgtgtttttgcatatacgtatgtatgtatgtatg

SEQ ID NO: 1057 - DNA, 4129 bp, Xanthophyllomyces dendrorhous
acgtatgtatgtatgtatgtatgtatgtacatatatatgcgcgtgtgcagttatcatatgttgtacatgtatctcccttgttctgcacagtttccagatgacaccactacatctgctagttctgctggtatctaaaactattcagagagaaaagggccatctgggcaaccttgaaaacaagaagaaggctgaacgtggtaagactgatcccctttcggcgacctcgtgtagcagcagcagcagcagcagcagcagtagtaacagaatgcaaggctcctagacagtgtggaaaattaaggcacggtttcaggttctaaaaaatcaggggaaaacgaaggaaatcccaacttaattacccagttggataccttgaacttaggtaactgtttatgttgagccttattctatgttaattgatttttcacgtggtttgttgagtgactttatccttgttcttgtgtcgtccgtcttttgacgtttcatccctttttcccttcgccttttcgttccttctccctctcccccgtgctgggtcatccggtttcaggtaacgttcctatgtttgagaatgctcaagatgatgatgtttccagagttcattctcttctgatcatctgtcgttcatttcatcctatccaagagtagctctttagataaactagcacgttggatcgtcatatccgttcttcctctgcctcatgtctgccattcagactaccagcacctcgacatcgttaccctcatcaccgtcatcaagacctcgtcagcaacatcagcaacatcaaccacatcaaccacagagctttgtccctctccctctatcctcgtcatcctcccaaccagtcctacacagctcatcccctacacgcgccaagcgagatcactggaaaggtcccagacgtctcgcaccctcaaaagaagacaggtccgaacacggcatcgttcatagagaacgggccaggtcgatggctctcggcctggtcgaacctaggcaaatgaccgtcaaagagactgaatttgtcaaccatcttggaagacttcaatatgtttgtcgaataaattcttttcttttactttgtttcgctccaattctgaccgatcacccggaccggaccgactcggtcttagttcctcgccacagcaccctcccactggagaacaggtcctcaacccccgtccgttctgcctggagcagctcctccacccatcttgcctccagatataccgaccgagtctgatctgtccttgaattcatcagcgtccagtgttgatagaagagaactgagagatctatcggatgcagaatttcttaataaccttgccttcagagcaccaatgagctctcctcatccggccatcaatagatttctgcttcccaatggagaaaacgtcagctgtgtcctctgggctggactctatcatatctctggaacggacatcagtaaggctctttcctctatcttcttcctcaacttttccttttctttctgcccacttttccttcatctgtttttatatccaccactgtcaacatgctgaaccgcccttttcccctcatctctctgatattaatctgtagtaagagcactggtgttcagatttgaagcgtttgctagaccggtcgttaacatgaaaaaatttgaagaaggcgtgttcagtgatcttcggaatctcaagcctggaactgatgcctgtttggaagacccaaaggtcattaattacctcattttctccctctttttcccaatttttgtttctttccttacctctctgtccgtcactttccactcgcgattggaatggttactcacgcaacaactcttcctctttcttcctgctgatagtctccgtttctggacttgttgttcaagcatcaatgcatccgaacacagaaaaagcaaaaagtgtttttctggtatattccctttcttcttgatctcttctcttctctttcagatggccatgctgattactcatccaactcaaaccacatcaaatcaggttctcggttccccacgacagactctttctcgacgcactagagcgagacttgaagcgagaaaaagcggggttgaagccgacgacgagcgtgataggtgagccggcgcgtagcttccggttagtaattcttctcttttcctttctcctgccttcctttcatctacttcgtactttgtctcaaacaaaataccttgcctttgttttatcattgataggtatgatgttcggaagtcactctacgagcagtttgcagcacacaacactagtcttgctgggttccagccttccacagatactatctactactcgtccatttcgaagaaagtgggtcttcttgttgtttcctcttgctgtatttgatcttctctctttgctcatcaatcttcttggattttcgaccgaatcaaaaggaaaacccaacactctcgccggcttcaactcccatgcccttcaattcggctgtagatacgatccctgccagaccctcttcatacaatgagcctacggcatcttctagccaaaacggatcatttcaaacggtttcatctactccttctatcaaaaatcacgttccctacaactctggtagggccttcatcgaatccgacggctctcggggcaccctgacgactatttctctctccggcgatcaaaacgagaatgatatgaaggtaccgatcagagatgacggtggctctatcggtcggttgcttaccacgaagctcgggccaaatacgttgaatttagaggaggcgactatcaaattcggagagtcctatcggccgatggaagattcgtccgggttaacaacgttggccttggcaagtgcgcctttggatccgatgcctatctctcaagacccatcatcccactcttctttcacccgcccagcccaatctacaacttacgacggcgatcttcatccctcttcatcttccttggtaaataccaggtcaagtccatacgagtctataggcaaccaacctttgctcgctactacctcctctgcttatgccccgacttccgctttcactccctcctctggtccaccaccagtcactcggggcagactgtcgctcactcaacaacgacaatccgtcatccgaccaaccctgaatccgacggatcagacgatcataccacctatcgttagtcacaaggttcatccaactccaccttcacacccaggtggcgttcggacgtttgcttgtcctctaccgtcatgcggaaaacatttcaaaaggctcgaacacctgaagagacatttgaggacacacacgatggagaaaccgtacgggtgtgagacgtgtgggaaaaaattcagtaggagcgataacttgacgcaacacgcaaagacccacgagaagaccgataaggaaaaggagagggacaaggcgaaggggaaggaggatgggcagagtgaagctggggctgagactgcgctgacagggttcaaaaataagaccgggataaacagagactggatgttggacgtaacaacgtctgccgttgtttcttctggtggtctctggaatggaggagacggcgaaggtaaagcgggcaggagcaaaaagaaaagaaaactgtcggctggtcagagcagtggtgggatgaaaatctctgaaggaccggaagacgatacgggcgatcttgacgaaaagaatgacgggaacagagatgaggacgaagacgacgctagttctgtcgaaagtgatagtggaacagaagatgaacgacaaggacaaccaagacggaatcgtcaaaaacgatcatctcaaaccgaacctgccactcatccgccgagtggcccgtactctcaccctcaaccgtattctcagtcggaaactcggattggctattcacccacaagactctatcatgctcttcctcgagatacatacgcctatgacagcaacaacaatatcgttgctatcagtgactcatcagcggcggctgtcgagtatgccgaatataatcaacaaggctattcaaatccaccggtgtctacttcgatcgaaaccggccgttataaccgggatgtttatcagacctccgcacctgtgattgcggttccgaccaccgattcaacggcgatggatggatattccggtggaccctatgattattc

SEQ ID NO: 1058 - DNA, 58657 bp, Xanthophyllomyces dendrorhous
  misc_feature (652)..(661): n is a, c, g, or t
cctgacacttcaaccactgactttcggcgatccagctttgccctcgaaatcgccaagattgacgacatcgccatttctagcacaaagctcatcaacttttattccccctccgccgggattctctcaatcaagattccgatccgcgagaggatcaaaattagctagactctcggttgatctaaatggggtttcacacacccaaaagacacttcatcagccaacagttgccaaacaggcagatggtttctcaggaacgacgactgatctaggatatcagacatatgattcgagaagaacatatggatctcaagattcaacccgaacgcgcctacatccccaatcacatccgtatacactcgcgcaatcacatattcaacacgcctccccttctcaacaaccgattggagaaagcatgagaggccgacacccgacaatttatacccagacttcatcttctgttcctcctcctttgtctttaccgatcgggggattgtttgacccaaacggaaacacaaacatgaatgggcttgaaaacgagtcgtatcagatggaattgaacacgaacgccaacggggtttacgtccctgaagtctactaccaacagcctcaccttcaagttcaaagtcaacaacccctaccaccaacacaaccnnnnnnnnnnacagttagatatcagcacacagcaagcgatatatccaacggatcatacagtcgtcgggtcatctggttatagttcacatcctttctgataccaaaagtcgacaacaatcacttctgttttgctttcttctctcttcttccaatttccaaagccgtagttcccgtttttgtcagaatcaaggggtctaatttaatatcctcatctgttcaacagccgatctgaatttatctcgatctctttctttgccctttcgttccgagcctcttcgtttttttttctttgtgtatatactgttactttccttctatacgtttatatgttttttctctgtttctctatagtccgtaatcttgtgcttatgttcctgtccatgtcggtcttagttgttcgaccgtcttcaaatataccagatttctcaaccacccttatagtgcttttctctagtcttcatctttctttttcttcctcattttgcttggtttttatgtgtcgcactcttctgtattcatctgattacccacaatatccagttcgatttcgaactccaaatcttcagttatgctcgaatcatctttcttccgtcattccatcagttcctatccaaccgatctacaaacttatctgttccttcgtttgctcaattttcgagttgtcgctggaaactaataatgtaatgttgtcctgacaatatctttttttcatcctccttttccttttctttcctttcctctcgatccgtttcgtttctttcaatccgatccccctagattgattataccattcatctcgaaagaaactgtgaactatgtcttcatttggcttgctttattaatgacaagacgaagtctatgatggaggttttggaaagaaaaagaagaaagataggacagggaatggtgcgtgacattaagtaacatgacatatagcaatctcccttcaacgcctcttctggcctttcgtagctgcattcagcgcagcgtcaagtccgtatcgatgacctcgagtgatccgtttcttgatgggttggtcattcgtagaagataactcttcccgttctaaaagaaagagtgtaaaagatggttagaaaattaagagatggttggtcgactgggaaagaaaaccaagagacatgcctctctttcgactgtccgatgccgatcttgaatcctgtggcacctctgcttcgttcccatttccattttcattcgcattcgaatcagaaggaacaaagacagcggccgttgctgagagtgcaaagtcaggtttggctggaatgcttgatggccgccctgcataaggctcggaagaaccggcctgtgcagttccaagtgtggatccggaggcaggggggccagagtcgaatttaggggtaacatctcggcttcgccggtcgtcctagattgttgattcgaaaaccaaaatcagtttctgtgaaagtgaaagcaatggagaatgatagagaaaggattaccctcggctgagaaaatcgtttctcgcgttctttttctctttcatttcgatccttgttcgcgtccttctctcgatcagctcgaccatgatccctatccctgtttctgttatctcggtcccgatccgatcgatcttggatcctcgaagacaggctcttcgaccgatcgttctcccgtgaccgtccatctcggtcgtccttatctcttcgctccctcccgttgctctggacggaagtagctggagatgttgagcgtcgaccggatgtgcgagaattagaattctaagtcaatcaagatgatgtgttagtatctgatggatgctagaaattctatgctgaagaagtgctcgtaaaaaagagacctagtcaactcacctcgctgtcgattcggaatcttctgccactatcacggtctttgccatctcttatgtctgagtcccgaccatctctagaggatctgttgtctcttgaagagagcggagatcttgctctagggattggtgaccgcggcctcgatgaacctcttcgtcgtttattatccgggctgttctctctatcccctcggcgacgtttgccatctcgatcaggctcccctcgacgatctctttccttatcccgatggctttccctaggcttgttatctctctctgatcggccaacatcctttcgatctcgttcccttaatcgatcacggtcaaccctttccttttctctgtccttcagtcgtttgtcttccttctcgagttctttttcccttatctctttcatacgagtccgttctcgcgcgaggtcttgttcccgcgcctcttttgcttcagcttttgcctctgcagacataggtccagtgacaagatcctgattcttaggacctctgggcggcgattttggtctgacgtagggaccagaaccagggccagagggagtagcagaattagaactactggtggagatgcttgaagtctcggcaggaattgatgttcggagccgagaagggttcataggaagacctttcaagccagcaggtcgggtaggaggttgaatcgaggcagacgcagaagacccgttggaagatggtcgatcggtcgaggaagagccggaaggagcagatgggggcctgacgggatccgaacctcttaatcgagaaggaagacccttatcaaccgatgtcccactctcagaggtagctgatgatacaccagggcctggagaggccacgcgagacgttgggttgttgagatggggtaaagaaccccgactttcggacttgggagctgtagggacaggttttcccgatgaagtgaccgagtcagaagcggatgaagagactggtgccatggcagaatcagtggcttcagaattctcggaagagtttgcagcagctgaagaattagccacggcagcggggagagctgatacactagcgttggaatgagctggtgaagctggctcagaggttgtcaacttgccctttacagcagaaaactgtttgttagccaggtgagagtatataaaacagtattaatcatttggttcgataagcttgtcttgaattttgaggtagtcaatcaaaaaagacgcaacgtacgctaaggtttaggaactggctctgaggtatccaagccttcttgagtttactaagttgcgaagaatatctagcaaaattgacgttcgttatgttcagttcttagtaggtcgtcaggtaaggaaagaggaaaagagaccaacgactgcaggagaagcttcaaatcctctcttttttcctcagaaatggcttgcttaattctgacctccattgcttcaccatgggcaatatctcgagggaagaaaggcaagactttttgaaggacgatgacaatattcttgatgtgagagtactcagtagacgcaatgcacagttcgaaagcctgatgatgaatccagagtcaattgttgagaacaaagaaaatgcgaaactttcaactgaagaaaatgggtgacttcatacgcacagttagcagacggatgtgccatttgtgcataactttccgatatccatcccatggtagaactgctttgatatcaataggcgcggctgtttgtggtcgactaggagcagagaggaaacctggaagaacgtctttatcaccgacggcttctttgatgtaacgtttctcgtccacgtgccattgagtcagttcatccagacagccatagaggaagtgggctatattcacaaaccatggtcgcaagtcagtcaaagaacagaaggacaatgtaacaaaaaatgataggccaaccaaaatttcgggcttcgttctccgtaaacgaagagaccaaaggagggagccattcgttgatgatttgctatccaagaggaaaagccatccgtgtacaaaatatgaggttaaagtagtattcatacacccggcagaaagaattgaacgaaccaagttataaagccacaagctagagaaattgcaagtgcccatgttgtgcatcaccttgataaacttcgcacagtatgccgcgtctgacaaagagagcattgctcgagggaagatgcagtgttgaaagatgtgttgattgagtcctttggggtcattgttttctaatattgtacgaaaacgacgagaagcaggacggaaatagaaaggttaagcgacatgcagccaagctacgaggggggaacgacatactcctgaaccagacatttttctcaatagccaaccgtcgtttagtgaccgcataggcctccatctgttgatctctttctgtctgtaactgtttcgctttggaccggagtttctctctctccctctgccattcactcgtctgagctgaggtggggaatcggccgagatctttttcggctcggttgagtcggtcgatctcggtttggtatgagccgaggggaacctcaatgtcatatggcgtcaattgccaaaaagtgacaaagaatggagaactgattttgttcaaattcttgttgaagtcagttttaaaaaataacacacaaagacacttcaaaaatagcaagacgcgtaagacgaacgtcggttttgtatcttgaggaagatacttgacggcagatgtgatggtatctttgagcgcaggatggtacttcccttccgacttctagacaaccataaacatcacaaaacggtaaaggcgagttaatcggatgacaacgaaattcttgatcaactcaggaagagacgaacgatattagaaccagtcttttctcctgcattcccctctgaggaatcagccgctgcacctgatcgctttgaattcaacgccaacttgagtctagcttctttggcggccggagtctcagccgcggcttccaatgcagcctttttggccttttccgtgtcgtatttctgttcaagaatgacaaaaggtaacaagcacaggaattttacatttcagtatacgcaatgattagcgaaagatcaaaatgaagaagccaaccttgatattgaaagccaacttcggtctcaatatgtggaacgccaaagcaggcgaaatcctataagtttccacaaggtccgcaaacggggggatcacgtttgcatattcctcagctgaaagatgttgctgaagaagctctactagttgaagtaagacttcagtcgcctaaaaggtttgaccgtgttttgaaggcagacatggcttggttttagttatggatattgtaaagaaaagaagaattcggaagagactacgaacgttatcaaagagactggacagatgtttcatatgcgcctcgacttctggcacattgaacatacacccgtctcttgtctgagccaccacaaccaagagagggatcaacaatcctgaatccttcaggctttttattaacctgatcgtgctctttcccgtcaatgcttttttctctactggtgcttccggtctgggcgggtcttgtcctggaaggagcggtggtttgagaagtgtcacagtgggatggatgacttcttgcctgagcgtaggaccaccgccttgagcagatacttgattatcggacaagtttgctagaggctcgatggaagtcattgcggagatcagctcccgaaggatgatcaagtccttggtattaccggcccggagttgatttgcaatgtagtgaaggataggggtgcaatcgatcatgctatgatgtcgtcgacagagttcgccagcgaacgctgctagacctggataaaaacacgaagcaagattcattaattcatcagcccgagagagccgaagatttacgtcaaaggaaagagagaacctacttttgagccaaagagaggtactcgttccgtccgtctttgttcgatctttatccgggtttgagaaagcgtccagtaacataaataccaccacgtctgcacccaaaggggtcaagtaccttgcactctccaccagcggtttcactaagttatcataactctgaacctgtctcaatgcaacactccaagtgacgataggatcagagtgactgagctttccaagagctctcgcgtgaaacttgaggtcatctttcgagactcgtcgaagggcggatttagcgtcccgctcggcgagagcgccttggactttgagttgaagattggtttgataagatgccttccaagctccgtaaattccaaatcgggtttcgagggggtagagggagagaagggaccatatttcttgagatgtggcagatccacctgagagggaaagagaaggcaggaagacaagtcggatgaggatggcccatcggtcgaggatcttctcgtctgtcacgttctgttatatcgccgtagagaagaatgacagatgtgtgtgaggacgggaaaacgctttgcgcacgaagggggacccaagttcacagcactcacagatatgacatcctgcacacctaatctgcatatcccagtcaacaagcccatgtgcctcccgaccaaccctcccagcactctcaactctctctcgatgccttctgtagcgaaaaacatctctaggttttcgatcttatcaacaccttctgtccactctgggtaaaaccagacaaactgctcagtctttgtttgaagtggtgtcggcgcggttcctgtcagtttggccgtccgaggtttggcaacccattcctttgcccttcctccgtttgacggcaagagatcttgcaatcgatatcgaatcaaacgtagttgcaggtcgaccaacctcggttcagagacaaccaagcttccaaatcgggttgttagataatcaacttcgggtctagctccaacagccatcagagattctaccaggtcgatcttctgttgagggagtggtagtagaggaaggttgagaggagtggccgtcccgttcgtcttggtacccggcagagcggaaatggaggaagtatcatcgtcatcgagaagaggggcagcggaggctagcatggcgtttcctttggatgctcgagctagctcattaacggcttgtctgtacctagtgtcgtacttgttcatctccggttcgtccggtgaaagctacaagtgttcgatcgggtcaatcccagaggaacagagaggaaacacgtcaataaacatttacgctagagcagttcatgacaaccattgaggtaaaaatactgacatgaacccagaaatcagtcagcttcatgaacccttccttgatcaacacggccgccatcaagtaatagtaatctggtagtctctcgcctgatctaatgacatcctgatcctggtagtagccaaacttgaaccccagcacctgagctagtactgagctaccactttctcctcttaactccttctcacctatagtcgtactcaatgtaccagacgctgacggtgttgacggaggagaaatgggaggaggagcccagggagatgagcgaaggagatcaaggaaaaaccggtggtgtgtgacgagatgtgtcgcgaacgcgtcaagaatgaggtcgaccgtctttgaaggatcaaggtcaaagtatccaataacagacatgattttgttccaaagagaacgcgctcgctgagctcttttttgaggagctgttagtaagtaagcagagaacggagatttttattcagcgagagggaactgcgaaaaggtggacggagagttcgacgcgtacactcaatatctatcgccgtattaggatctttgccgggtcctagattttcgggcgtattgacaagaacaaggatgagagaaaatccctcagacgattcccgaagcaggttgaatttcttgagggaaaagctgcacacaaaccaagacacatgtatgaatgaaaaaagcaaagaaaagatcgtgtgagtgacctagaagtatgacgagagaaaaagagacttacaaagtgacggttgattttctcgtcgttcgactcgtagcggccctcagcccacttcccaagagaccaagtctatcaaagaacggaaaatcaaaccggtcccaaacctgttcattcagaaggccatgatggaacacggctttgcagaattctaaccagggcgttctgacgtccttttctctttgaagtacttgggtcgggtcggacgtgacggcgtcgtcgatctcggcgtccagaaagcatagggcatcggcgaaatgataagttggttcaagaccgaatttctgagttgaactggagaggatcttttgtaggaggggaagaaaagatgctagcgatatagaggaatacgcccggagcaccaggtggaagaagtattgaagagctgttggatcagcagaggattgatgatatattgacagcctgttggtggtagcaggaattcagcagaaaagtttcgaacccaacggaaaagaaccatgtaagttggagcaaaggtgcgactgtctttgagaatatcagagtcaaagaatatttaaacatgggggataagacaaacttacacaagagtgtcgtcaagagaggatcggtaactctccaacgcctgttcgaatgctgatctgaacgagacggaagccattagactgaattcctagaagaaagcctttcttggtcttgctcttggtcttgctcttaactacttttgccacagaccagatctagggatatagagcaccggaagaagcgatggcagacgaggacgaagaaagctgggagaggctgggcgggcgttgatggtgaaacagatgatttcagagtgcgatcttttggtcaacgaccggccgagcccacacgacgttcattccatctgtgaactttgttgcgagcatcttttctgagcacacacacacgcacacacatactgtctctctctctctcttcttttctcattgaacatgcagatgaagaagatcgtcttgtagactttctggcttgatcgagttctcagccttatacatggactctatgctgtctcgcctgatcttatgtccttcaacctcagctcacgccggccagcgcaagtgagggcgtatagttctttcgcgctaccaacatacacctcgcaagccgtatccctgtgtctgtgtcgtacgtacaacgacctgctagcatgctcgtaagtctgaatccatcatcgcctatcgtcctgaaatcttccagataatggaccttgtaaccataatgtaaccaacggcattaatccccccgcagaacgcccccccgcctttggatgttccttcggattcccatcttgctcttgacctaaccatcaaccatccttgaggagatctgccagttggctcataacaacaatgccctccatatacaccacttcgatctcgccctccttgtttcctatcaagtcaatttcagaggtcgagccaactttcaagccccattatatcttcgaagactccttccatgcactcctcgtcgggggttcgctcggtgtcgtgtttgcttctgttgccgttgagttctgtctttgtctcgtgtttctgcactggttgtctctgcctggatgggttgggctacgaatactgccgtatggcttgacttggtagtcgttcttatccaccagcggagtcggtcttgagcaagaggctatcggctcgattgagtcgagaggcctgagatggagaatagagaaaagagcctatgctgattgggtactgatcctggactttctttctctgccactcacggtctacaccttttcacacatccacttcaaatcattggcagaatgcctacaacaagcacaaccagggacctctcggagttttcactcgatatgggtacactatcggtttgatgagtatgttgaccttctttctcctctccgataaatctttcggagatcgcttggagtgcgacagttcagaacggatgactgacacggtcagttgatgttggcgatgattcagctctcgtcggaccaaccttcttggctgctcagggtctttctgccaatctacgtgaggtatggcttcgttcttttaacttattgtgatgtaccaagataaacagctgagactcgtgctacggattgctccgttgcctctttgggctcaaacagaaagacacccccttgaatgctgcgattggaggttgtgctgctggattcctcgtcggtgtcaaatgttggttctctgccaattcgagtcttagtccatgaattgctctgaccaaagttgcctggattactttcaatccaacagccggctcgctcaacaaggcagctgccagttgcgccacgtttgctctcttgacgggtgctctcgattacactggaggagtacgtttctctctttgttttcttgtcatttccctacatatagggttaccattctaacatctatgtttgctcacatatcctactgcagctcactaatcccgagcaaatgaccgaggaccctattcaaaagaaaaacaggatcgaatcccaccttgtcccccgaaagaagttggctgatatccaccctccacccgggcaaggctattcggcagaggcttaccctggttatccacataactatgcatccttgagaactcaactttaaattagattgaggtatctgtagggcgatagctctatcccttttcgcgtttctatctgttgttcaacttgttctttagttgtcatttgtctcttttgttgtccactatcattgtgttctctccttcttgtattttctctattacttccctcatccacccgttaagactgactttcgaacaactatgaatgtcggtcctcacacaattcgtcacaggatacagatgcgggcgcacgtatcagagagaaaaaaaagctcatgcagaaggtggcggcggtgatgatgggttcgatggtgaagaaggatctttgaaaatcgtgtatttcgtctgttttggcggtggcaggggtggaggagccgggctgaaattccgatcgacgatcaaccgataagcagagaacatggtccaagtcagccatacatgcgacattgtctgtaccgccatttccgtcgggctagagacaaaaagacggcgaaagagagagacgcctcacgtaccgaggatcagtcttgaggaggtctattcgcttcgaaccggataccacggatgcgggaagatcaggaacgagatctcgagatttcagtctgtttccaattccattcgagatgattgtttaaaagggatagttcagtgttgaaacaaggtagagtatcagcacgcagatcggaaacccaacggacgatctgggggatttgaaagagtcttgattaagaagaagaagaagaagaaagagggacgaacacatcctcgatagctcttctgatcggttggtcgaaaatatagagtcctgttgcgcaacctttcgatggacagatgcagatcgggatttttatgagcaacgtacgggaaccacgatccgccggaggagagaggctaagaggaagaagcgaagaaaggatgaaaaagggaacgtaccgagtgtgatgccactcatcaaaaacaacactttttgcgaagtcatgtgtaccagtcgagatccaagtccgtggagagcgtatgtatgtgtatgtgtatgttctcttgtagatatgtgtgtgagtatgtgagcagacgaatgtgagcgtacgagtgagagtgtggatgaaagtgcatgcgtccagaatggaacctcaacgcttcaccgcctggttacggaactggttacaacatcccccgccgactcttgtgcatgggggaatggatgagcgagctgatcgttcaccatcattccagttcttcctcattctttcctatcagtagtcatccttgagcaacctttcaatcacttttaaatacagtccagctcgggagtcgttctgtttttgtggtctcgtaagtagaggaagaaacgaggtaaacggctgataacctagccatatacccaacgaactatagtcaatacgaaccattcctgcgtatcatctttcctcggttgtactttcaagactgttacttgggttgctcagacaactagtttgaatgtgagtcttcgtagagattgattggtttcgttttcttttttttttcttcgagcgtggtgtgatgcatccgatgtactgatccgtcctctttccttgtacaacccatgattccaagtattacgcgtggtggctggctgcacccgagagcaaataagaccgttgccttcaagcacgcgcatactttcgtactattcggccctcaacacgcattccaggaaaacagtagaactacgtcttccaaacagtcggatggttgagcattcaagtccttctatggatacgtggtccgcctcgtccacaccggcatcaaacccagaacctatcgttcatagagtaaacctcgaatacctcggccagagtatggactatgagaggtctccttcttcaacatccgactattctatcgatgctcgctcgttcgctacatttggatcatcttcaaacaactcttcagtgggacctgtatcgcccgttggaagatcaatcgaaatcaggccgcatccgttgtatcaagcgcgggatacaccggtggacgaagccacgacgataatttcgccagtcagcgcgtttggattccatgtcgatcgaccgagcggacataatgagtttcaatcacacccgcaagtctttcttggggagcagagagagatctcaaggacgcttgagaacgaagacgcgtcgggtttgccctcaggaggacagggggcgaagcgatctcagtctagaccagacgcgctcttgctcggcaatatcgccggacctaagaaaccaaccaacacgtctactcaaaacccttcactcgacgacatcatcatccctacagatttatcacgactctcttcgatagatccgcttccgagtcctcggacgttgatgcgcgttccgtggaacatcgcggccgatggttcatacgcagaaacaacgtacgaaccagccgctcaagcgcttaaaaaacagttgaactcaaaattgggactcgtcaaagacactcaaagggagagagacctgtacacactcgaggccgttgacagggatggacagaacaagatgtttcgaatcaggttggtcgcgcctttctcttccaaacgttttcatatgatctgcttcgaaaggcgttcaatcattgatgtattactctttgtgttcctgatgcgatttaaaggtcagcaacaccaccacctggtcaaatgccaacttcaatctttgcgttttcatcggccgatccgcgttctttcttcttggatcctgtccgagcgctgttcgctcctgattctcctttaatatcctctcgacttccatccgacatccctgagcccctctctccacctcctattccacataccatgacttctacagtacaacattcacgcagccggtcagagtccaagccaagcgattcacaaagcagttctacgcaagccaataggatgaaccaacacacgtatctgcaaaaaccaaaagagaaaggctccttaaaagtgagggtcagtaaaagtatgcagagcatgggcgctgtttttagagggtttgacaaggactcgaagtcgtatggagatagcaatcagagtgagtctattctgtgtataggcctttgatcgtcacttggcactcgtgttctgtattttgcgaccgaaaagtattttgacgcgtatgaccggtttgacccatcttctagatgaaccttctcgccaggtggtcggtctcatgtcagccttccagccaactccctccgttcgtcgccgacaaagctcctccaatcttcaatccctcaagaatcaacctgttacgtccttcttcgtcaatcgaccaccgacaccggttctctcctcttcccgaccttcgagttctagaacacctgagcaactatacaacacactgcactcgagcgaaaacagaaaacagatgcagatgacggcaactcatctgagaggtatgcggagttgggagagcacacagagtgatgacacagcccgaccgggttcgtctcgttcagctctgaatgaggaggaagaagatggcggtgggaaaggtgtcaatctgttgagaatcaacacggagggaatgactaggcttccgatggaaatgatcaaactggtgaactctgaagggcagaaggccgagagagccatctcggcacctgtctctcaaatcaactttcatcgagataccaacttagttgaccacataactaggtttcaagcagctgatatctactgtcgaactcagttgtttgattatcttgcgggtgacgtccgtttgacaatgtcccaaaaggatcacgaagaggaaggagaggatgaggatgagactgaaagcagacgattagagagttggaatcctttggccgaagacgatcctagattcgctctttgggatgtgtgtgttccggcatctgaattcagtattccctcctctgccgctggagtgtctactccatcaccgagcacggatggtgcgcacgaaacttggttatcggaccggtctgattcaccatttgcgatatcaacatcttcactcggtgtcatatctctatctctaccgactcaattcaagcagccttcttcgccgagccgacgtcttgtaggcgccacacttgaacgttggatccatcatctcactcttcactttgatcgcgaagccatctacgcttttcttctcacttaccgagtgttttgctctcctctcgatctgtgtagattgttaatctcgagattcgaatggacgataacacctgatcttcagagagggatagacgagatcgagaggttgaaaacaatggcgagggtgaggacgttccatgtgtggaaaatttggttgatgtacttctttgaagttgattggttaggaaatccagagatgagggtgttgacggcagattgggtgaatgatatgaggaaaagagaagatttggatcaggttccttcagcaatggttcgttcatctcctctaaaaatcggatcttgtgtcatcatcaagccatcttgtcagtcaaaagaatactaaagatctgttctcattcacaatctcctacgatctgttcagtcattgatcaagaaactgaaggagctgctgaaagaacgtaggggtacatacaactctcctgccggtctcacagcttaccaatccgtcttgacgactcactcgcccgcaggatccatcgcgccatctcagactctttctcaacatcatttctcgcgttcagaaacctctttaggtcgatcggctcaaccaacctatgcaccgttcaatatatcgactagtacctttctttctccgtctgttacagccgaatcgtctcgactggtcggacagagtctcaatcgtaaaaagtctgcgcttagaaaccttgcaaacggaactacgagcggacctcctccgctccaggctcattcaatagccaaactatggggtagcctgggtaggtatgctagggcgagctttggcacaacattcggtgattccaatgccagcagcaattctaattatctatcaactaccgttattcataagaaatcctcaacatcatcccttcctcaaaaaggagatctactcattgtggaaggcggcctcgatgcgctgtttaagacatatcccaatacggagactcctccattgactgacagggaaagtttgatgtcaatctcgtcgtcttccaatcgttcaaagtcaagcgaggacgatcatgaggaacgatccttttcgcctggttctggaccgacaggtcgacctcctattcagtcgcccatgctagattctgttcttgaggaaagattctcccacgagtatgagaacgaactcggtcaggtagtcgatcttcatccttcgtgccgtccgccttctttgtctaatgcctcaaccgaaccagctacaccgatagaaaatccaaacctgacgcctcctcaaagtccatcatcaactggaccggcttcctctcggacgacgtcagctacttccattgggatgtttgtcaaagttgaccggcctgcttccgggtctagtgactcaatgagttcggttgatagaccgtctgcttcctcttctggtccgaattcctctacagatgtcaaacaagccggttggacgcccatgtttgtgggtgctacaatcgtagctgacgactttgacctatctgactcggatgacgagaattacaacccattgggctcttccaaggggcgcgaaacctggggagtcaatctcgagcggcgctcgctagaatccttggaggaggttgatcagtcgcctaagccacaaggtatcgaatcagcattctctagtttacactcttcaagccgcaaggtatcgtctagaccctctacccctaaatgtggtcggaacgcgcttggtcattcgttgttccagtatttcaatccgtctgatgtggcatctgaggcggaacctgtgtttgtcgagcagagtgccgtgtctgcagccttggctcggctcgaaggtcggtatgacgaagaagcgattgaccgggtcgaagcaaggaagagaaaagtggaggagcgaattgaagaagctgtaagatcggcgtacctcgcttggaaaaactgtctacctccaacggtcatagctagtgaagagatggttggagatggtcgatggggtcgaatgatgggagaccgagagtctcttatcgagttctcagacaaagacgaagtgcctgagtcatctgtagctgttgttgacagtcccgcagagacttcttctccctgcgttgtgtctgaccattctcgagctacatcgccccaatccccaagtattaattcaggaggtcatgaaattactagaacaatacctcagacaccctctaagcggccatcttcagattcagatcggcaagtcttgtcaccaggaggtcggaaccttctccgttcgcctcacggttcggtccagaggttacagtcattcaatgtgaacccgatcccacccatcaagttcaccgcaacaacaacaaagacgaattttgtcagccctaagaaggcgaaaactacagtatccctgggctcgagacttaagtcgccaatatctcaaatggagcatcgctctttcatgtgagttttccgtatttcttgctttctttggatatgggtctgaccggttcatatattttaaatcagtctcgatatcaagacttctgttcttgctgaacagttctgtctgattgacgccggctacctcaacgcgatcggtttccaagaattgacgtctcagccacttccttggcttgcgtactctttgcctgctaaggacgattggtctgatttgctcaaggagaaagcgatgggcaaggctaaccggtctaggatattcagcgacgtggatatcttgatgaaacggtcagagatggtaatccgttgggtgcaaagcgagatcgtatgtgtttatgtttcttcaatttaacatggtcacactcggacgtctgttgatgacagcgtggattcattagatcttgacaaaaccatccgatagaccggctatcgttgggcggttcatcaagttagctgcacaatgctacaatcggttcaacatgcagtttgtctcttcgtctctttatcttcacgattttcttattcttaagtggcttaaatatatgcggttttttcttcttataggtcgaccatcaacattctcctaggtctacagacgtcattgatcaaatcatgcacgggcaagaaagtattttctaaaatcggcgcttatgaacgaggtctctatcgagaccttcaagaacttgttacgccagagaacggatgggttggcttgagagatctccaagagggtatgatcagtcgagaacgtaactctctagaaaaatccctggctatcttctcgaacctggatatcaagctcaagactaattcaaacctgagagatccggcgacgaagaattctatgaaattaggatcagaagaacagcctttctttataccttatctcggtaagtccactctctctgtttctcgtctcccttctagtaaagagatcagaatttttactttgctacattaataaataggcatatatattcaagatcttgaggagattgccaaaatgcccgaccatctctttccatatcctgaaccagacctaacgtctctccctccacttcctccttggcttcaccggacgcccattcttaacctagaaaaattacgagcacgggcttccatgtaagtcatacgtccatactattctggctgatcaaacctgctcagtgttttttgttttgttttttggcatgcagcaccaaaaacatatgcatactcaaaactctggctagtagctcaaatctcactccagaggccggtccatttaggctttgcttcaaacttcgaggtacatcgctttactttgatggtctcttccttccttattgaactggagtactgatgttctctttggctttctatcttgcgctctggttgtgtagctctaccggatgagtttgtgaaaatcatcgctcgagagtacaagtcttaacccttttcttctcatttttacgtcctcttcactgcactttttttttctctccttctttcttccctatcgaaatgtttgcttgccccttgcttttttttctgtgtccaccagtttgtacatatgtaaagaacaaccttcccacatagccttctccacagatatcattcttctcttcttcagatcactttaacgacatggcatgaacccttacttgtttttctcttctctccccagcctgacgcgcagacatccttctttgtcattttttcttacgttttcttcgatagaatgctttttagattaacgtttttactctttgtttaaggacatgtcttttcggatcaagcctgttgtcttcttttccgtgcttgagctctctcatcgtgacgccttgtgctccttgcttttgcagctttttgtatgatgtgatcaattcctgatgtgatttcagttttcgatcggagacatatacacctgaatatgagaaaacaaaagagacaagaatgtgtcgattctgaataagatagatacatataggggaacgaacgtcaaaatagaatgttcttaaagcttgacggtgataccctcttgagaactcttcaaacaagcctcaatgatctcgatcacctcagcggcctgctccggcttgacgatcagtaattctggatctttcttttgaattgccccggccacgttcttgaaccaatcaagataagaaccctgctttgattcaactacttcaccgtcctttttctcggcagtgtaaatcgttccccaggcctctttgggttctcgaccgaaagcatcatctcctggcttagggacatctgccttaggggggccttgccagtacccagaggcaacactctgaggttcttggacatcgacgccgtatttaacaaaagcggcgtcggttcctgattcggagtgaagtaatattgacggttagggatcctaaagctttggctcgaaatgaagatcggatttagacgaacccttgatcctgtacctcagctgtgggttgaacaacgataagatcgatcctccaagagtgaccaacaaggggatctttctccctgtttgattctccttagcggggtagttgagttgaatgataaatgagtcatggaagtcggcgtgaccaagtcctcgagagtttctcaatgtcgcggtgacagagtctgggcggccgaatagatagagcgcttgatccaactattttttgtataaggacagttagttactagctcagcttgttcccagagaagaaaatcctgaataagagaataggacacgaacaaggtgggatcctagatcgaacgcggctccactacctggaccgggagtctctttccactgtcttgaaggggccaagttgtttcggtaacgatcgaaatagctctggatgaaaaaaggagcagagttcagggtgattgatgatcatgagacagagtgatctttctcttgatgacttacctcgaagtgactgagttctccgaactggccggtctcgtagaggtgcttgaccgtgaggaagtctttttgaaaaagaacaagaaagagacaaatgagaaccgattttctagaatgtctttttcggctaaatcacaaacgtgacccaccagcatcccatcgtctgttctggaagactgcaatgatcaagttcgtgctcttagcgaggtcgatcagttctttggactccgccgctgtgggagtcaacggcttttcgatgatgactgtcagatatccggaatatatcgatagtgacgaaccgagatagcatcatcaagaagaaggtgagaaaaacctggagaactctgaaccgagaaagatggagaagggacgaaccgtgtttgccagcggtgaggattgcctgccgaatgggtgaggattctattcttagcatcactatggccttgccatcgacaagaatcagatgaaacagaagaaagaggaacgaaaaagcccaccttgctgaactcgtagtgggtatcgttgatagtggtcacgaagacagcgtcgacaacatcatcttcaaggacctcttgaagggaagtgacaaccttgatgtccgggccgtagaaatccctagcgtcggatttctccgaagtcgcctttcgctcaacgatagagtgaagtttgaactgttcagggagcgcctggatgaacggaatatggaacactctgtgagagtgttattatgtacgaagagaaaagagagcaaaagatagtcaggtcatcagacagagcaggagtgaaagcaagaggcaagaaaacgagcagagagaagagatggaatattgagtgtagtttcaccctctcaagacgacaacacaagcaactgaacatacgtggcagacattccgatccctacgacggatacattgataggtgagctagacattgttcgaaaggtagaaacgagaagtgatgggttgatgatggttgacgttgggatcaagaggttgaagatgactatatagaacatcccaaagctgtgctttttcatcacgtgatctgtgacctttagccttcgtctcattcgcgctccagcccatcgagatgatctaaccatcaccaacacatcgatcttctcactctgtcctgctctttcactggccagctggcatctttgtttctatcagaataccctcgactaatcgttttcgataccctgctgcctgtttcttggctgaagtggaaaaatgatcattcgtagagcttttcatccgatcgcgtcttcatctattcatccgtccttgacctactggtcaacccttcgtccgatcggctgctcgtattcttcctcatcatcctctacatctccatcatcagggccaagttttatcagtcctgtattatactgcaagcagcaagtgcaaaaattcgatcatgaggcttacctcgccagctacttctttcccgctggcagaccgagagaagccttctgggctcttcgagcgttgaacgtgagctttttgtctctcgcgctctcctcttttaggcaacgatgcttatgtttggactcttccgaaatacgttgtgcgcagatggaactggcaacaattcctgagacggtatcaaatgtagcgataggtcagatcaggatgcagttctggcgggacgtcattagggatatttccaacgtctgttcttgttcttcctctcactctacttggtctttttttattcgaactgaccagagcgctcatattacctctcatctacagggcattccaccctcgagtcatcctatagcgaatgctctggccatgacatctgatcccaagactgtagacctaacagcctattacttgaatcaaatgcttgacgcccgtgtaggtgtcgttttccttcttctcttctcacatccattcctcatgcgcatacacacattgagtctgaccacgcaaaatcaaacctacaggaagaatctctcggctcaccaccgtatcccactctgacccaactccttgtccatctatctcaaactcaaacaccgatgacactcctaagcctgtctctagtcactccaaatccaacgcctacctcacaatcagcacttcaacacctctcgctctctaccggccttgcctctctattgctctctcttcccttccatgcgtcaaaccggaaattaccagcgatcccattagatatcgcctcgcgatgtggactcgttgctgaagagctgttcagaaaaggtcacgaagccaaagggttggatgacgcagtgttcgaggttgcttgcagggcgagggatgagttagaaacagccaaactggattggaaagacaaggggaaaattccaaaggctgaattacccgtctatctatctgctgtccgtatccttccttgggccatgtttattctcttacctgcttgtgtacttaccgattcttgagccttcgatgaatatatcactacgaacaggtctcggtagaatcctatcttgacagacttcaggcggcgaacttcaacccgttcgaaccatcactccagaaaccaagttggagaacgcctctcgatgtttggcttatgtggagacgtcgaacaatctgatcgatcgggactcttcctcctttgttgtgcttctcgttatttcttctctctttttgttgttgttttctctcaccagccttttcaaggcccatctgtatgatctgatcagacccgcaagagggggagagaaggaaagtgaaaaaatgtacttgagacagaacgcatagtgttggatatcaattatggtatcaaagaagaaagagaaatgaaaggacaaaagagaaagaaaagtgtgccacgattttcgcccatcttctgcatctacctcttcctctgcctctcatcacctttgctgttctctgtttcttatcccacgcttgctggctccttgcaagcccttagttgtttcttttgagagttccttggctgaaggaaaagtaatcgaaaagatgggcgatgggaaaaaccctcaaaaggccgtgaaggagaaaggagaaagacagttgaatagatagatcgacagaaacaagacgatagatgttggacggtagaaggtggatgggcgtgtgtgttatgaatgccaagtttgaccaaagtaggcctcgaggaccgttttagccatattaaagccgaggagctgggagaggtattcaggataggaagacgcaaaagacagtcagccagattcagaaattattgaaagaagaaggcagagatagacggaaaacgtaccgagaggacgtagccgacaaacactggtaagagcggagccaacaagagctctgatcgaaccaagaacggaagcgcagcgaaacccagactatatagaacatgcagcgaaaggtgtcaggtttagttgactttgccaaggcaaaacaagcagacattaaagaaaacatactatgagatatagatctgtggtcaagtatcaagcgcgggcaccatggaagaactcgtgagtgaaaccgccctaagctatgcccagagtatttgattgagtgacatacgtattgagacagcgctgccaaccaaaccgagttgcctaaccagagacacacccaatttctgttgaagggggagagagtggaaaaaggtaaaacaagctccgttcatcagcttctctagcgataagtcactcaagccggtccgaaaggtattgagaggacaaactcttttgtgatcaggctcactagcaagagctgtccaacataaatccacagaaagaatgtaaagaacgcgttgacggcgacgtcaaacgcaaatgcccattcaaccttggtatctgacggcgagaaatgtgctttaggcgatcgaagtaggtggtttgtcatgaacctggcaaggtagaaaaggaacataagttagtctgatgaactcttgcaaattcaaagagaggaaagaaacgcaccattgcacagtggctaccgctgctgacgatagaaggaaatctcgaaagaccataagaagtgcagtgttgagcgtttgaagaagggtgtatccatgtatgaccgaccatgctatcgccgccactaaagagacagaatgacacagcatcgtcagtcataatcataaatagtctaataagaagaacggtcagataaaaggcagcgtacaaactagacagccggaaataagaacgaccatcgctgggtcatcccttgcccattggttttttgtttgtttatctgttcgtcgtagatggccaggttgtgagctatatgtttcatccgacaatcattttgggtgggttgagaacacgaatacaagtagacgaacggtagtatacgttccggtatctgttcatgcaaagagacaagccgtcagcgttggtattctggtggccttgctagaatgatagactattcccaggagtgcttgcaaaaagctctgtatcggtttgtgtgtccttccctctctcagatggtactacttcaacgatatttatagatcaaagacaacccgtcttctttgctgatccaacatgtatgcaacggatcagacaagcgatgtcccgtccaaggtcgggatctgacgtacacacaactgagactctcgcatgcgctgcttctaacaactttgcctccgacaggagagacaaacggccaaggaaatgaagctttcagaaaatattggagattggacactcacactcttctcggagccacacataaataagtcagattccagaatgccagctcgaaatccattcggccaaacttagccatctttctgatctttgaccaggtgagcaccgagggagacctaataaaattcgagccggaggaaggcgaagagttgtagcctcttattggagggttcgtcgaagatgatgagaacgatggagatggtgagttagaggagctgagagggtttgatgtcggaagaaggctgcccatgtttgctgaagagatgtttccggtaaaccgacggaagagctgaggggaggagctttggaacgaaatggtcggcgagtgcacctttggtgggattttgatggtatacctgtaattctttcctacaagtcttcctgcctgggtgcgtgtccggctgttaagatgcaagatccctaaaagaacagtgaagagaaagaggcagagggaaagatgaaagcagaaggaaggagatagaaaggagaagagaaacccgggatggttgagtgtgtggcgttcagcgcacacgtgttaaatgctgtgccagcggctcttcatatcaaccttgacttcttctttgctttcttgctctcttattacctggcaaacgaacatttgaagtgagctcctctttctttcctcgttcaactcccactaccacgatcttcttgctcattgcgctcaccttctcagaccgtactttaattgcagacatatcagaatcatggtttcagcaaagtctcttctctccaagtttcctatgcgtccaccggacatgaccgtcgaccatctcgtagtcggaggaggtatgcatgattaatctcgccctacaatacctagctcaggctcattttcttgcatcttatttaggtgtcattggactggcgatatctgaggctttggtcaaacggtttcctcgaaagacgacctatcttgtggaacgcaaaaaagccgtcggtcaagagaccaggcgagtctctccatcttctacacatcgaactcgaccgactacttgctctcagacttacctttaattttgcttcgggtgatcgaccgattgtttttttttcctttacccagctctcggagtagcgaggtaattcatgctggtatatgtacgtacttctaccaatcagccgtgtatagatgtccatagatcaaggctagaacgatctatgtttctgtcttatccgacgaaattttagactacccaaagaactcgctcaaaacgcgattctgtactcgaggtagagatcttctctacgagcgttgtaaagctgattctattcctcacaagaagaccggcaaggtaaactccatttccttgagtgtacccttcgtttccggcctaaagcggctaacaattgagctcgccttatttgatcgaaatcgcgtctaaatatgatagctcgtagtggcagggaaaaataaacgtaatattctctatgtcggtgaattattctctcacacgcaagatccgctcgtcaacaccgagtcgttctatcttaccggagatgaagcgagagagatggagcctgcgttgtcacccgagttgatgtgcgctctgtattctcgtgagttgattggtttttgtcgtcttcgtttctgtgaaagatagccaaaatcaagttctgatgttctatatatcgctctcccactcagctctgacgggtatcgtcgacagccacagcctgatgagcagcatgcaatccaacatcgaatcatctcccaacggagagatcgttctcggaacccaagttctacgaatcgagccttcattcgacccgacaccttcgaacccaaacactggatacctcgtccaaatgcttacttctggttctacaacccccgacgtcatcctcgccaaatcactggtcctctccacgggtctctcgacgttccatctgcttaactctcttctgccttcagacattccacaaatcacacctcattacgccaaaggaagttacctgtcttactctggtaagggtgccgaaggaatcaatacgttgatctaccctgtccctgaacaagacatgacaggattgggcacgcatctgacgctggatctagacggtaaagttagattcgggccggatatagaatggatcggagagaacggggagtggaaagaggatatggacttttgggagaaacaactgggaccgagtgaagaacgaaaggaactcatgttccgagctatctcttcctatgttcgtttctatcatgctattccctcttttgtttttccaaaaagaaaaaaggaaacttaatagatcacatttgtcttcgcagctaccgaacgtcgaatattccggtctcaaaccagattatgcaggtataaggcccaacatcgtgggtcccggggagaccaacccggacttcaagatttatcactccatccctaagttacccaactttgtggggttggccaacatgtcttcgcctggtttgacttgtgcgtctgttatcccttatcctttcctcttgttctttctttccaatctcaggattgctcatctgttcgcgtttccacaaaacagcgagtcttgctataggagaagggatcgaacgattttttgccagagagatatacgcttcggaaccggaagcaatcgaaggtgaattaggaccagtggtaggaaacactaaggaggaatggtggggtgttgctgataacaaaccttggtggaaggtctggtgatactacttcttccttcttctttctgcttccttctgttttcgtggtttgtttctttctttagagttagaaattcgcaatttgttaggcgcaaacggacgaaaatgatacaatcttacatggggatatctacgtggagaggaggaatcgaggagaaaaagaaaggttccaaaatagcaaaagaaagaaaagatgatgaggactggatacacgtaaacaaagcaaagttttcactcaaacatccctctccacatctctccccctatctctcccttcagatcccttaaaactcttccaacttcactatcatccaaccctacacccagcgctattctcctgaaatcgtcgactacgttaacagatccaagccctgagccttggccaatagtcgaagaagccacgtcgagcgcatatgatgaagaaagcgaggtcaggatggatagatattcggatgatgtcagtcgggtttttgaaggtgggagggaagttagagaactgaggattaaagaatggttgtattttaactgtggattaagcataacaaaatttagaaaagattcagcttgcgctcaagtctcctgtagtgaataagacaacgaagcacagatcaagaaaacgaactcttccccattcaatctctcctactcccaaccgtctcgtacatctaacgacagcggccaacatgactttttcaaacagcgagcaattcctaacgaattgcgccgtcggatttttggacatttctgccaacaccgcagagatctgtttaatccgaactggtttgggtagttgttttgaaggttgtacagggatcgctagttcaaccgctcgtctgttcatcaaagaagttcaggcgcatagtcaatttctatcagacgtgcccatgcttattgggaggctgtctcagaagggagaactgacctgcaaacgtcaagcattcttcttgcatcacctgtaacacccgtcgtttttgcagccgccaggatcaacgcttccttctcgatgacctgatgatccagctccttggctttcttccgaatctccaagtcaggatgaggaatcattcgagattgtacaatctcgaccaattggtctcttgtatatggcgggaaattgatacgttccattccttttgattcgcgccaatgcgtactcgccagccggttagtgaaaatcctcaaaacgacggatgagacgagaggttcctctgatgagaacttacccattcgactcttgactcgaccagctagtttttccggcatatccatcgtgttagctactgcgatcacgactagttgagagccaggcattgtcggccaattgaaaaagttgtaaacaacgtcttgcttgtttgtaaacatctgatccagctcgtccatcaacaccacgctagagaccccaaagcaacccagctgtgtcagaaagacgtacgacataatttttgtgaatagtgacaaggagagaacgcactaggtacaccgtccaggaccgatcatcgttcgcttgttgcccccaaagtaaccctcaagtcctttgagcgctgctttacctgagacctgtctctgaggtatcgaaccctcatcttcattgtcatcgtcactatctcttgctctctctttgactgcggcccccgttgcggcacctcggagagcattccagagcacaacgtatgcatgctctgggtctggaatcttcagaccgttgatctcaacatattcgaatggtaaaagctcctgtcgattcacaaatttgaggcaaaccaaatggcgatgagaaagatccaaacctatgtatgatctagaaagaagactgggaatgacgagaacttaccccgtcaagcgatttctgacgaagttctcgaataactgcgtgaacagtggcagtttttccggttcctggctgacccgagatatctgtccaagataagtttggtaactatgtaagaaatccaagttgatcctttcggtggtggcaaaaaatgaggagacaaacagatacatccaccaccgccaccatctatgacaccctcaatcttgacttgaacctcagcgtactgctcttctctgcatggtaaactttctggggttgcccctacatggagtagatgtagcgcacgcttgtatggatctgcgggaagcatcagctttttagaaaggaacatagtgatccaagcaagataatgtacatttagtctgtgcgtgtttgtgttaagtagaaaaagaaagagctcacttcatttggaaggtccatcaacggtcttgatttgacacctgcccttcttcgcgccaccacgatcgccatctttttcttcctctccgtcgccttctttgtcgcctccgccgtggttttagaagatgctgctttctcgttggccttgtctgaaatcttttttccggctgcagctcctcgctttcgcttttgcccggctacttcattgctttcaccttcagttgctgaaacctcctccgcatccttctcctcctcttcctcgacaacgatgacatcactggcctcttcgtcttccgatagaacgctaggctcagaggctggttcatccaatcgaggtttcttgttagtccgagataatgggggtgtggttatggaagccgacgctttttgaggagtcgaatccgtggtgtttgctactattactgctgtactcttgagcgtagcgctggaaacagaatttgtagtaggagctactctaggctttgtgggtgtagccgggggtaaggcttttttcttttggatggacgatgagaaagcaacagagaagggcggacaagaagtcagcgctctatgatacatcagcagaagagggagcaggggattataaacaaacgattggaccaggtctcttggcgacccatctttctaactcgcccattccttcaattgcctcctttctaaaaacctcccatccagggtgcccaacgtcttcaaatgaccatacatttcccgtctttgaatccgctatcgatctacaccaccatgacctactttccctcttactaaacgaaactactagcttctctatttctttcgtgttttcatgattgatctggtcagagacaacaactttgtcgagtatgatctctctggaacatcttcggacttcgtcatccggatttaccgccgaggcccagtataactcggtggcattggcttctgaatcgtacgctgggctcttcttcaaggaagtctgaactgtccatgggagttctttgaacctgaggaaccatttgatgtctacccatcccgatgagtaagcctctagctctctatctacaaggctttccttctctatatccataggtcctcttgagtctgatcgaggcaggaactccccaatttgaacgataacgcctacagacgagatttttggattgatggtctcgatgaacaccgtatcccctacacgataatctacatctacattgggttttgcaggctgtttcttcttggtagtaactttattgcctaggggagtgaccgaccgagtaaatccagaatacaggatcgttcgattatcaggaaacgtcgaggaaggcaatggatcaagccaggtatattctggacgatcctctgcggttttccttgtagatattcgtttgggcgatgaaggcgcaggtgaaaacaatggtaaaagacttctttgttcccttcttctaggtgtcgccatggttcctgtgtcgttcgagagggtgttgtgggtgatgctcctcgtgtggtatgccaacagaacgacgagcgatcaagagatctccaggggtcaagacgcgttgatcaaacgcgtaaccacaagaaaagcatacgcgctacgcgttaagagacgcgtctcggaggcgatggttacagattgggtaactctctgacccggacagattcggttgaggatgatcagtttctgaagcctcatgagatctattgaatgagacctcttagaatgagagcagacgtcgttctcagtaggctgtcgtcattcacactctgaatcgtaaagagttgcaccttagagttgttgtagtcgcagcagcagcagcagaagaggcaagacagtaactcatcatcaacctgatggtatatacagtcgatacaaacatctcatacaacgaaagaagaggaagataacaacaaagacagagaggtttacaactgttcgacaatctagtggaagttctggacgtgggactcgtctcgacttgaagaatggaaatcaaatatggacaaattatgagttcatcgagcacaagaaacgaacaaagattcaacagagagacatacccggctaggaacttatccataaaggtttgcggggaagctgttagaaggaaagtttagtagtacctaattagcaagaagatcgatagaatagaatggaaaagaaagatcggaatgtttgtttctatgaacgatcgtaccattgtcctacaacgcaaacaagaagaaacaaccgttatatgagaagcagtttttgagaaagatgctagcaggatatgattcaactaacctcttgctccttgaaccaagccaagacgtgaggctgataagcgattgaaagaaggtcgtgatcgaagtttcgtcatacgaaatttgtgagttcatatactgaatactgttgtttatatttcccaacttgaaaaaatgaccacatactgtttgcttccaaatgttcaacgtctcctggtactcctgtctgcccttcagaagcaagatgtcaatcactcggacgtcggtcacgtgcttgtgcttagagaactgttctcggatcttcgttcggaagtcgtacacagagagatcaagttggtagacctgaacaacctctggggccttgatgtggagatatgatgggtatatcatttcgatgggtacatcaattaattgatcagtttaaacaccatacaaggcggttgtaattttatgcaagtcctggaaagatgagaaagagatacgacataggagaaggcccaataaagaaagacaatgtatggatggacacgaaccgctctgtaccaatccctataaagaactctagctcgagaggcagcgtccttcaagtcggctgactgtcgggtcatcactgcaagtcgggccggaatggtcgtcatcgtagtttcttctgattgagtggttcttagctatgttgtcaagactatcggaggacagaactatggtcagcagatatctatacaagagacgaaggatgagatgaaagcagcatatcgcataagatatatgtgtactcaccgactgatggatgatggatggtgtttaaccctgactactgatgagaagttcaagaagcgaatgagatcaaatgcgatgagaacgctgttagggttagagaagattacgtaattagtaaccaattctcccgaggagtaacccaacaacttggtgaacaacattccgttctctttctacctttagtacttacccatcgtccttgctcccgtctttcgttctctctttgtcatactcaatcccaccgaaggacctctcctgtctgctacaacatcatcgaaggtgtagttgagcgatgaatgtaagtggagtttcttcagttgaatactaggcgctccgaagctggtcttactgcctgcgtgccatctttcgttcgaccatagactaatcataaaacaccttctttttttctccttattcttcacttttctctgtactgctttccgtttgttgaaacacactgcattcgatgaattaatccagaacgacagatctcgaccgagcacatcttctcgtcaaccgacgtcagtctctaggcaaagctacgaagactactctaagccttcgactgagattcccaatcgaagaagaccggatgtttcccggaaactcgtcgttgtaggagatggtggttgcggaaagacttgtctgctgaccgtgtaagcgtctctatctactctctgtcatgttactcatcgattcttcgtttgtatagatgaatttaatatcgtttgcctcaagaagagccattatctgactttttcttgtgtttgtgtttgataccttttcttcaaatgcgctaaatatctctatccatcagatatgcccacgaccggtttccagttgttagtagatttcctcacatcccagtgatagaactctgtctttgttcagtctgtttgctcactacgatctacccgggattcgaatagaactacgttccgacggtgttcgaaaactttgtgactcaagttcaatatgaatctaaagtggttgaactcgctctttgggatacggctggacaagaagatttcgataggcttcgaccactcagctataacgatacagacgttgtattgattgtctttgcatgcaatcatcgacctagtttggaaaatgttaaagacaaggttcgttacatcatcttgacgcttattcccttgtctaggttttgttccaatcagagaagctccaagaaagaaaggctaactagagtatgctctgtgaatgcttttacaaagtggcaccccgagatatcacacttccttgagaacactcccctccttctcgtctgcgccaagatcgacctgcgcacagacccacagaccttagccttgatggccgcccaaggaacacaacccatatctcgagtagaaggtgaagctgttgctagagagattggcggaaaatactttgagtgttcgagcaagaccggcgtaggcgtcaaacaggttttcgaaggcgcgctcaaggagagtttgaagggaaagttctcatttggtatcggaagcggggggagtggaggaggaggaagtggaggtggaaatggaggaagaggaaagagaaagaagggttgcgtggtgctttgaatagtatccttcgtacatgcaatttcttgttcttgtccttgctttcccctctcttgttttctcttgggattgtgctgtccgactattcagttttccttgcttcagttctcctgtataccctttcctgactagacgcttctagggcttcccttccttcttttgacttgttgtccgacttcatgacctactgctccattttcttattgctaaattttttttttcttttacttctacgaaacgcgtttccttcactctctttttctccgctatctccggtctttacagctttttgttcaacattcctttcttcttctctctaatcttgcttctttccatgtctgataccctcttctcttcttccaaacacccggtcttaaagttacttccttcttttttttttctttcgttcttttcgttgggtttcttccttcttttagttagatttcaacgagtatactcatgactgaagtctcatgtccgagccttcctgcatgccttctgcgcgacccagatcacctcacatagtcctattaccatacgacaacagctgtaatcatgtctgtatattgtacagaagaaaacggtatatgtaaacgtgagaggtatccttgctgtcgtccccttctgaagggatacatccggacgggttgaaagatacttagaaacgtgaacagtgtgttctgctagttaatcacggtcgttgacctcgcgcatgattctgtaggatctgctagcttcgtccaagggtaaacggcgctggggtaacctcctgatacctgtgcctggatatcctaggtgattctccgaggatcacacgcagaaagcgtagatgaactgtttgataagctagatacaatcctcaagttatgagaaacttatcgatcaacaagatcttcttgttcaaatccatcctttgttcgcggattagcgccccaagtccgtcccattcgatctctctaaatgggcgaaatcccaagacggtcgatccttctttcagtgcgctccggttcgatatattcttagggaccgcgttttcctgagccgtctcgtccaagatcacccatcttatttgatcctcggtagactcagccaagatagaggtggacatgcaggtctctaggatcatccgacgtggagagagggaactagggatcacgcgtcgaacggtcagattgatatcaggcttgagaggagaagatgtgttcgataaggtggttttgtgaagtgctgtgtagaattttgataacgaggtttgatgggatgacaagagaagcgatgcattcgaaaagagaaggccgtgactaaggtttaaacatgaattcgatgcattgtcaggatggcaacaaaagagaataacagatcataaagactaacgcgatttttcctttagtcgggctcttgcccaggaggacatctcgaacactgagttcctttgaaccagcctgatcagccaacagaccaggtcccatcaatccgctcatcaaacttcgacttccgacctgatcttgagttgatcgtcgctttgatttatgatgggccaagctgaatggcgatgagtttatctcaggagttatgttggatgatgtctcgacgaacccggtcgatgggtttgttaacgagacatgcgcagaaggagacgggtgggtgaataacgactgcttatttctcgatcgggaagaagccgacaagaacgagggtggaaccactcgggagggagtagtcagtctttctgatccagaaggactccctaagagagaacttattctaggcttcttccttctgggccgatcgtcacccttcaaaggcgacgaaaccaacgagagagctataggaagaggcctactcaatttggaaggggtaggcttggcgtgtttggatgctagtggcgtcggaggcaagcgcgtgtcagacggccgggtagaggatgaagaagtggtcggggataactgggtggggacagcaagtgatggaaaagcccatcctttcttagatgactttgaatcaagcaaaggcttgggatcgatagtcaacgtcggggaacgaggagaagcctagaaggtggattgtagagcacgacaataatgagcatacatcagttcattcgatcgcacatgccatgagacctaacgaacaatgccttcggcatggttgacttgctcctggtcggatgtatccactgatcccatctgttccagatgctggaattgtattgagagggagctcactgaccggcgtggtcgtgtgggtcggtcggttggaaggatggatgatatgatcgacccagcaaacgagttcgacatcttccacctaaacctaaaccatcaatcatctcaatcctccactcctcactctctgctctctcggcattctctcgcctcatctctcttttaccagagaagcatttaatagacataatagcacgtcttccgcgcccatcttcttcctctatcgaacctttcttcagcagtgagagttcttctaatcaacccgaatggagtctggctcgctttcctcatttgacttagatgatgatggatgggaaggtcggtcgaactttcttcatatggactctcattttcgagcccatcatcctgaagggttaaaaactgacctgtttcagtactcatccttgtgcttggtttccggaatggtgttaaatcgataactctttctcaacagatatgcccatcattcgttccgagccgaatgctctgggtctagacgatgaagaccaaaagaagtcagtgtccttcttgttatctatgtatagtatagctcggtctcttcaatacggactgatctgactgcatccaacattctccatcttgtgatcatcccgatttatactgcctatgctgtaggtatcattatcgtgcacctgccataaaggacgattcggcggctatcattactggaaacgcggccggagcaacgctagaatacgacgatctaaccgttccggaaggacaatcatggagaggaaagatcgatcaagatgaaaaggactgtaagcacacagtctctcctactgccacggatgaacgtactgtccatccctactgttttgtcttaactgtctttcctctgtctttcatagatactcgtttacgactcgaagaagaccacgaggcggatgcagtgcatatgcgaacgcaatacttgtttgacgaggaacaagcgatgacacctttgtctcagatgaaggctactaagaatcttctttcggaagggcagcggatcgcttatgtcgggctctgcaagcttgcatgtgaagagatggtcaaggcacttcgggagattaccgaagccggctacacaaaaaagaaacttgccgaaatagcgaagggaaaaggaaaggaggtcaaggacgaagagagcacagaggcttgcaaggtgtgggctctgaagatcatggcgcgactatatcaccatatggaacttcagagagacggtaagatttcatctatctagttctaactctactttattgcgtgtgtatcgtcactgacgtatatgccggtctatcacaaacagaacaaaaaatgattgaatccctagcagcacatggtgttgaggccatggatcttgtcccgtctttaatgaccacccactctattccaaaccccgagtatgatcccaaccaggcagacgagcgcagaagacaacaagaacaagacgcggcagcatcagatatcgaagataccgacgagagctcaacacctcgaaagccttctctagactcatcccttcctaattctttagatccaacagacgaagagggtttcccaccggaaaaagtccccttacccgttcccaaatcttccgacatcctcaacaccccgcatgtccctcaatctagagcgtctttccaacgctcaactaataatccattcgagagcgaaggcgaccttacttcgggctttgaggatgacgatgtggatgtcccggtcgatcatcaggcaccaacatccaaacctaccgaagattcgtcgctcccgcctccaccgtacagtaaaagagagaaacctccggaccagactgacggtcttcctgacgagggaggagatatcgggtcgtacgaagacgaggtagagggcggatcgatgtctaaagagcatagaaggccatcctcttcatcgacagaagacgagaagaaagaaaaagtggacgaaacggaagaggcagagaaggcggataagaagaagatcgttggtacgacgacggctttggataagccggaagaagacgtcaccccagttctaccaggagttactacaacgttatctgcagcggatgagacagtggtgttggatattcggtggacaatcctgtatatccccttctcattaacatcgcaacatgtcctgggtgattgatactgaccgcttgtacaaatttcaaatcattgtattgtatctctcgtttgttggtcaatctcaacacagatgcgatctcttcctctgtctcatagccgactcagtgtatgatgctcggtctagagtcttactagagcgcgtggcctctaaactccaattgagcatcctagatgtcgtacggttcgagaagcgaatcacagattcccttgagattcaagaaggagttgaaagattggaacagcatgatgtgattgaatctcgaaagaaagacggacggaacaagcgatacgttgctataggtctggcgacgttaggttcgtcaattcttctatgcatttcctcgcttcatctagagtcttactttgcaatttcttcatccttaaataacgtctatcacaggaggaggacttgtgattggactttcagcaggtcttcttgcacctgttatcggcgctgcactaggaggagctctcacgaccgtcggaatcacaggaacatctagcttcttggccggagcaggaggagcagccgttatcactacaggtggggtgttaagtggtggtcggattgccagcaaaggaatggctagaagaacacaggttgtccgagtgtttgagctccgagctttgcataatcagaagagagtgaactgctggataactgttcctgggtaagtatctacacatcgacgctttagaatgaggcaaaatagtcgagtaaccaatggtgcactaacactcgatgcttatgaccgagcagattcatggactctaaagacgacgatgttcgactgcccttttccacaatagatcctatgatcggggatgtgttttcaactttctgggaaccagaaatgatggaggaaatgggaaacgctctgaaaattttgacgacagaggttcttactacagttgggcagacggtcttgcaggctacggtcatgacagccttgttgagcgctttacaatggcccttgagtaagtgttggcctttccctgtgcgccttccttcagtgaggactaacgcgacatatgttttctctctttagttctgacaaagctagcatacttgatcgacaagtaagtgtgcagtacatcgttctactctcagtcctttgcatttccatgcaaagtatctgagcaactgacgtactctgctattctactctagcccgtggtccaatgcactagatcgatcaaaggcagccggtttagtcttagcagatgctcttctccaacgtcacgtcggtgttcgaccggtctctctcattggattctctcttggtgctcgggccatcttctacgctctcgtagaattggccagagtcaaagcgttcggaatcgtccaggacgtttatcttttcggaaccactatcacagctaacaagaagacctggttgggcgtccgaagcgttgtcgcaggtcggcttgtgaacgggtatgcaaggaacgattggattctcgggtacttgttcagagctacagcggcaggcaacacagttgccggtcttcgcccagttgaggggattcctgggttagagaactttgatgtgacggataagatcgctggtcacctgtcgtaccggccaatgatgcctcttttgctacattcggtcgggttacccgtacgttttctcatatgctgaaatgtctcgctttcttgaaactaatgccaaatccgcgttccgatcgacatcaaaatcaactcaggtaactgccgactacttcgatgagcctgaagagccagagttcttggaagatcgtatagttggtaagttgcttccgatgcctgacttccgactcttgaaaagcgctttgatctcaacccaaatatgttctcccatctttgatagtcaacgaagccgaagaagaagccaagaaagcggctaagaagagttggttctctcgtaagaaaaacaagccttccacgcctataacctctcgaggtaatagttccgacttgcgtcgaacggtttccagctccggaggtcccgtacctgcatatgatgaagaggataccgacctaccatcccgcgaggagaatcagttaccttctatgataccttccgcttcctccactcaacccctcaatcttgaatccgataacgcctcctcgacttctctctcttcttctcagccgccccagctagcttccggcgctctctctccttcggtagcagattcggatgaatttcaatctcatcttccaccaagagcaggttttgatttccaggcgatctctaaagcgctaggcaaagatatcgacatagaaaaccttccatcctcaggcacctcgtccgctcaaccgacgcttccttctttgaactctcccttgacgcttcgacagccactcgaacgatcagaatcaacatccgccttcagatcaacgcctctgacgctcgcatcgagcacactatccgtatcgatggacaatctctcgatgcaaccctcttcgccgtcgatgtcaacggatgagcgctttacaggatggacaccgactgaggtccggcccgatcgactagcagatccatggtcatcctcatctccactgccatcatcgtcatcaacaacatcggcagcggcagcggtggtgggcaacccttttgtggatgacatacctatcaaggggctgtccccggaacaaactgaagaggcgagggatgtcggttggggcggatccagagaggaaagtttaggatcgaagagcgtattagagaatccttggaattgagaactctcattctttctagttcgctttcgcctgttctttcgctctttctttgtcattctcgttctctcctatatgtttctctcataggtatgttgctctgtgctcaccctcggatctccccctcccccctgacctcatcaacctgcattcataatgtattccctacacatactggccctgccgctttctttcttgatcaccatcgggaatacaataatatattcttctaccatgagttttctctaaatagagaatttttcccctcgttttctttagaggatccaatgcgatcacatcaagccttatacatagacgagctttcacgtccggagtaatgctgcattgattaaagaaaaataagaatcaagatggagtgaggaagagaaaaagagaaggggggaggggaaaaatctgaagtgctccatcttgactgagtatctcctcccccaaacagcagcagcagcagcagcagcaacaacaccaacgacgagagacgaacaacaaccataagcagacctatctagagaacattcataacgtatggaagggaaaaaaacatgtacgaggaagaggaaagaaatgaaaagaaggttgggagaccccttatgctctcttccttggaaacttgtttttctttttaaggagaagacgacgaaacaaacacatgcgcgcataagggtagacgaagcgagattcgaatgggagagatgaggatgaggttttatgatgacaagatatctcaagcggaggtgacatccaagatcactcctcgtcggactttaccccaacctgtgtgcgattgcgtgatcgaagcaaagagtcagcatataatggccctttccctcgacacagccgacacttcttgagagagtgtgtttgattagaaagaggagaacaaaccaatcaatcgccaatgcttatcgattcgcctactgagtgcaattttctcctccacgtcagtgcacaccgggctctggagcacaatcttggccatatctgccttgacagagaccactcgagctccagaggcggtagctccgatgttgaccaaaagaacttcacctgcgggcgtgaaagaaaagacgttagaaggcataaatatttattcgtgacatagacgaacagaagacaagagaaagagacagaaggacacaacgtacccttggtcaacttggcgaccttggtctgcttctcctttccttctgttcgaacacccaacaatcgcctcaacatgaagcctacaggcagaaaaggcaaagtcatctcgatcagctccaagttcatactaacagaacgagagcagagaaggatcaaggcacatacactgaacctccaactcggtgtagatatccattcccttgccaacgtcactcaacacgtgtccgaccaatcgatcggccctgcacatcgttgggtcaatcttggttcccacaccgatcaatcctccgggcacggcgaatcggagatcgttgtgctcagcaaagagagagacaaccttggaaacaatgggggtgcacttgaatcgaccatcctcctccttggtgatgaaaccgggtcggatctcaatctcttgttgaagctttgtaacgaaatcaagaggggtgaccgtaggtgagtttcgattaaacttgaccttgactttatcatatccaaaacctgactacttactctcagcacaccagtcaaaatcgatcctccagcaactccacccttcaactcgtctacctcagatccgggcttgttgacatcgaacgatcggatgatgatcattcgaggggacgaagtgaaatctctcggaggaatcgggatcttggtgcaaatgtactcgtttacggcatcgatgttgtacttgagctgggcagaaatggggatgatcggcgccttcttggccacagtagctacacgattcaagatccgaacaaaacattctcatcagcgcagaacatagagctctgggtaaaagtggaatggaagagaagcaacgaaccatcgacgaatttcctgatctcctccatctgctccttagcagcctgttctcgaataagatcgaccttgttctgaagaatgatgatgtgctcctgtcccataagctccaaagcggccagatgctctgacgtctgaggctgagggcaggattcgtttgcagcgaccaagagaagggctccgtccataacggccgctcctgttaacattgtagccatgagcacactagaatgagaatgagagtaagcgtttgaggaggtcagtttttttttcttgccctggatctaagatataatgggccctggaggcagaagaggaaatcggtgtacgcactcgtgaccggggcaatctatattgtgtttgttgattgaagaagcacgtcaggataggcgaatggtcgtcagtccatgtgcaagaccttacgtggaagtgatgcataggcgagaaaaagaaattccacgcttaccaacgaaagagacgtgtcgaagaaggttcatctttcccttgcatcctgggacctcacaagggggatggtcctccttcgaggaagggtatgacttgtagcagctgggtcgggggcaggattcgttatcgcacttgtagatctgtgtggtgttggagaggaaggtggaaggtgaagagacgtcaaggaggatgggcagatcagtattctcttctgctatctactctctttctcgcctgtcccttctcgtctttttataattgatcccaagtgaagccttccagatgacttctcctgacccgaatctatcataccattccagagagaaccggcccttgcacgcccaagaaccaatcctttctgtccttttcttcccacagaccgaaactcagtgtctgacaaaatgaagaaataagcgactgactttggcgttggcgtaacccaacttgatggtaatgtttctctcgagctcattcttgaatcgaacggtcaacactccagagatggccttgacgacggtagactttccgtgggcgacatgaccgatggtaccgatgttgactgaaacggacgggacgaacgaaaagagtacaagagattgagtacatcatcatctttttcacctcctgctttccttctcctcttctcctgtgcactgcctgtcttgtccgacatattgcaggctgatacggacgacaccggcagatcctggaccgtctttccgacagcacgccagacacgactgcaagagacaaagacaaagcgagaagaaagaaaagaaagaaagaaaggaaaaaaaaggaaaagaaaagaagaaaattaacaagaactcactagtagcctgtctggaaatgacctcgtgactgagaggacccaaagtggaaggatcaacatccggctgggcctgaagcgtggtagctgcgagggagtctgcgagagtgtctggcatggctggcaaggtagagtagagagaacgacgatggctcgatgggtgggatggagatagaagctggtgagtgcgtgcgtgtgtgggtggtagcaaaagtgagtagaagagagttacctaagtatatatttgaattcgaaagttacttatgtatttcatttattggctctcccaccaccaccatctactttttttctcttctttctcgtccatcccatcatcaagcaagagcgtgcagcgtcgatcgtttataatgccatctgtaggtgtctgtctgctacttgcgagtgtggagaagtgtagggctggcgtggatcttactctggctttggtttggaatcattcggttcactttcaacagagaaccgtcctcgtacgtatccttcccgtttgtcattcctcgtctctttgcgtatcctgcttgaactgattggactctgtggcttctctcttgctcgtcctctagtttgtcaccggcttccgacgtaagcagagatggtgccagcggcttcagtttcgatctcgtcctgacggtacattcttttctcttggtcaaccttctgataggtgatttgcgagctcgggatctcgcctatgagtttgaaatgtacgtcctatcctcgttttagaccgtgtgccaagcatgttctcattcagatctttcctcttgcttcaaacagttttggccgactggtccgatgcgatattcctgctcttcgaggccccaactcttctccgtgagtatctcgacctctgctggctttgtctttctctcctcttgagcggctctcgcctgtcttctacggtgtcgtcggtgaatgcttgctgtcgagtcttacggatggaaacaaaatacaatcgatagctcgaacgaacgttgaaacagtcggtcggaccaagtcacgatccgaacgaatgccggacgagcgaacttttcaaagagcgattcgtacctcctgtattcctctctacgagcgatcagagttccatcggtcgagcaaccgaacgagcggatagacccgagctcgaaccagtcctcgtcttttccctccatccaacatacgccatctccatctctggatcccggtcaacttggattgtcttgtctttagcacttttaccaaacggtcactaaccacctccatccgattgtcctcgccgaaccgatgcatatcctgcttttcgatagttatgccttcattgagttcagaagagaagaagccgccgaggatgcttactttgatatgtacgtcgacctcttgcgtctgactagatagcaaccatagccaacacctgtcttcttaccgaaacaccctcgtttgatcaacgtcataggcacggaaggatgattgatggccaaaagatctctgttcaggttggttcttgtctattcatctcactacgtctttccgacgagcgcgctttcttctttctttctcttggtcacaatactgatttagttttcttccgaaacgcacattctcagtgggccaaaaactcgccctcttcacagtggcgacatgaggagtctgaccggtccgtccaacaccgagctggccacaggcgggacgaccgacgaggcggttactctgaccgagacgatcgacggggaggctacccacctcgccgaaggtctcgatctagatcgcccggttacgaccgggatcgaaggaggtctccttcgccccgacgaaggtctcccagcccgagacgatccctgagcccgcctcctagaagggagcgagagaggagcatcggtggtgacgacagggaccagagagatgacgccgctccagaagacagagcgaaggagcgagatgtcgagagagagaggagtgtagacagagtcgagagggctacgcaggaggaggttgccatcaggagagagagggagacctctagggacgattaagctgccgactcttttgtccttcagcctgaagcggcagagatcaggaaagagtatatgtgataaacatgctgttctatatgctgtacaaacaacgcccatccaaccgttgtacccacgagaacacagataaagcagaacgaatcgaaaacagacggagcggggatgaagggagaacgctgtggctaccggctacttaaccgccggtgataacttctgagagatacccggtcaaacagttaaacttatattttcaatcccaacaaccatcagtcgtccatccatacgtcataaagaatcgtccattgagcaaacatcttccacaatatggccagtaacaacctagtccttcacttcctcaacgatagtcgagcagagaccattgtgtggctcgttgaggagttaggagtcgattatgagatcaagttctatcagcggagcggcagtttgttggccccaaaggagctcaagtacgtccgatgatagtgatggaccatttaatatgatctctcaagatcatatctcatcgagagaggccgaccatctaggggttggactgaagcgtagggtccaaaggaagcaagagacacaggctgacgccccttttatcacttctatccgtatcgttcccgtagaaatatccaccctttgggaaaagtatgactttgccttgttcttccctttcttcctttgcgtgcatcacaactcagaagctcactttctcttgttccccaaaccgcatttagtcccctgtgatcacccacgatggaaacactattgccgagtccggagcgatcattggttcgtctacgctctcttcttgccgtgttggaccgggtttccgataagattgcttgtcttgaccttgaaactttgcacccaactcgatgcttatagcttacctcctccgaacgttcgacacctcggaatctggacctaggttctcgacgttcaaggatgaaaagtcgagaatccagaatgattactttgagcactatgccgagggtagtttgatggttcgttggggcttttacgtccattttcataaggacctctactccgcatcctcctgaatctgaaaccctctccgtgtgaacgatgtttgtgttggttcgatgacaacagcccattctagtcaagtgagcgcctatctgtttgtgtcaccgtacggtctggcaaagagcgctgatggggtttcggtaaatattcccccccccctgtctgtgggtttcacctaaagcaaacttgtgttctcaaagttcccgcagatggcaccttggtacgttcgacctgtgatcgctggattcgccgaccaggtcagagcgagttggttggacaaacagctcgccactcatctccaaatggtatctttgcctttcatttttccttttttttttctttcttgtctattcaaggaaggaaatagctatcagattactgataagattgactcttgtcttctttccttcgttttatggatctgaccagatcgatggagaattgaagaaatcttcaaccggctggttctgcaactctgaagagcctactggtgccgactttgttcgttcgctctctatctcttgacttctctctttcttccctcccctctccgacacgtctgttgacgcgaaccgaggtgtacatgtgttccacacagtcaatgttcttcccgttgttcaaactcgcaaaaggccgtggaggagctctcgaagctcctgagagtatcaagacctgggtcgcgaaagccatggatcggtacgttttccatccatccattcgttcattcactcttcctgtactttgaatgagataactaacgggaaggaagacatcgtcgctggattgaccgtccaaccctcaaacgaacgaaccttgaaataaataaataaaacaaacaaacagaccagcaaacgtccgagctcatcagagaatcaaagacgctgaagaagctcaggctgtcgccaatcctagtgaatcttccaagctctgaacgattctttcggcccttttgtttcctgcttgttcctcctcttccacttaatttggccggttctattctctcgctctcgtcttttctcttgatcgatcgatcgatctgtttggcgaaccaacgaaacggatgacgattgaacaaaagaaacatcgtgatctaagccaaggaatatagaaaagaaaacacagatgatggagtgttgaatatgagaaagacagattttcttttgaaaatcgtgttgccgttcagaaacaaacaagcaagaaaaggaaaaagggtttgagaaacgaaacgagcggtaaaagccatacaaagaaacgagaaaagggagggggatagcaaggatcacgatttgacagatgtatagatacaaagggggtgaaacaagaacctccttccaacatttaatcgacccgcttgtcagacccaacaccggctccaacgccaactgcaccttgtcgatcaaactcggtggcctggttggaagcctgagacttgagcgtggctgtatatccaccgaatgccgatgaatgttccggcaaatcagcatctagactaacgagaaggatgccctaaccggtctgacaaacaaagaacgaaccgagatcctgatctttcctagccaaagcgccctcgagctcgaccacctgcttctcgagttgctcgatctcacccttcgtcctggacccagcggccgctcctttcttgagccttccaagctcctcggtagtgtcgatcaactcgagagcgatcgagaatgctctggcgaggagaagggcgaggccgagggttcctccggtcaagtacatgtttcgctgggcgtagaactgtaagtttcgagagacggaagaagagtcagatcctgtctgcctcatcatccggatgggatttcccttattctcttttgctctctttatatagctccgagatgacagacatcaaggggagaacatgaaggatcacataccttacggctgtggatggcttcttcacttcgaaggtccgtcgttcctccagcctggttagcctggtccttggaggccactcggaccaatcgctggacggcatcgataaagagaagggtgacaaagatgaaagcgatcttgagggcgtattggatcttggcgacctgtcagatttccgacccgatgcgcccgaggcgaagacccatccggtttcgaggtgagatagaagtgacacgaactgtcagtagaccgtcatgactatcaactatagacaaaaggaaggagggaatataaaaagagacagaaggcgaagaaagatccttacgatagggttgacattcaagaacgtcaagatctgtctcctcatcgcgtgaggccaaggcccgagcatcaccacaccaagagcgatctctccggccaagagaaggaaacaaactggatacgatcgtccaggcagacaaagtgtgagcctgtagtgcagatgagtctgggaacgttaagatacgaagaaaggaacgaacgagagtagtagagctaaggcaaaggaaagatgggaacaagagggcaagggaaaacagagagatcttagttctgacgtggtccatcttttgtcaagagatctcgaaacagccacgtcctgtcactcacagccatattgttagtataaagttggtatcgaccgagatgttcacgctgtacacgtcgttgtcgttgtcgttgtcgttgtcgttgtcgttgtcgttgtcgttgtcgttgtcgttgtcgttgttattattgtcgtcgtcgtcgtcggcggtagaaggatgggaagaaggaggaaggaaaagaagagaaagaataaaagagaaaaaatccggctggcgattttcacgcagtcgtcagcaagactcgatacgtcatcggtcggtgtgggcgtgtgagcgtgtgtctgtttgtgcgcactcccgacttgtttctcgctcctctctgttttcgtgttgggtcggagaggaatcatgtacaaggttgatggaatgtatatagaatgaataaagcaaagaggataggaaaaaaagagaagaaaaaaaaagagtagcattccctttacacaagttcaaccggggtattctttccttccgacctcgtctttctctttttgatgaacgacactgtttcacggaaaagaagtggatagatagaatctcagataatggtcagcaggaaaagaaaagaactcgagagcgcaaagcgaacgacaactacagaataaagaaaggtttcagttaccttctcgagagatctgggtattctgcacccatcctggagggaacaacttgttcatctaagatttgtcgtcacagaagaaagagagagaaaaagatcatcagaacttccatcacacaacatttttcgaaagtgtggcagaacgactgacatcggcatacaacgccctgttgagcggcaggaggtgtttttcctgcccaccctcgtacctagccttttcattcgcgagcgtcagcgtgtcggacgtgacgtccatcagctgggtgagcaggtccttcatccgctcgttgaacctaaacttcctggacggcggtttgtcctctaccggctgtctagaaggaggcgtgcccggcggggggagcgggatcgtcgagtggtttggtgtatagcccgtgggggtatgtgcgcccgtggttgtggccggaggagcagaatccggcggaagaggaccgagcgaacgagaattgggcgaaccaggatccacactggccgatactgacgaagcctgggcgtggtgaccgggagaatccatgatgagcgttgactttgttgtttgatccgaattaattttttccggagaaaggagagaaagttccgaagaagaaaagaaggcgtcagctctggtttgatatattcagttgtatcaaagtgttcatgttgagacagaactcaccggtgtgcccggcctaatctctgagccctctccactttccttgtccacctgtttctttttctgagtctcctctatcagaagagacagaatgcgaacacgaaaaggaaaggttagctgaaaggtccggagaagaaaagggcaatagaacgatgaacgcggacttgccccactgctgcaacgaccgttcgtatttctcaaacacatcttccttgacccggttgatctcgttcgcgaactcttcgagtagatccctccgtttgatttgaagtaggccgtcatgaaactcgtagatttcccgcttgatgagtttctaaagatggggaggagccggtcgacaaatagacaccatcagactcgtaaccagaggaaggctcgagagagagagagagagaggagaagtctcccgggcaacgcaaaagaagcaaagcacttacagtcatagtaaacttgttgtaaggaaagatcgtcggcatgagttcaaacagggactcgccatagaatccggtgagcaacgcggtctttgcgacgtccagcaggaccggcttgagcttcggcgggaactttgctttgttcgtccagttttccttcttgacctgcttcttgagttcgtccagcttttccctcaacgccggcgatggcgtcggtttcacaatctcaatctcgtccgacttgtcaacgtcgaaaggcgcggatgccgagccggtgcctgtcacgaccgagaccgggcctgcccccaccttggagggtttaccttgtagagaagctgtagcagcagcggcagcagaagaagaagagtgatcgttctcggccgaaacgataagaggatcgttcggatcaggaccggaaccagacggagctacaacagatgagaagggcaaggacgattcggtcgaaggaggaataggcttcatttggcccccgaccgagccggtatttgcgttcgcattcagcgtcgagtttgcacttgtgctcgcaccggggacagcactattcgaaacggccgagggagcaatagtcgagctaggtctcgactttggtttcggtctcggttgaaggatgttttcttccgtcggtcgaccgtccagttttggctttttcgctttcgaaggctgactgacggccggatcggctggtccggatgaggacacagacgaggacgacagtgccggggcggaggccgaatgagctagtagagtgtgtgaagcggaggtggaaacgggggcaggcgaagggacggaagcaggtgtagaaagaggtataggcagtgtggcatttgccgataccacgcttgccgccttctttgctggctttggcttggtggaagggatgagagtgataggatttcttttgaacgcggagaaagaaaccatagaagaagaaggaaacgaagaggaaggaaaaagagtcaatgaatactggacacgtgtgggaaagaagagagaagaaaaaaagaatgcgaaaagagagagaaagaaagcacaaacttttcttcgccctggaggacgacgtctcctctacagacgtaaaagccgggtttagcaggaatgcctgaaaaatgaggttcgtcgatcccttgagtagaatcgtctacgaacgcgtccgtgatgtcgtattcgttgtctttgcttttctttttctggacagatacaaagaggccaggcgagccagatgcgcgcaaggaagagataaacaggaggggaaaaaggaaaagaaagattaataagtgaccgttctgtctatcagtgccagcagagaagagagggaaaagacgagagaaagaaaaagcgaagagaaagaacacgaacgatcgagacggcagacgtctttttgttgccatacctcttctcgagttcccgggcgagacgttcttcctccgtcccgccttcctcatcatcgttgccgtcttcatcttcttcttcttcttctgcccagagaccgccgagcatgcctctgagcgaaaagttttccatcgtatcctcgtcgtaaaactccatttcgtaggctctgtcgtacagactgaactcggaggccggcccgtcgagggtgtgttccagtcgaagggtgatatctggcttgacgggcgccggtggaggtgagggcgagggtgtgcgctttcgttttcgtttgcttgccacaacggccacaggagcggtattggtagcaacggcggtggcggagacagggccagaagccgagtcagagtctgtgtttacgatgggaggtgtggccaagccgagagtcagactagtgccagacagagtggccgagtttggtcgagcgattggtgtgccatcgtcgataggagaaagcaggaggccagacggagttggttcggaaggaagaccggccgatgtgaccgtcgagttggtagcgagcgcgatggatgagccgaggagtatcggagcggtcgcttgatgggtgtcgtctacgagagaaagtcctagccctatggttgctggagtgctaagtgccgaaggaaaaggggcgttgatggtggaaacagtgatattattagtagtattggtagcagaagcagcggcagctgacgacgacgaaagcctggccggccgaccttcgtcttcatcttcatcatcctcatcctcatcgtcctcttcgtcctcatcatcgtcgtcatcgtcaacatcatcagacatgttgacatcgtcgttgagctcgatagagagatccttgcccttgcgttcgaggtggctgtttccgttctgatgaaagaacgcgaggtctggcttgatgtcttcggtgaggaaagcttcgaactcgggtcgttcgatcacaacagagatctcttcgtcctcgctttcgtcctcgctctccccagaggtggtgtcttctaggtcgatgacctccttgtcgccctcttgaagcattcggagcggtctctttggcggtggcccaaggtgctgatttgatttgtaggttggcatgggttgagtattatttgttgatatcattgatgatgttgttgttgtcgtcgcatttgtcgttgacgatgatgccactggtgttgctgtcaaggaggtcatcgttggtgctgaagagagggtcagacggtgagaggttggttggtgagaggttgatggatggtgtgcgtagagcgagtgttgcgagtaagtgagttgtgatctgtgattgggagaggagccatccgtttggctgaagggtgagccagatggagggaataagtttgagtgttgtgattgtggatattgatgttgatgggtcggaggaaagagtgattctgacggacgccaggttgaatgagtgagcggtgaggacgaatggaagggcggtgtgttgatgtgttctgggatgtcgtttggctggatgatataatgttgctgaggctgatgctgatgatggtgctgaggctggtgctgctggtgatgatcagtgctagtgctgagattgccgttggtgaaggaagccgctcttccgaatggtttgttgatcaacctatcgagcgaggacggaacgacggcgacgtcggcgtcgatgctggccttggtagaagcaaagccgggactgatatcgtttgacgaacgccgagggacggacgagctgaacgaacgggaccgatcaaacgtcgagagcgatccagccgagtgggatgaaccggtggttgatggtcgacgcgtcctgtttgggttcacgcctgttgttgcggtggtggtggtggtgtctgtgagagctgtaggtgggagcatcccgggagaacgtactatagagaaagagcaagcggtgggtgtgggtattcacgtcctgtcgtccacctgaggacctctgtaatgaagcttccttgatgtctttgattgatgtctttctcttctctgcctttctcctcgttggaatggagagaaggtgaacggatggaagagaaggcaagcgagatttgattaggatggcggtgtattgagttgtagtgatgagttgtagtaatttgtattgtatcagactgtagtgagttgtattgtattgtgttagactgtgttgtagtgtactgtactgtagtgtgttctactgtaccgtgcgaggacgttctgattgtgcacaccaacacaccaactcaacccgctcgggtgtgcttgtatcgcatcttgactgagccttctcccccgctctctgtcgccatgtcaagttgaacaagtgcataaaatttcaaatagcacacatagtaccccaggctcaaattcgcccatctctttcaaaccccacgcacatccccgtccacaacgtccccttcccttcgtttcctcccccactcctcgcacaaccttcctcccatacacacacccacttgcacttaggcatcggtgctcatcgccaacacaggagcagaggtctgtcctcgagttccctgaccagcaacagagtcgttatcgatcgtctgttgatgaaccccacaaaggtttcccaaaagagaaataatcatctctcagcgtcctggtttcaaaacaccaaaagaaagaaaagaaaaaggatgggagatgtgcaacatgcttgtacgcgagcgcgcgcgcacacccacacctctactcactctaggtttactcgatccgctctcatccttcttctcacccgcaaccttctccgctcgctccgagtttctgtccccaggtcggtttccaccctttcctccccgtcctccacctcgaccaccccgagcgccaccccgaccaccccgtccggagccaccgcttcgactgctactgctcgttcccgcctgggtcaccgcctcgagagccttctttccctggaagtttgctcgagagacgtaatgcgcccggagatcgtctccctcaaggaacgaccactggatcttttgaccacccaccacaatatccctcgcctggagcgcggccagactctcaggagtgaatgcctcggcagagttctcgaacgcacctccggtcgttcccttggggaacgagatgaaaggtgaggtgaatccagcggtgaccaagtcggcctagagtggacccagagtagaatccagacgtatatgcgtgtacggtcagtcgctagacagcaaaggacaagaggaagaaagaaagaaaaacggaaagatcctcaccttcaaaactcgccaatcgccgtccggtccggctccggagaaagagaggacgtgtcctgtcgggggaacgagagcgctcggctcggccaagtttccctccgagttgaccttgagcttttgtcccaagtactcgatttccagatcctgtaccgtcaatgtgtgtttttgtttcatatccagtcaagatccttttgtcagtcacattaccgttgttaccacagacataaccacaaccaccatcacaaacaaatgaaaacccacctcgatcttcttggctcgcttcctctcctcctcctctcgctgctccttgttgtcctctcgctttcgcttcgagccgccggaaccagtgtccatcaacttgaacgcgttgaactttccttttggcatggttgacgaggcgctcgatcccctctggatagagttggggtcaatgttcttttccttcatcttcatctggacgtaagcatccctgagtaaccgtcaaacacaatcccgaataccgtcagacacgttcactttgaaaacagaagacacgtcccacaagcatacacacactcactttgtcatcgcagagatctcggcaccctggaacgtaggtttcggctccaacgcgaggaacttttcgacagactccatctctgcaaactcggtgaagaccgagttcttgaacaccttgtcgtctccctttcgcattcggacgacgttgaccttgccaaactggttgaaccactcctcaagctcgagctgcagcgaaggcgactccgcagggaaacctttctagtatgcccaagaagacgaagaagaaaaaagagaggaaaagacaacacgatcagtctgatgtccattcgtgaagagcaaaagaaatggtggaggaactcacagcatagacacttcgagcgaaagcatcggtaggaggcttcaactctctggttcgcctgaccttcttgccgtcctggtcgacggcgagcaactcttcactccttcggagagcctcgaccacccagggaagtcctttggcgaggtactccttcattcgagagaacgaagcgacggtcgcgatatcaacccagccctggtggaggggatctcgctgggtagccgtccagaggaatttgtcgtagggaaggttggaatcgttgaagtagaactcgactagagagagagggacggaggacgtgatgaagtggtttccagaagagcgtatcaccgatcaatcaaacgtgcacgttgtttccagacaagcaagtacaaacacaaagcatcacagcgatcagcctcgaagaacgctcctgaatccttctcctccttcccttgacacgcccgacaagaagagaacgtaccctgagccaaacacttcttagcaagctcttcgtcctccggaagaatcacagacgtagtctcagcagcgacggccggggtctcgacttgcatcttagcctcagtagaagcgacaacaggagcggattcttcagccatgattctgatacaaaactaggacagaaagaagatagagagcgatcgatgggggtttgtatggatcgaatgagaaaccaaacaag

SEQ ID NO: 1059 - DNA, 7922 bp, Xanthophyllomyces dendrorhous
ccccccccccggcagtaagtctggtctcattcagtcaacggttgtatcctcaacagatccgtaaacacatacttatacattcactcgcagtatgtctcgtataaactctttcaagcggtcgtgggcaggagaagatacgcctcagactgcagatgtcgcaaaggataggatcagaccgtcaatgtacaggccaaccggtccaacgttggccgcgagctcgatatcgtcaacacctcctcacaggaccaagccatcgtcttcgatagagatcatcgagcttgacgacgacgatggagattcttcaaggcaagcatcgttcggttctttcatctcaacgaactcccgcttgtcctagcgctctcgatgatctcgtttctgtctgagttgtattgacctcgttcccttgcatacgattacatgtcatgtcgcacgacaggcaatcagcaccacctaaacaagccaactcgtcgttcacacgcccagcacccgcaacagacaccacagcaccggctccacctgcttactcacccaggacgcggcgtcggatcgctatcatgggcgaagcagccgctctaagcccatcatttaattcgaccttcaacttgccgaccaaacgaccggcctacgaaagtctcatcgacggctccacaggacaaaccaggttggtctttcttttctcttgtttctctgtccagcttccttctctacggagtcttcgcagagtgaacttgtcagaggaaactaacctagctcattcactgtcgtttcaagaaaacgaattgtctctgagaattcagtcgtcaaagcagtggtgaaacctgtcaagaagaaggctatcgttctatccaacgaacaaaaggccgtgcttgatatcgtggtcaaccaaggtcaaaacgtgttcttcacaggatctgcaggtgagttatctttgattcctttgtgtttcttccatgtcagtcgaacgtcgatattggtcttgctcgggaagaccgacgaggagaagaagaggagatatatgcgctatcgatgtggagtatatacgtcacccgcgcgacaccgttccttcttctttccctcgctcattcttaactgaccgtgtctccctttggtcttttcgacaggaaccggaaagtctgtacttttgcgagaaatcataaaaggacttcgaacaaagtacgcgaccagaccggacgcggtcgccgtgacggcagctacagggatcgcggcttgtaacgttggtgggacgacactccatagtttctctgggatcggccttggaaacgagccagccgataggctggtgagcaagattagaaagagtaaacccgcgtccggtcgatggaacagaacaaaggtgttgatcatcgacgagggtacgtcttctttctgacaaccatgggcaattagagataggcaacctgtggagctgacttttgagttccttacacgtagtatccatggtggacggtgatttgtttgataagttatccaagattggcactatgtatgttcacccaaacattttctttcagtggtcgcgcgatatcctttgaacatttcttatcattatacgtttgtaaaattcaggttgagacgcgaccaacgaccgtttggaggaatacaggtgtgtctgggttcaagttaattctcatatctgagcgataattaacgactttggtgtatatgtgtcctctctttctctttctcttctcctttctgtcttccttctctatcagattattatgactggtgatttctttcaggtacgttttcaagtaaggtatgactcgtttgttctatagttaactaacctagtgtaatggttcttttctatcctctctttcccttctcagttaccacctgtgtcccgggattcatccgccaagtttgcattcgaatcggccatgtggaaggagaccatccatcgaactgtcaatcttaccgaggtgagttgacgtttttccctctgccttttaatgcccccgtgcctctcttacgatcttctctatcggcctatcaggttttccgacaaaaagaccagcgtaagtactttgttcgcgtccggacaccggtaaaaaaaaaattaaaaaaaagagtcattgtgatcgctccgctcaatgttctttgtttgtcctcacacacacacacacacacacacacacacacacatacgcgcaggctttgtcgacatgctgaacgagatgcgattcggtcaactctctaacgcatccattcaggagttccaggcattgtctcgagaggtcgtctatgccgatggaatcgaacctaccgagttgtgggtgttatacatacttcttccttcgtgttgacagcgctttcttcaaaaactgatgtttcgcgacccttttctctgcccgagatagatatccacgaagagaagatgtcgaggcggcaaacgcgaatcggctccggtcgttacaccaggataccatccgatttaccgccgaagattacgccggtcagactgggatggatcgggctcagctcaagaaagagttgagcaacatgctcgctgtggaggaactcaacctaaagatcggtgctcaggtgatgttgatcaagaacattgatgatgatttggtgaacggatctgtcggcaaggtcgttgggtttcataccgaagccgagtggggaatggtctcaagagaatacgagctagatggactgagtgggttttcttccagtgggtcttcctcggttgatccaaacacaggcgaggaaaaggtttggtcggcaggaggtaaaccgatgaaagagcaaacgttaagacaacaggaggccgcccagcagagtacgaggaaattcccggccatcaggttcgctctcgcctcgggtggataccgaaaccggttgatcatcgcggaaagtttcaagatcgatatgccggatggcacattgaaggcggagaggaagcaggtctgtctccttgtttccattctcatgacgctgactttgattgagcgagtcgctcatgatcatatcggttttgatttgttccaaacaggttcctttgatccgtaagcgtcccatagttatcatccgtaaacaacaacaagatcgaccaagactgatttctattgtttttattcgatacgtgggtcgaaatttagtcgcctgggctatgaggtcagtatattactcctatgtagaggctagaagtttgatcgtctcgctgaccgatgtgttgtgtatgtgtgcacatatatatttggttatgtagtatccataaatcacaaggtcaaagtgcgtagtcgtttgttttttctctctctcgcgcgcaaagcccactattggctgactagtctgtgttgtggtgcattgtttaaaaattctttccagctctcgagcgggtcaaggtcgatcttcgtcgggtattcgaaaaaggtcaagcgtacgtcgcgctaagtcgagcgacttcgatcgacgctctacaagtcttgtcgtttgattccaaaaaggcgagtcatagccttgttagggttctgtgtggtggtgtaaatcgtgtggagtagatcgtgtggtgtatttaccctcatttctatgcgtttgtcttttcatataggttatgtgtcatccaaaggtacgtttttccctttggtctcttttgctgcgtagttcttcatccggatgtaatcctgacgtgaatttttggatggatcggctttgagaaggttgccaagttccatacatcactcgagacgatctaaatcttcgaagtcagagtctcttgacttttttctctttctctctgttctccaaactagattctttccccttcatccgtccgcgcatcaattttgtaacaccaccgccaccatcatcatcatcatcatcatcatcatcatcaactatcatcctttttgcacagatctacaaagtttccttctatttctttcttttcttttccccctgatttccaattccttgaaacattgcttcctacatacatacaagtcgtagcctcttctttccctacctgactagtccaagatgatacccagctaggcagtgctctatacgacgacatacgtcatcctgacttttctttctccttgtactgcccgtttgtctgtctaggctggtcattttgacaatctttacactcgtgccgagatacacgagtaatgatggacaggtaaacaagacgacggtgacaatacgaagcaagctttgcgagtctgataaaccagagaggaccgtgccatcccgtgtgctttcggtcgttccgcacggacggagatgggcagacgagaggaaaagaccgtatgccgggagccgggaaggaggagacggcaacgcgggatgaagttgagggagatggcgggacggttgaaagagacggatctatctaaagatgtgaaaggagttgtattggagggttacgaaaatcaattaaagcgttgacgaatgtgaatgagaggcgagagagagagaggaagtttagtgtcggactgggtggccggttagaagagtaatagaacgtccggatcaaagagagatggttttttacaccgcaagcaaactaagtaggcgagcgcactaaggcaacatacaggcacaaacgcgcacagaacacccgtacacaaacatacacactccaacaaggcgaccgtgcaagccgcgcacagccacactcccacccggacgaaaataagtgacgcgactgatttttattttattttttctcactcgcctctcccggccctgatctgcttttgattttactcttgccgattgtcctctgcccctgaaggccgagactctctgtttgagggatgttccgacccagggcaaccttctccccctggaatgcctgcggggctcgttgggtgccctgatcgaatgcttcacgcgcgcagcaaaccttctttttcgccgtcaccttccaccttccacctgtcaccttctttctctttctctttctctttcgttcttctctaacaaccatctcgctgattcctttctttctcttttctttcttcatcccttttgccctgttaagtttgaacaggtttccaactcgacactcactcactctctttccaactatccacccttttcggtcactcactcgctaaccaacagaggacacaacccatccggttctccttttcttcgctctttcttacagctcttctccttgctttcctccctcaatagccactcactcgtccaccagctttcaacatgctctgcaaccttagccttcttgccgccggagcggccctcatctcgcctgtcatcgccgctcagcaaaacgctcgacacggcagaccggataagcgaagcaaagaacaccgaaacctcgccgccctcaagaacggaccaaagatctccaagcgagaaactttcagcggaacgttcacgttagttttcaagctctcgatctctttgggtacaaaccgcttcttggtcaactgacaaatgggattctgttttgtctttcgccttttgctttcgtctagctactacgattcttccgtatgtcgttgtttttttccgcctcttaaaatagagagaaactacgccggtgcccatcatgagaaatacgactaaccgcccccctttttctttctttcttgtccttctttccaatcaaggtcggactcggatcctgtggaaactacagcaagtcacctcgcttgctcgccaccgtttcttctcgcaccgcatagctgaccttgtctttcccttcatccattcaacctgcctcacttcagatggaccggacaccatggtgagtacaccaagcccatttctatccaactcgtcgacctcagaaactgatctctgatatgtattcccgttcgttcctcagacctttgccttgaacagtgcccaattggaggccgctggaggagggtaccccaactcgtgcgttctttttcacactcgttcttttccctttcctggccatcgtcactgaaatccattcctctatcagcctttgcggaaagaccgcgctcatcacctacggtggcgtgactgtgtccgccaccgttcaggatgagtgtacgttcgattttctatcatttcattgccatcaacacttgctgatcaaaaccatgccgtccgtctcatttgtacaggcccctcctgcagctggggatctcttgatcttacccagggtttgttcgagaagttcggctcaaccgatctcggagtcctctctggttcttgggtgtgggctgatgattccaccaccaccaccaccactacggctgaggctgagcctaccacgtcctcgacctacgttacacccacttctacctacgtcgagcctacttcgacctatgtggagcctacttctacttacgtcaagcctacttccacttccacctgggaggcctcgagcgaaactgtggctgctactgtcaacgctgccatcgccgctgccgagtattcgacttacgatcagcccagctccacttatgttgaacccagctccacctatgttgagcctacttccacctacgttgagcaggtctcttacaccgaagccgtgcctacgtccaccgatgccgcctggacggctgctccttccgccactggctcctcgtctgaggccggtttgaacgccaccgagctctgtggggcatacgatgagatcgccttgcttaacggtactactgtcctctacgatggaaccactgaggatttcttgaactcgaccgctgggcctctcaagaacactaccggtctcactaaccagaccgatgtctccgtctacgatgctaccactgatatctgctacaacgccacgatcacccctctgctctccttcccaggcttcaccatcgttgccagcaacttcgtcgccagcaacaacggtacctttgcttccgccgccaacgttaccaccgcgttcaaccgaacatcttccttgatctccaacaagttgtcttccaagctcgccgacttcgttctcgccgtcagcaacactaccctcccggccgcctcgaatgagacctccgttgccaacagtaccgagattgcagattacggtatgcttgatctcatcagggctctggttcagaacttggtcgacagcgaggttgcgtatgatgatcttcccgagtgcgaagattacgatgattccgaggataactaggccatctagttgaattctctcgtttaccgttgcttctttggaattgtttgcacacccttccctcgttgcatagcatatatctatatacccaattttcttcttttcttttcgtgcatccttttctttcttgctttctgcccaactcatagtagcatctctttcagcttacctttcttttcttcctattttctcttcgagttgaccattctagataccccgattctaacttgccgtcggcttgtccggccttgtctttcacacgtcgtatatacacagacatgtatagatatctcataacactctcttgcaggtatcttctattctgctctgtttttctttttcttttctcgttttctccttcctctgtcgacgcttgcagttggtagaaggaggagaaacgtgtagatgaccggtttatctacttctactatgatgtttctttccttgcctcgcattcttgttctttctttctcgtaacctcatcccttgtcgttctaggaaggatgatcaaacgtagaacaagagaagatcatcagagagaagaagaagaggaagagctcggagggtcgacaacgtctgagtcggggagtgtaagtttgggttttatcatcacccagtattgggcttcgtagatgtatcgaaagaggccgtccagggtacctgtgtaatccgagtcaactgtcgatttcattcggaatgttgaccaaggggagggggggttagaaaagaggatcagcgatgacgggccagaacgaggaaaataggcagacagagagagagagagagagag

SEQ ID NO: 1060 - DNA, 3774 bp, Xanthophyllomyces dendrorhous
agagagagagagagagagagagaaaagagaaggaggggaaacgaaccggatcgaaggtccagttgctcgaaccctatcatcctcgctaaatggaggacctcatctaacgaacattccatccgggctttaagaagaaggaaggcatccacggtttgtcagttttgttcagacggagggggaagggtcgatgtgtatgtgtagtttgtaagaatggaagcgctgaagagaggaatgaaactggatatcggaaacgtacgatttcctgcccataagagaggacctagttcacgatacccacagaagattgagtacccagtccgattcaaatcaatacgagggaaaatgagaacgagaggggtgagagtagaagaaaagagagaccttcgttgatccagtatccgcccggtttgagtgctctgtagatcgtttctaaatacccaactatatcctgagctgtatcgatgaagaataaggtctgtcggaggaagaagatgtaagaatgcaatcgtcaggactgcgagccatcgatcgagagatgagtgagcgagaacagaaagagaaagagaaagactcaacgactacggcgtcgtatacttccggttgacggtataactctaaaaaatccccaggctggaaagagagcagcgttggtttgggaaggacgtctgggaacctgacttctcggctgtaacgacgatgaagaacgcgaatcaaaggatgtttcatgtaattaaacagatgatggacaaaagggcgcacatcatatcttgcgctgttcggtgatgggaaaacgaatggatgttgggaaagatccgatgctcatttatcgactctgtgtgcttgaagattagtcgggacgcaatactacacaacgcgcaagagaatgagcatggtcaatcttcataaaattcaggaaaggacagagtcatgtttgggcttacttcatgcttgatttgaataaatgaacacagagagaaggcaaggtgatgcatcaaacaggggatgattgaaagagtgaactgaaaggttgaggctcgacatacaagtacgagtaatcattggcgtctacgtcaaaaccttgaaggatattccaggacaagtcgttatagtttcagccgacatgttcagactagagaaactagagacaagaaaaacctagatccgatatctcataagccaatctgcccaatccgcacccgggtaccaagattctcaaattgtctcgctcaaaattgtccatcgagggatacaagtcttccaattgagagagaatgggcgtgaatagtgcgcttcgttctcgaactccctcagtactccaatccctaacaaagctagaaatcaaagggcaaagaggcaaagaagaagagatgatcagcggcaaagagcgcatgttgtcggggaagactaaaaccaaatcaatgctcactgtttcaacatctcaatgaccctcccgggctccggccttccacctccggctcctttcctccagccccagcctccttcaaaatctcgttttccaagaccgatcagtccgtcgaccaagtcagcgttggtggccgaggcccgagtgatctcttcgagctttgcttgatagcctaatgcttgtgcgtatcgcttgcctgtgctgccaagtgtccggaacgaccttttcttggccgacagagacgactgctgggatgaacggtaggcagaaagcgaggtgagagtgtgatggagagactcgacggatgtcttatgagagtaaccgccgagcttctgagggatgagaagtgaaaagggaaaaggaagcgagagggtgaacgaccggggaagtagattttgcaatgcgagaaacgtgaggaagaggaggctaaggattatggggaggagagccagaaggactagtgacggtgcagacggcgctggtgattgcgatggtgatgatgccagacgagtagaaaccggccgagcgttggctgccatgagatgatagttgttgacgatactgccagatggtgaatgaaggaaaaggtaatctagaaaattatctaaacgattctgcgattcgtcatagtcctctctctaaccttctcttcacactctacatcataaatgtgctgctctttgtactcagtggtatcgcgtgcgctcagcttccctatcttaccgccccatcctggtctatgaatgaggccataggaagtagcagaaggacattatgagggaagggatgattggtacactcgtcatcgggtaccctcctcacgtgacctagatcgtaaccaagaccctccggatttcctcttgctttcattcgccttctgtttcagccaagtcaaacgaccagcagaaagagccttttctttggcaacaacaaccttcttaacaagcacaaacacattcgtcatggtgagtgagagcaaagattgaatatatgcatattgggtctaccggtctgtttgcctgagagaggatgggtctcggctgatgactcttccaattttatttggactggttttttctttccctctcttcacaatctttttcatttctatccttacaatctctctccatcgctcttgtgtcgaacctgaaactattcaaaggcgcctggaggaccacctggaggaggacgaggccgaggaggcaagttcaagactaagcgaggaggaggacgacacttttctcgaaatatcggagaggtcgagggagaggacgcttttgagaagtggttcgtctatgtttcatttctactctattctctttcttcgcaagtactggtatctcggataccatcgtagctgccaatatgtgaacaggaaaaggcattgagtgagatgagaaaccagaaaacgtctatggagtgcctgactcttactccattcctcttctttactctatctcgaaacaccttctgtgtcacctccgaaattgacaggcaagccaaagactccgatgacgagtctagcgaggaggaatctgaggaggatgattccgaggaggagagctctgaagaggaggacacccccgctcgacctacaggcttcaccgttgatcccaagaaggctgcccttttcggaaacacccgttcgtcgattcttcgttttcttatcaaccacttggtgtacaccctatgtcctcgttcatactcatatcgcatctaaactttcaaaacaacagccgttgccgaagaagagccggagatgtctcgagctgagcgaaaagcgatgaagaagaacaaaaaggccgctcccaagaagaaggtcgagtcatccgaggaggaggagtccgaatcggaggaggaagtcgtggtcaagaaggtcaacaagttgaacatctcgtcccagcagcagcgaaagccggccgcaaaggtccctgtgcaggatatgactaggaaagagaggtatgatactctctcactcaagttctttgatcttctctttcgcccgggctgccgtctgatcgatacaatatggtctttaactgtttcctataaagggaggaggccgacaagaaggctgctgctgagaagtaccaggcccttcacgccgctggttcgtcgtacattcttgaaaagaccggatcggaccacttgaactgattgtctttgtcaatttcttctgtcaaccatgtaggtaaaaccgaccaggcaaaagctgatttggctcgacttcaacgaatccgaaaggagcgagaagaagctgccgctaaacgattggccgaggctgcttgttcgtattctgctctcctttcatttttttgtttttaaatgagagaacaacgcttaccttcttg

SEQ ID NO: 1061 - DNA, 90895 bp, Xanthophyllomyces dendrorhous
ccttcttgttttttttttttcctatgaatttccccttccttcctcctcgaatgaacagccgccaaggaggaggctgaagcgaaacgaatcgctcagaaaggaagacgataaaccccttgctcgttctcccatcttttgcccttctttttcttccatctttagcctcttcttccctctaaagtctcgctgggtctggtgactacttctggatattcattagcctctttttgcccaatttttctattcattaaatcggtcgagatatctaacttgacaaaactcctcaactattgatgaatgctttgcaatctcttgcttacaggatgttatagagaatcatggaaatgaacatcagtcggatacaaacaaggggaaaaaagggacatggataaaagaaccaaaagatttctgtgtttctgactatctatccatctactgaatttacaacaaagtgccatgtcatgtccaaaggatgaagatccgggttaaagagaggaatgaaaaaaagagagcatagatgtttctgctcttcgatactctataagagggaggagaagggtgaaggggactaaaggagagaagaactgaactttactcagagagatggatatatagatgaacgtacgactttgagaaagacaaagttacaaaagataaaggaagatactctctagattataatatcctaccgtgattaatcgatgcctacttcgtttctccaacctgaaccttcacgaatacatctccctccttagcctgaatgatctcgcaatcctctgttcggtctccatcggtcgagatctgactctcgaggcatgcaaagtccgtcgggacaaagctcaacacagaatggtcttttttccgttcgtcagatgaaaagagatgttcgaattagactgacgaacaaactgatggagaaacataaagagaggtaaacatacgccagactccgacatcataggtaattgcctgagaggccgacgcaatgaacgccttggcggtcgacacgtccggcttgtcatctaagagcatccaacggaaagggctatatgtgagcaaacacatgatacacgcacgtttagctgaaaagagaatcggcttaatgaatcaaagaccgactttttccattgagcgcaacaacgaccagcatgccttccccacctctctccagtcctccgttctcatccttacccaaaggtaagaatgtctgggtagtgaacggatgtcgttcccacatcttgctttcgaacaaccagctatctccgccgagtttaccgaaccccttcggtggctcggatcggaaacagctgaacgcctgaatggcgccgctgttagcagggtatgtcgatcgaggaatagacagccggtgatatttcgacgcggtcgatccgtttgcagacgtcactttgatatcgcgcggagcgagagattgatcagggaatgcctggacgacctgcccgaaaggtgcgaacccggaggatgtcagaggactggctgcaatggtgggtaccgatgaggatgaagaaggcgtggtggtggggacggcaacagtggcaggggttgatgaagatgactcggaaggtttaggcgcagctcgggttccatacactcgaagtcgcttgactcctccatctaatttagtgacgcacggaaggaacaaggagttagctaccgagagaagactgtactttacaagaaggaagaaaaaaactatcttaccaggaatgatcgtcatccgaacgtgggtaaatacggtttcctcggcgaccttgatgtcatggaaatggtgctcgtgcggtccgacctttgtcctagagaggatctgggtccatccctcttcgacattcaacgaaggaatttcctacaagatgagaagtcccgtcagtaacgtagtagtgagtaccaagtgggtcgtagtagccacgtgtattcatcgctcagagagagaacgcttacaagaggagagttgatggcgtgaagttcaacgccagcggggaagttacccttgtagtgaagagtatcgatgtcgaccctttgaatttgtcctggagcgcctctgatcgatcacatgtagatgcacaggcaacaagccagatcagagagaggttgagcttcttcagggacaggaacagatcctcgcttaaagtacttacaatctgatgatgacgaaatcgtgatgtccagcggatcgagaacgcttggtctcccacccgtcacccatatcttttctgaagagtgcatgaatggatgtttcttggaatgttagtattgagacctcacatggaaaaaaatagaaggttctgcatttcaaacttaccctcgtccaggcaagagaaggttggctcctacaccgtagtgcttatcgctttcatacacactatcagaaagacaggatacggtcagtaaagacaattgagggatggattctgattttttctccttgaagaaagtctcgatgcacaagtccttaccatcgtcctccgttgaacgcatgggccaaatcgacttgtccaggcttatcaccatcccatgaatgttgcttaccccagatgggagaaacgataccgtaacctctgaaccgggcaatccctccgtcgggatactgtctcagtcggagatgggtgtatggctcggtcgtctggggaatggtgaacaaatgtctcgagtgaggtcctaaaggaacctttgggataagcggcgtccactgagatcggaaggacgagtgcaattcattcaaagcgtgtcagacagaattgatagactgtaatacgaagagtcgagcacgatataaaagtggttggaacgaacagtgctctggttggtagggacggcatcaggcgaatagataccctcaaccgaagcggcaggcgcttcgttgccgctgaagaacgaagtatcaatatcaaatcctttcaagaaggcagacgggggtcccagcttgataataaccctgtataattgaaaagaaagaaaggtcaaacgatgaatacttttgatgcatcaaatagccaaacctgacagcccaacactaaccagtcatgatcgggattgtgtcgtcgtgactcccagccagagaacagggctccgttaggaccgaattggcctttcatactgaccgagggctgaagcagccaattagaataagaaaattacaagacgttagtctagccaagctaggcacaaagctcatatgatagggaatcccatgcccacctcaaccttgagcaagtcggtagcactggtaccaaggatataattcattggagaaaatcccatacgtcggccgtccaagacgaaaagtccacagatgacatcagtcagaggataaagagataaaacgacttgaaacaaacaaatcaaaacaacatgctacccacggagaaaaaaagtcgtccctttatcccataaacacaatcagatcattctgtcagcctcgacactcgatacagccataaatatgagaaggaggagacaaaggaatgaagaggagtagagaaatactatctctctcccatccatccgtccatctacaaagaacgccagttcaagaagcaagacttacgaaacatccaagatttcagctccagtagccacactcgtcacttctgtcgtagttgcagcgagcacagactcgaatccagagattgggagggaattgaattgcattgttttatcaagagtttgaagagtaaagggagggaaagatgtaaagaaagaaagggagaaagagtgcttagatgagcaggtgccttttaccttctttccctgtgccggtccgatcggccgtcgccggtggagggaataattcgatatttgatagtgagtgccattagataagccgaataaggagtatcctccgttcaagtcggatactatctcgcaatagcacacacttttggtccccttcccatatggggtgaaccgggcatcaaatgaatcaagagagtagagtcaaataactaacatggatcggcgtgtatcaaacctgggatcgacagatatttaaaaacaattacggactcgaaaggagaatgaaaagttgaggggaagttgatggtatatcaaggctttttctcaagagccagatgcaagatgtaaaacacaagaggggacgaagacatttggaagcacacagaattaggacaatgtggtagggatgatacagtacgacacgatgtttcatataagttgaagagccgagaagtatattagaataaagtggaaagcggagacaaagaaagaagaaaccccctatcagagacacaagaaaaatatgaacgaatcaagctaaatatcagagaaaacatagaaaaggtgaaccaaaagcaagatacacctcagtttgccgaggctttcggttgagcatccaaatcacagagcctgatgagaaggaaagaaatgaccgcaaagatcagcaatcacaccctcgtgcgtaggaaattgatgtagaaaactcactcgagagccttctggtagatctgagcgtatcgccaagcctctcccttgagccgcttgaaatccacgctgtacagcccaggcagattcttgatcctcgtgagctcaactacaaaccgaatctcatcccctccgccatccggctggccgacatgggtagcctgagcggatgccgagacagacggtggaggcgtcgccccgtcagactcgaacgtcgagccggcatcatcaactgttagaggagacgactggttaaccgaaggactcttagtgctatacgagcttccccggtgtaacatcaggcccttgagacctgaagaggacaagaacgaggaagacgaaggcgaggacgagatcgaggcacctcgtctgtcggtcgatgacgtcttagtcaatccgacaagcgagaacccaccagccgatgtaggaattccacctccgacgtctgagattccaagtccgactgacggtcgaccaccgcctgccgccgacggcctctttgccctcacacatttcaatttaaactcattatccttctgaacctcaattcccatctgttgcaacacgctgacaacctgggcaagcaccgccggtggatgggctgaggtgacagcttttttgtcgaccactccatgatgaaccttaagcacggagtccttaaaggcagaggacggaaccggcggaggaggcattgccatagcgtctgccaactctctagcggtctttccttcaccgctgaggatctgtgaggaaggaggcgtggtcgagacaatcttgatgctgctagttgttgcgcttggaggaaccgagctcacagtccctattgacacatccggtgcgtcatccgactcgatttccgacgattttataaccgacgggcccgactcggacaccagtacgcttgtgaacgaagttcgttccttctctccaggtgtaaccgccgccagggcaggcatcgccaagcgaggctgagtatcttttgccccaccaaatgtgttcttcgtgcttttctttctgaaccaatccattaccttttttgcagcaccagtcgaggctcgggtactggtagagttgatgctgccactggcttgtcgatttgtgatgtccgttcctcggaaagaaccaaccggaatattggagttaggtcggaaagaaggcgttgtcggcgtccgagcgtccacagacacgtttctaggaggcttagatgatggcacagtagtagacacgccggacccaacgggcgcagtcgaatctttgatatttgatacgttgactgaagctgaatcgaccactataccattcgtagcctttcctttggttctatccctcccagatgcgctccttcaaaatggatgcatttaacaaaacgcgttaaattacaaaacgaaagtaccaactgaaaaagaaaacaaaaaacacaagaacttacctagtgattccaaaaggctccatcaaactcatcgtccttgccctgtccttctttcctttgcttccggagccgctcacagccgccgctggggctggcgacctgaacatatctgtgctagctctcgattcaacatcggcgcttgactttccagtcgagctgcctaagaagccggcgaatccgaacttgtccatcgacatgccttttcttgaccgggttggcttagtggtcattggtgaggcgcccccggagacgacggacggtgacgctctggaagtcgggacgggaattcttgaaggcgacgcctcttttcttccggcctcgttcttggaacctggctgaacgggggtggagacggaggcaggagtgaacacctgagaaatcagagaagactgagaaacctcttttgtgcctgccaagggaacagtgcctttcggtgtatccggaggagacaatggctttcgaatcgccctgggcgtgatgtgctcggtaacgacactcaatgttgatttgggtggtgtggtcggagtcactcggacgaggccagcagaggctgaaccggccgacgggacatctacagcattagagacggctggattcgaagtaggttccatgaccgatcctagaggagcagtttgaatgagaggagaatccatcttaacatcggtttcttctccgggcggaccggagtgaacaagaggggaagagggaatagacgatcgggatgtcgtcgaggatgacaacgtcgaggttctagaaattagtcctgttcctggtgaaggaagcaagattccaacatccccatgtacggccgaaacgattggtggagacagtgccgggtcggacactaaaattggggacgctctgtggttagaagagatcgacagaccagagtgtgttctagtccgaatagctggtggttctgaagccgactgatcgtactcaacctgaatcgtgtgtcgctgtttcttctgttgaggaatggacgaagatgacgatgccgaaggtgccggtggaggcggcctagtcgacctggagggttgaggtcgcgttgatcccggttgttctcctgcaggaagatcgactcttgatcttggttctcctctcgcctggccttctgccaagaacacgtcgctctctccctccgatcgtcgagactccctctttccagccgactcgccctcgacggacgagttgatcgaactagacacttctccgagcgaaatcccttgcgtcccgagcgtacttgcgagccctccagtagccacgctaggatcggcacctatcgagagcgtcggtaccggccgaaattgtacgtcaggcatggttgacgtgtgcggcaacgcactctgatgcctggcctgtttgacattatcggtctgacccatagctgccatgccgactgctcctcctccttctcctcctccgttacttgccaatgtggcactctggcttcgagccagctcttgcttagcaacctcgctttgaacggtgtactgtctaagaagctcctgcttccgttcgtcccgttgtcggaccgcttcgtgctttttggcaagatgactctgatcagagatccgttcaagctcaggtaccgtcttactgagcagatcctgatgtgcactcagccagggatggctcatgatctctggaaggccggctcggtaactcggatcaggcacaagcatgatcgacatcaggtgcttggcctcctccgacacatggctaggaaattgaagttgagtggagatgatgtatcggtatagcaagttgatgttgtctccatctgggttggccggatcgtcgtcaaagggaaggtatccggaaagcatagcgtacaaaatcacaccacaactccagatatcaacggccgtgccgatgtattgtccttcggatacaacaagttctggagcggcgtagcagggcgagccgcacgaagtggacattagatcatttccgacctgggtgaaacgattagcaaatccgaagtcggtaataatgacgtttcgagccttgtcgaggagaaggttttccaacttcagatcacgatggacaatgttttttgaatgaagatagtgtacaccagagattatctgggagaacaacttggcggcgtctttctcccgaaggtgtcgatgggccaagatgtgatcgaatagctctcctcctgaagagtcggcaaggaacatgaagagagaacaaaataagttcaggccattttttcgaagataagtatatgtgcgccagatcaatatactcaccgtcagcgatctccaaaatgatgccgatatatctctcggtctctacaatgttatacaagcggacgatattgggatgtttcaccatctgcacacggagataggaataaattcaagctggaagtaagtcactttggaacgtatggatcactcgaacaaagcaaaggccttccttcgtctcttcgaattcacgccaagcaacagtgatatagacagacaagaagctcaatacttacactcagtacttgaatctctctttcaactttgcctttcctcgcttcatcctccaggtttcccttccgaatcatcttgaccgcaacctgctcatgcacatctttgtgcactcccaacttgacctttccaaactctccctctccaagggtctgcagcaaaatgtatgacccaaaaagcagatagtctctctttgggtgatctttcttccacgcttcgactgccggattggatagtaaaagctgttttgaaagttccctgctcgagatcatcggttttcctgtggagaccgacagaggaacgaccgagtcgggttgtgcctgataggatgacgggttatgggaagctcgtttacgagatgccggtcgacccggctgggggtttgatgacgagtgagcggccgattgagtgtcggatggtgcctggtaggacgtcgggcgaggtcggtaggtgacagggggttgagggattagggattgatgctgataagattgtgcatacacagtcgattgtgatgatggtggaggagacgatattggaggcgatggataccggctggcaggatcgatcgagatggaaggaagtggcatggtcgatcgttcagcttttcgatggaaagacgcgccttctttgctgtcgttgtaggacgagacaggagtagtcatttttgtaaggaactaaaagaaaggaaaagggggggaaggaaattgtatgcagtccctttagatgtcaaaaggaaacgaccagataaggtgagtgagtatactgatgaggtgaataaatctgacaaggtcaagaaagggtcgacacgagaaggaaagcaaccgagcttccaggtctgacgctctctgatcacgatgggaccgaaagagagggggaaggttggacctactgaagtgagatgatcaatgtgaaggatgagagattaagagtatgttggtgtgctgggtatgattggtaacgaggtacagagtggaccgagggggcggaaacactacctacgagagaggaaggggaacaaaagacaaacagaatagatcccgtcaggttgatgtctctatcgccatcatacaccaaaacatttccatccgagatgagagtagtacccgagatgaacccacgtgtacagctagaggccggccggagaaagacttgacgattggtatatgcaaggaggagaggaaagtgtcagggacgacggctacgttgagtatatgaagtctgttttcggaaagtcaaagtgaaaagaacagatgcgtcggtagatcagaaagagaagggagggtgacacagatgacaaacagccgacaggatcaatattacggcaagagagagaaacaatgtcaacctctagaattctctgttcgacgctgcatgtattcaaacagtgggacgagcgagatagagacgacagtcggcatgaacgtaccaagaaaacagaaaggaaccgaacaggagatccagaggatgtgtgtgggtgtgtgagagcgtgagagtgtgaaaacaaaaggttaaccggtcgtgtcacctaactgcttctaagaggagagaagcaagagaaaccccaaaaagggggagaaggaggacgaaagatggacagaggaaggaaaaaggacggagaaggagaaaaaagatctttgttcctctgaactgtgtttgttttgtgtgcgtgagtgtttcgtccgaaaaggtaacacgcccaagtttcaacaggcgtgggaggaagtgttgtgaaagagagttagtaggagtgtttgtgtatgtgtatgtgaggcattctggtcacttccgcagttcaggcacaagagagaactgtaaagatgctctcttcatccgaagccattcgtgtgtgcccttgctgcttatggtttttcctttccttgtgcctttcacgtgaaacaacgaaggggtgagtgacatcacaaacacgtcgcgtgtgagaatgggaacgctcaacacgtctacgcgtcgcgtattgttagggttaggcttaccattgatcaactctggaaaccctttgaattaatcttcttcctttcactgatcacttgtctatccgcatatcaagcatgtttggagacgacgctctcaaacttatggtggacgctcgtcggtctaccggtatgtctttactttctctcgttctaggtctcgttatagaagccctattcttaagagcgcttctatattcctaaatagctaccgatacgcttcagaagtacaacacgacccttgtccgtcagatctgtctagagacccgattactccatgaagaaatccgtcgatctgcctctgtatctgcttctacttcatctcaatcgactcccttgtctcagaacagaggtctcatttgtgcactcaccgtccaacatctctcgaccagacggaacaaacgttgtctactcgcctaccacaaacatcgacttgaccgtctgtcctgtgcttactggcagtcgggcggtgcgttagctcacgtgttgaacgatagtgatacccggtcgaaactctcccctcaagaggtagacttcttgagagcgtacaacgatctcgtgttggactacaaatcagactttatcgatctactcgacctgagcgctggagtggagaggccgcctaaggggttgtacgtcactgtaaaggttgtgaaggattgtggaacggtctataccgaacgaggagcgatcgacttccaaaaaggtcacaggttcttggtccgaaagggagatgtcgaccgattgatctctcaaggctatctagaagaggtctagacagaagaactcttgcttggtttagtggattgttaaatggatttatccatcatgtggacatctcgcatcctttctccgaaccatgttgattgttgaaatcgaccaattaatattgtctcgtatacctcaaccggttttccttatactacaccccttggagtccattgcaaaggaaagacagttttctttctctagaaaataaaaactaattctcttggtacgaaactcaagaagcatataccccaaaatcacgctttagttaccatattatataaattcttgaccagatatcaatacatgtctcctttgtagctattagagtgaaggtttcatgcgttgttctttcattctgcatctttttattttagatttcgaacgaagcaaaaagtacaataaaagtcaaatcgacggatccaaaattctctcatcccttcccttctacgtctctacactcaagcagcagcagcagtcttcttcactcgagcccttccccaaacgacttttgcccgttttacaccagcctcaccctccaaatccagccctcctaaggcggacagcgcagaagcagctttctctgccacaggtcgtttatggaagtttaagaatgcgcaatctaaaaagagaagatgtgttttgttgatcatccaaagttagctatctttctctctcttctactcttctttcaaaacgattgataaacaagagagaaagtacaaacgggaagcagggacaagaactattgatttgagatcaccatgtgttatactaggaatttttgagaacagtgtcgtccgaagcacatcctccgtcagacccgtcggtagggaaagaagcaatagtgtagtctaccaaacagttgaagattcaagagttagtcaaggacatcttgactctaggatagaagcaaggaaagaaggaacgcacaattgattgatcttcgggagcggccaacccagtctgcacagcgttttcacgaaggatcttgtttgccactggatcatttcgcccgtaatatcggtcctgaatattctgtttcttcatgtctgaatcaggaggcggaagctcatgtctattgtgtagaggttcagatgaaacgagaaagaaggataagataaagatagttagaccatcgacgcacctaccaatataatgaacacaatgagaatttttgaaaaagaaccaatccataccgataggggcactcgttccctcgattacattcacccttgacgaagaaactgcagatgtgtgccctatttcgtttgtagtatgggtccgtccttgccattgaccgcagcatatccttcccagcagaagacgaccggagcgacagatcgaccgagccggacgcgctcccatctgctagttgtgattcaatgttttgagtgtagtattcttgaaaggtttagaaatgagagaaccaatctaggtgtcagaaaaggcgtctacatcataaaactaataaaacaaacaaaaaaccaaaaagaaacgcgtacgtttgttgatgtttgatgtaggtgcttcactctttagccccagagcgacgtctcggacttgtgtcggcaatccatactccctgtcgtaatagtttagaacgaggtcaaagttcagagatcagtatctgatgttttgatacgcatatccaaaggatcaggagactaacagatctagaatacaacactggcagacgtttctgactctgcagcaggtgttgcagatttcctgatcgagtgaacggaaccatcgacagtttgatagcaatagaagaacgaacgttgtgttagatcaagtattcaatctcttaccatccacataaaagacaaatgattagacatacagtcttcttgaaacgacttccttgtccggggttccacttgaagatggtgaacggcctagtgcaaatcttgcattccgctccgagcggctgcttagacattcgcacgtaagctgaaagacacggcaatgagtgttgttcaatatatgcgtccatttgaatcgaatgtacaagatcaaatatggggtcgcgtacgattagggccaaggcatacttcgcaaaggataggaaagtcggaggattcctagaaagaaaaatgaatcagaccgattaagttatttccttgttcatagcacgctcgatttgaagacacaacagaagctccaaaaagtgacaggatccatgacttacgactccggccttattgatatcttgtttgggaggcatggtggatgtcaggtgggagggtacaatgttcgacgtgatgggtaagaaagattcataattcaaaccaaatgagatacggtagtaagagtgggtatttcgggctgactaatcacgctgtcttatggtcttttggcgacttatgtaaggtgaggatctcgacgaaatcaaattctgaagaatactactgaaataaaagggtgaaaatggacttttcgttctggcacttgttcccaatcaagtcctcactggtttcccaaaccatatacacaccacccaggtatttcagtaaaatggattgagaaaccaggaaaacagaagggaaacccgctagaaaatttatagctcttcggaaagagagccttgggactccgcgcaaatagaggcaggcagatgatgtctcaagaagagattacaaataacagatgaaattatgtcaagactgctgaaactccaacaaattctcaccgttggacgtagtcgagccaataatgtcatggaatattcaactaatcaagaagcctgggtagtttagtggtaaaacgtaggtctcataatcctcagccgcgagttcgattctcgctctgggcatctatttttctcctctcgtcccagagttgcttctcccttcatttcatctgattatagtagctgctgtttcattggcaccagagagaacagttgtccttgtttttctgatatatagtaaagtacgtctgaagataaaggtcgaggtaaacgttctttcgatttcaatgtcaagtcattttatcccggaagagggaacgttggatcaagactcgatttgataaacttatcaagacattagaaagccatggtagaaggctaggtgtatatattgacgaagtgtcctgctaataggagataagtgtgagacaggaagaaaaaagaacaggctgtagaaggaggtatattgtcagaaaattctgatagtcataaaaaaagcatcaaggaaggaaggaaaatgaagctaacaacaaagaatcatcgagagggatcattcaaaaccaaagaaagggaggagaaaaactacaatagccaacatatcaaatacttcaccgataaatgacaatctgatgatacattccacacaaccatactaattatcccttaactcgtaaccaactatcgagcccgtagataacgatgcagacacatttggctgagctgaaggtatactaggcacaggcggaatcgacaagcagttgcctccgatcctcgacattcggttcttgagctttggtccggctgctgacggtctcttcagaggttgtggtcttgcttcttgggcttgtttctcaagcatcgccttgaactcaagctgctgtgctatgaactctcgaacggcggaaccaggtctgttcatgatgaacaatcattcgaagcgaagaagtacgttttcaatcagatgagcctgatataggagacgaggaagagaccaatgactttcgggaagagaagattgtcaaacgaagacctacctcatccgaagaattcgaaggataagatcagcatttccggttgactgcttctgagcttcagttttcttttctttcttcttcgatcgaattgttccaaggttcttttgatgataaacagacttcgcgcgtcgcatcgtaccagacgctcgaagacttgtctgtgaatcacggacacattgcttgatgatagaggtcaacagcttagcatcagcaagagaccaaagaaagaagccatgaggcgaccgatgcactcacttccatcaacgcatcgctgagaatttagaatcaaattagtatgtgttgaaagaacagccggaaagcagtgtgaggactcacgttgaccagtcgtaatgcattcgaatagacatcaaatcattatacttttggttatgcaaggtttcgagagagagccccttctcgtctccctgagcatggaagtaatcacgcagaaactgttcggaataaaatgaagaagcaaacggatgggatgagtgagacaagagcgattaacggcaatagcaaagacagaagcgaaacggacccctcgccatttcatcacaatgtcaacctcttggtcacctagaggtgtcatatctgtgggcgcggcactcagagacggaatgagtagactttcgagcgtcgataagagttctttccagagtttggtcatgaccgtctgaagagcagtcagactcagagaattactaagtgtagtctgattgatatcaaagtagtcgaacagagggttgatcgcagcctcgatttcaacatctgtaagtatcttgggacgaggtacaggagggagttcgtctttcggtagaggaatagcgggttcattggaggtaccgatggcggatttgagtcggccagtaagcttgttgatggcctcattatagtcgatcggagtggcggttgatttgattagcgtcttgatgacacctcgggtaagattctctcgaatcataggcgacatctgtcctcaaaattattgtcatcagttgcaaggaactcgggatataaataaccgcggatcaagaattgataggcgtactttgtctacgaatgttctaatcatatcactctctgctcttttgagtgttcggaacgctctaccaaagtaaaatccaatttcgtctttctctccttccatactgattcgaagtagaagtcgaccagttttctcctccaaatcgtaccatacctcatgagtgaggaagtcaccgtactttcgagggtccagacggacgtaagcacggccaatctcatcatgcttgccaatgagcgcacgatctcggacagttgccatgagccaaagatccttctcaacagaaatatcaaacgtttggttccctttttacagtacgcagttaaatgagttcagtacaagtatcaagctaacgagtaacaagcagcataagagacgagacttacatcttgggtctagagtttcgtacactgtacgcgtttttgccagacggaaaccatgctgatcactgagagtgacgaacgtgtccagtttgctattagaatcccgattgctaggagtaagcccttcagccagaacaatcttgacagtaaataagaacttgttggaaggttcctgggtgctgtgttgggaggatccttcttcttctatagtccgagtgacctggtcgacttgcatcttcttgtacatctcgtctaactcgtttcgagcagtctcgatgttgttcagtttgacgcaagactgtatgagagacacacatgcaagacgttttataagttgagtccaaaagcaaacaaagaccacataatatatggaaagatagtacgtacggctggaataaaattgaaaggctcaatctttttctcaccctgcagagtcatcttggctttcacaatccaggcgttttccttgggcactgaagggtcgatcgaaatccgaggaaacatctcttctaagaaaagctcttcgattgtattacaatactggtctacaactttgcttagggtctgcgcggttacagggaattcaatcgacatcagcttgtatgttcgtgatatcctgagcgaatactggaggaacacagaccttagataaacttgtcaggaaacgagcttcttggtattgatctggccagtcaagaccaaacaagaagtcaagtgcagaggaaaaggaaccaaaaagatcgacgatagacgagctatttccggctgttccttccggttcgaactgttttgatggacaaagaagatagtcaaaatcatgtttcataagttgatatcatcctggcacatgtacatatgaatacatgacatacattgtcaactcggatggcctgtagcgagtcatgagagaagacgtcaaaacagagacacgataatattttatgataagccgtgaatagctgggaaagatgcgaacctctgcaacccatttatgcgttaagccgtcgatcgtctgcaaccatttccgaacgaacggttcaaaatacgctccaaggtcgaacgagatccctgaactgcgtacaggacgaagtcatcacgtcattaacatctcttgagaaaacacgacacaactggcaagacagctagaacttactctgggcaatactcatcatgcatcgcagttatctgtgtagaccgacgataaagaccaaagacctggtctacatcgatgaccggttcttgttttgagcttccaagagcggcagtcagaagacgagggtgagcatcttccagatcttgaagaagcagaggaacctgttggccaagaactatcgggacgacatcgatggcactttacacaaagagaagtcagatcggttatccctttctcttatattttatagaacaacatataaaaacttactctagaatctttcccggaaaccgcttcttgaacaacttggcttgcttttctacccaatcgatgatcatcatcaaaggatccactgggttgtcttcttcttcagagaacagatcagaagtcttggctgagaacaagctgaaagccttctgtcgaatttgatcgacaatctgatcgagcttgaccaaatcagcattcgaatgcccaacgagaccagtgtctcgaagttcttctaacatgaggacgtaatcggaaatatcggcccatttgaccttggatatatcttcgaaattgaaatgaagtacgcgtaggaagtactcccacagaacgttcaagatttgaagtaaaaaaccactctgggagatagaggataagttaacatatgtcattcaaaatcgagtcgtgtggaaaagaacgatgaaaacacatttgatgggaaagacaggaaaacttacatcttgccacatccactgctctaatggtaacttcttcatctccgtgtccaccttagccaaagcctccggcaaacactccaaaggaatctcatccctctcatatcttaaccgcattacatccaaggtcgcagtagctcgataaggatgacctatcctccatcgcatcgcgcattcattgagcaggtctgtgtgagccgaggacaggatgctcaacgtcacctcctgatcctcaggaaggttggccatcatatcctgtacaaattgaattgtgataaaaacgattagaatcatatagacaagaaactcgaacacgaatgaaacttatggaagaaaatgacgcaccagatcaaaatctatacaaacttcaatcaatcgtttgtagaccaatcgggcactgccaggaataaacgtgaactctcctccggacgatatctcttcatcctctcctacgtgtttcatcacagcctccatgtcgaccgatctgatcgacgtgttcttcattgtggcaaactgactacatattgaatctggccggtcggtataaagcgaggccggccggtcagctttggtatctgtaggcgttgttgtcgaggaggatggtggtgccgtattctgcttggctagttctgggttgaactgaaccatgatcatcacgagctgagagaggtgagtcacttcggtttggcgccagttgttgaaggcttcggtcgaatcaaagtcctcacgtcggccaggaaaagggagacctgcattgagattcttcaagcatgtctgatggaggagaagcgagcacacgcgccacggaaaagagatagaataatcagcatacgatcgctgctcaagataattcccattgaaagaaaccaaccttcaggtcaaccatggcagcctggttcatatagaaacagtcagtcagaaagaaaaggttaataccagagattatacgggtagggagaaaacccgaaccttttcattgcatgcatccttgatcgccaatatatctgtcttcaaatccgccgaagtcttcccgaacaactctcctacaaccaagaccatcgacatatcctctggatttgttgtgttccctgcccctccagtcaattcagcttgcctatttgttccatcggtggtcttggtagacatatgcgagtgattggagataggcgtcgggcgaggtgttgatgttgctgccaatttacttgaatatgtatccaatttgttgagtaggtcaactgagactccgttgactccttttagagcatctctcagtatacgaacgatctggccgacctgaaggttgagctcgtacttccaatcgaaatctggctcgatgttcttatcctgaagtcgtttgacctctttgtggagctccttggttgcaaccgagacaaacataagaatgagctcttcgatctttctgttctccttgacacctttgaggtacgacggatcgtttgtattgctccaaaaggccgcgacggtttggcgtatacggtgatcttgaaagctgcgatgataagaagttgcacaagattcgattgtgttacaaggttaagagtgagcgatacacgctccatcctttctgtagaagaatacaactcactttaaatcctttcccataaagattgagcgtagcttgtcgtccagcgctttgaatgtcttctccgggaatttagatgatttagattcagacttggacgagctcccaccgcccatgaacatagacgtaaaatctggcattttggttgcactggccagagctccttgtatccgttctcggtgacctcgggtgggagctgagttgtcagtggcattggattcagatgattcttcaggtggaggcaagataaccggtttagggcgcattaaataggagaggtacctggggagtgaatgagaagtcttttgttcaacacgcctcttactactctttccctcttctatatcaaaggcgaagaaaacttacgctactcgaagtgcatatctgtttgataatggtatgagccaggaaaaaatatatcagacgtggttgttttagtataggaggatgaacagtcaaataagactcactgatacactgtagcatcgttgatagtcctgtagctagttccctttgttcttcctgtcccagccgatcgggtggagtgtaagctcatctacaaagacagcgacgatctcttcttgacaaaaacgctagctattaagacagacagccttcgatgagaagtctgaagtagaaagagtctaacagaagagttagttaggaggctggtggtaggttgtgaaagatgagtgtcttgtgtcgtcacctcatttggagaaggtgacaactgcgcgattccctcatggaagtagtagagtgatgagcaaagagcagaatctgatcatcatcatcatcatcatcatcacctatattattctttgttggcagtaatgccatcagaaaaatctcgtagcgaacaaagcgaggacatgtctcatcaggctacaaagaggaagaggtcatcgaaccgggatgatcaatgtgaggatatcgtcttgttacgaccatcattatcattctactctggctgatatgggatattctattgaactactacccagctgatacagagaagccagacaaagaagcagtatgggccaaaatagaatcgctgatgagtaaagggactgtaaggtctcgcctcatggcctccacggtatgtgttgcagtttcgacaaagcttaaattatacatggctaatcagccatcatctatcacgctccaaggtcaaaccacgacctttctttccggtttgtcctagggtcacttatcaggaatgcttggaagatcgacagtcaaagaagggggaaaaggagaagttatcactgagagagtgtagcaaggtctgtcttcactcatcatagctctgtatacagcgtgaatcatccagataagggttgacgtctcccagtggttcatgtgaggtgtagattcatcttcaacccctcatcagaggtcacacgcagccttccttaggtcattgtagtgtatgattatgcttttcgctaactttgttatatttcaaggctcgtgttattgatatgacaaggtcttatttcgtatatgaaattcatagtatctcaacacatgtacggcgctatttctctactcctattggcatttgttcacaagctaacatcaagctttctgtttcgtttcgttttcgttttgtgttttcgttctgaaatttggacactctgtaggctatggagaagtaggttctacatggttggaacaatctcattgtgcgcgaaactgaaaatccattctcttcacctcgttgcaagccctcttatgcggcttctccttctctaggcggcccaaataccaatcgatcacaaaaagactgtcggtgagccttgccacacatagcggttaggatatagcgccggcaactcattcttgcaagcctgcgggctacctactttctagctatcttcatttcgagattggcccgccacccgaatcgctctccccttcctcattcagaacgacatctgtctcatctatcaagagtagaggaccaaatcgagctgccactctgcatgggcctttaaagcctgctgtaccaaacttagccaagatagtgcgaggattggatgacgatgagagtgtgatcagatatccagcgagttggattagctgtgacgtgcgaaagtttgatttagaggtcttaggaaagtgagttcaatttctctcttacagcgcaagagcagtaggctaatgcacgatccgctcgttagattcgatgtcatcatggccgatccaccgtgggtgagtattccacatgaacgaaacttagattcgtccgttgtttttcttgatacatttcgtcatacattttctaaatcgaatatcgatggtctgtcaggacattcatatgtctctgccctatggaacgatgacggatgacgagatgcgttcgatgcctattcctcacctccaagacaacggtctttgctttctttgggtgactgccagagcgatggaacttggcagagatttactcacattttgggggtatcgaagggtagatgaaattgtctgggcaaagacaaaccagataggtagattgatcagaacgggacgaacaggacactggttgaagtaagtgatatcctgatctagtgattcgtctgtatctgaggaccctgtgctgattgaacggtgtactgttcctgttcccttgtctcaatcgaaacagtcatacatgcgaggtttgtcttcttcaaaattgaaaaaatcatttccgaatcagactaattaaatcattatatatgtatccactgtagcatctactagtaaatctcgtctttttgcgtttcattctctattctaaaaggagaacagaatgagctgctcacaacaaccgtatttcttgaaatgtgtgatcaccgtcatcatttgtagatcggtattaaatcaccagccgatccatcgacgccgaatataccgaacacgacatggccagactggcttcaacgaggacttgatactgacgtcctcgtttctgaagtgagctcactcgaactttggtgccgagaattatactccaataaacgcatactgaaaatgaatttctggactgggctgggtgactcaaactttgaaggtgagagagacgagtaggaagccggatgaggtatacgatctgattgagagatgctgtagaggaggaagaaaacttggtcagtctagattttaacgaacatccggaagaaagaaaatattttctggttcgctgatcataaagaaggggctgttcagagatcttcggaagaaaacacaacactcgaccagggttcgttaacttaatctctatctctagcttttcttcaaatagatttttaaggagacgtatactgacaatctgctctgtgtgttttatttgatcgatcagatggttaacgatagggtctgttcgtttttctcatttcgagagatgtcgatttgaactaactttgaaacgccactgggtttcgcttgtttcttgtaacttgtcaaagtaatcaaagtatgttatctttatatctacatcgaaacttaaaccaagctacgggaacacagcgctcaaagatcttcatatatccttttcattctttagtcgggggggattgtgtctacgagccagctttggctgaacggttgaagcaacgatacccagaacggaagaacctcgctgtatgagatgttactatttttttcgcttgctctttcttcatttattctgtcacgtacttttggttccggtttgaacttgatgtaatcggttcatgatgagattcgtcaaaaggatatgtcgttcgataagagtctgttggagattgagagaaagagaaagatacaagaagtacaagatatatggtcttgaaggttggagatagatacgacaggtggggcgactggtcggttaatctaccaagtaaactaaaagaaagatcaagtagctctcagtcagcgcctaactttaaaagtcacgatcaaagaagtaagaaaaagatacaatggagttagaacctacttccagcgccacttccagggcttgtctctaaaactgcattgtcgaaagcctcgtcatttaagcctttgtaacccttataagtttgtcggagataagttttgaaagtttcaatcgacagattggctggaaggagcgagacagtacatcctccccaaccagcacctgtgagtctactccctatggcacctcccgcgaggcagatttgctgaagagcattgagttctgagcttgagcctgacaaagtgaacaaatgaaacgaagagaaacactttaacgctataggaacaagatcagacagataatggaaggaccgtacagtcaaagtcatccctgcaactattctgactctcattcatgatctccgccagcttttcgagtaccttttcttccttttcttcactatcagcaggatcagcgaatgcgttacaggttttcttgaacaggagaacacgaagcgattcggtaaggatgtgtctagttcgtttgtagagcgcaaaatgggttgcttcaactaaatccatgaatggtcatagagattcattagttcatatttgatacagccaaggaagacgtgaggaaacgaaagagacacgtaccttcgatccagttttcaccataaacacgctcaaattgttcttcgtccagcccgcatttgtcttttgcatgttccttaatctctttccatgtccacccaatttctgccttcccgtcgagacctaaggcctcatcaagatgttttagtatggttctgatagcttcttcgagagataagtccgcaccccgctcggtgatgtattgttgaacgagctgacgaagcgtcggcctgaacggttcggattgagccgatgcaggggacgagatagagagagagagatgtttggcaaagaaaagaccagcgatagaggatctgaggtgaagtgtgtgcagttaagataacaacgagagagtcagaagacatagtgtgttacacgttcgatgtaagcttcagccagaagacgcttactccactacccgaagattgtagtggatcttcccagagttgaacagattgtgggtctcgagcgtgttctgttaacgatttacacccacacgaacaatgaagtttgtaagagagattgttgatatcccaagatatgccgggctagatatgcgaactgaccgaaattacgaaacgagcagattgaggcatggggacttgagtggcctccagagcagggaagaacgagatgtatagtgctgagtcgacagagcccatcactgaggcggcttgctgaaacatattcaatggtgtttggctatattagctgaagtacaggagaggaagaggactcaatctttgagaactcacgtccatcccaccagagttgacacccacaacccgttcgtttctcatcgccatatcgactagttgaccctggttgcatctttcgtgtgcgtcattgaggaacaggaaagaaatcgtagaagcgacaaccatagctgccgaggactagttcaataaaaacacaaaggtgagtacagtcgatctatggaagggccagatatgatgggcgacgggtgtagactgacagagagtcctgctccgtcgggaacagatccagtaacgagcaaatcggcatgagctgccgaatcctcgatatgctgctctaacactccctattagaaagaaagaaagcagagtgagttgctatgtgaatttttgttgctgttatcatacggtaagagtatacatacacaaaatccagcctttgacggagatgcagggacagctcagtcagctttgatttattttctcatacagagaatagacagaaaagagaatagccataccttgacatagttaacccagcctccagtcactttgtcaactccaagctcccacgcgccttcctcagtcttgtagggcgtgaatttttgcatcttgtatctctcatccatgttctctgccacgatcatctcgtcttcaccgtcctcgcagactttcgatcgcgaggtccgtgtagcaagcgcgatgagaatatcgaattcgactgcagcaggtaggacaccgaacccagctagtgaattgaatcagaaggggaatgtattcaaagttaaaatccagaattttagtttgatgcgaaaagaacacacgagccaggtaagatgtcgattgacgaaccatagtctatatgttcgcctaaagaagaagagggagagtgtgaagaaacagaaaagaatgattcagtatcaaccggatgtagaatgaacagacaagtgaatgaaccaacgacgcaccgatcaaactagagcgccgaggaaacggatgaaacgttgtgatcacagtgaaaatcgtgtcaggtgccaatcttgtcagcagtcgggtctacttgacttgtcgcatggagactcacttgacccttccaggtgctctacatattgcagtgggcttgtgtccgtagatctgttcaaatttttcaatgagactgttccatcgtttgctgatgaggcgtatgggattattttcccatcaagtccagcaaagaaaacggatccgacggagaagtatgttggacgtctttagtaatacggacgaaagaaccaggaaagtgagaccgacatacgcctgggacagatgtgagttggggtaaatctcttgaagagtatgataaattgggatgggtctctgggaggaggacatggtggtcgtatgcagctttgtgtaagtgtgatcgacgaagagagatccaaagatgtccggaacagagatttaccggacgcatccgatgggaccaacggtccgagttcccgcggagttaacatacatgattatatatttgattgacttgtaacgaccaactagatcgccacgtgccgggaccactgctgcgcggatgacactgatgacgtcgcacgcgccaaaaagacggaacccaggcccaccagagttttctccgtgccctttttcgggtgataaaaaatcaatgtgcctgattggagaaaacggggtttccctaatagaaatctttcggacactctaatctttcatagtcaaaggaactacaggaagctttgctccttttttttttagacctgcatcctttgactagcaactcgccttgaacgatccccgagtaaaagcatcctctatccttccccaaacatacacacatccttacatccacatctgaaggacatctcgttcgattcttcttctacatcaatgcctagtactgccagacttatcgtcgcttcactttgtaagactcttatctttgtttcatctcagtctctcaaagtttccttcgaataatccggccacggctgatgcactctttctgcttccttcttttctccccccaacgcatctgttttggtcttcatctctttctctctctctcagtccttccatcaggagttcaatttgcaaatccagctccggcttctccctcattatcgacaactacggataatatcgaacccatttctgaagaaggtcaagaagtcgctcctccagcatctcctcctgcaccatcttatccagaggccttgggtgaacgtcccaaggatattccggctgtctcgttagatggcacaaatgagccttatcatccgaaaattggccttggtgttcttcccggaccctcagtgtttctgaaggagcgcagtcttagcggactcggtccgggtggtatcggcggtgtatctgggtcgaaatcttctggaattccctcgactcctggtctgggcggaggtttcaaatcatctcaaggattgagtatcatcgatgacctggtaagcgagtttgttgtctcctatctatcgatcctcgtatacggcacgcaagcaaccccagctttcgagatcacggcttgaactttgattcatgagccggctctcttgcaagtcgtccttcgtgatgtcatgtacagatggccatctgttgtgcacgttcgttgatgattactttcttatgtactgttatattgacccgcctgcccacccacgttatgatatatttcctagaccaaagcctctaaggcaccttctccttctcccactccaggggtcgccggaccggtcgagaatccgttctttcctacttcgactaccaacacttctactgcaaccccagaaggcaacaagtctcccatccgtccagctgctggcgactctgctggggtctctcttatcaacgcggccacccgagctctcaacaatggctcgtccaagcttgctagcgctgtgcaagacgctactcgaggtgtccgcagtgagatgtctttgccgggcaccccccgggcaacaccatccggctcggcctccgcgtcttctcaaaagcaaaagtcgagatctcccgtcatcagccagccctcacaggccttccacccgcctcctctcaattcgcctctaaccagagcgacgtctagatcgtcctccaggcgcagatcgtcttcctcccattcggtctttcctccccaccaccacgccttgcagctcattcgtaatcctcagggtaacatcgggcttcagaacgcgcttcatgcgatcgaaggagaaaccaagggcatggtctgggttggagcgctagcggacaagacggatgaactctcagagtcgaccagggtcgacgtcgaagccgctctgtgggaaggagacgatggaggagtcaaccgatccaagccggtttggatcaacgatagcgtattcgagggtttctgtgcgtgtcatcattcactctcttctctgtgttcccttcaaatgtttctcacaatcgatttcacttggtgaaatgtacagatgatgtcttctgcaagcaaattttgtggcctacgttccattattctaccgttcgcaaggacgaaacgaccaactgggaagattacgtccgagtcaatcagtcgtttgccgatagaattgtagagactgtaagccatcagtcagaaactcaagcgtatatgtgtatcgcagcgtacaatggtcataatgctgatctctacctctgaggatctttctgtaatagtacaaagacggagataccagtaagtcttctttcaaagccccttctggttgtgccacttccaaatttggtcagactgacatcccctatcgctctccttttgctccagtttttgtgaacgattaccatctcctacttgtgcctgctatggtccgagccaaacttcccaaaagtatcattggactattcgttcatatcgcgttcccgagttctgaaatcttccggtgcctggcttgtatgttcagcccgacaccttatgttctgctctgtggttgcgcgtttcctgactgatcaggcctgatcttctttttgtttttctcgatgcagtacgagaagagctgttatacggaatgcttggagcaaacctcattggattccaaacctacaacgtaagcataaacctctttcaagatcatcaaagaaaatctcttcaagttttctgtcagctaaataattctgccgcatatacacatcctctttccataatcagttctctcgacatttccgacaggtctgctctcgagttcttcaagatgtagaagccactcccaagggaattcaactcccttcctcgtttgtagatgtagaagtcttcggtatcggtatcgacgttgatactctcgaggctaagcgagaagaacaggaggttacagaatgggcaaacttgctaagagaacgttatggagataccaagcttatcgttgccagagataagttggatgaggtcaaaggattgaaacacaagttgttgagtttcgagaggttccttcagctctatccagagtggatcggcaaggtatgtgaagttcaatgaacataaaaaatttcatttgacaatatttaacccgcctcctgttgtctcttccggtcttggcaatttccaacaggtcgtcttgattcaggtcgctcttgctacgacagagacgaacgaagcccaagaaaacattcacgatcttgtcaccaggatcaattcaaagttttccaactcgatcacctaccagccgattgtcttcctccataccgagcctcccacattcagccagtaccttggtctgctgaccacggctgatgtgttcatcaacactagtttgagggaaggaatgaacttgactgctcacgagttcgtcaggtgccgtgagtatattctatattatttgttctctttgtctccaaagatcatgacagtatgctcaatcgctggctccatatccatataaacatcagaggagggatcgtacggacccatgatcttgagtgaatttaccggaagttacagctactcttccttccgatcttgtctccccgtcaaccctgtgggtttctcttcagccacatctttgagcacatagttctgcgctcatgattgatcttcgtttccgtaatgcccgacaacgatacagtatgattacagtcaggtggccagagctattaaccaggctttgacgatgggcgaagaagagaaaaagactcgatggacggtacggccttctctgtattataatgatcatagagactttcattactgactatgctatacttggacctttctcgatcaaaataggagctcaacgctcatgtcgtagaccatactgctcaggcttgggctcgaagtaagattcgaaccattcttttattaattcaaattaattggccaaacaagcgagacgtactgctgatttcgtctttctccgtattgctactttattctgatccacagagtacttgagccaccttgaacgagctcatgctggtcagcaaagtcgattgccaaacgagatccccaagttcgaagtcagcgccatccaagaggattacagacatgctggaacccggcttctgctagttgatttggaaggtgtcggtatgtgtcttattcaatcttttggttggcataacgaacaagttgttatagcttgatcttcactacttacctgacgtgtcattgtccatagtctggaacgaagatcctcgaaagactcacgcagagggtttcaaccctcctgcggaattgctcgatcagctcaagatgatgacggacgaccccaatactgtcgtctatttgctttccggtcgaggagtaacagacctgaaaaagatccaagcggctgttcctaaattgggtctcttgtaagtcctgtttcttcctcagattatatatgtatataaatgaatcgtaccaggtcagctgaccatctgcgttccgttgtgttctgggcacaaacagggctgaacatgggtgttacatcaagctggctggggatgatgctaatcaggattgggtgtgcacggtggaaaatcttgacttgagttggcgggcgccttgtatcgagatcctcaactacgtgagtacgctcactctcctctacgtctttggagtttttactgatcaaaatccatcatctggggcttggatcatgatagttctcggaaagaactcccggagcgtatatcgaggaccggggaacctccctcgtctggaggttctgcaacgaaaagtctggagaggctgaatccgcttgggctaagcgggcggcggcggaagccgcgaaccacgtgtcggacgttttggcgtacgtggtctggcgcactgatgttgcttttggttctctcactaacgtttttgagtgttcatctgtttttctgacatatgcagcgagcggtacaagcttcagatctatcctggaaaacaagcgttcctcgttgttccacgacaagtcacccgttctcacgcggtcgctctcctgctctcgaagtcttccaatctgaaggttctgccttctcattttaactcgagcttggtccctcagtacgatttcgtagccgcccttactacagatgaaaggtttgtcttgatataattcctctttctgctcatatgaatttgtcggtcgattcaaccgtcgaacgtgtgtgtggttgactcaatccctttgtcatgtgttcttgtctcagattgatcgctgcgctcaactcactcaaacaatctcgatcgagaaacaacccgagagggtcagtcgtagttcacactgtctctgccggtactcgacaatcacaagccaaatgggcctgtaatactgtggacgctgcccaggtcttggttgatctcgtgaaagacgtctagttatttctcatcagtctacttttgctcctcttcttctctctgtcacctctttgtggccgtcggtttcctctctgctcctcattgctcccgctttctcaaaatttctctcagtttgaatttatggacacctttcatacgacttttctttattaccatcgagatttgggtctcacactgttatatctatttgtagttcaccagggtactacgatcttgctttcgacaatcattttgtcatcttcttatcagtgtatccatgcgttctatttcttgcatatcgcttgcagtccagatgttgggtgaaaaaagacaagaaatttccgcgacgattttttggcgttgatgaatttccgtgaatttcccttcgcctgctgcctttaccatcacccatcacccctttccacccgacgaaggtcaaccctccgaccctttcccctctctccttttcactctcagtcttccgtttggttggaaaatcatgtcgaacgaagaagatcaagtccagattcaatcacaggtgccggctattcaaagcttgttgaaacaatcggcggcgagatcgcgtgctttgtttctcaaccagttgaacggtccgatccctcaggatgatgtttcgttcgtctttcccaatcttgctccatctatttcttctcgtttcatattccttccttgttcttcttcatctagtctgagctgggttcttctcagagggacttcaacttgaagggaaggatccgagatgcaggacaggaagctcagaactcactcctaatcttgtcctatcttctctacttttttctcttgcctctctgaaaatgcatggacggaaacgaacgcaaatcacaggacccaagttggaatccgatccagagtccacgcagaatacaaagattctcaatcgttacctccttcgctggccgctatgcaggcaggaggagtcggtggtccgaagagacctaaggctgctagtggaacggctggacagttaatgattggaaatgggtttgttctctcttccctctctcccttttgtttctgggtactattgaagtttgtggctgtacggtttggaaaagtgaataatggatggacagaccgggttgtccagttgtgggacaagcgtgtgtagagtcagtgtatgatagggagcacatcggtaaaggtgtagacagtagtagagcggaaattggaagtgggataggtgtagaagaacggagacgagacccgtagaagagctgagcgaggttccagtcgagaactcaagctctgacacgtgttctctgttttttgaaccatctacagagatacccccacgaacggtagttcgtcaaaaccagaccccaacgcgccctcccagtctctcgtttcttacagacactcgataggactcgccggtcagggtggtcaacactcctcccttctctctcaacagttgatgaagaggaaggaggctcgagaggtccaacctgaataccacgctcaatgtccgttctttctcaacgttttcttttgcgcctctcacccatcatacttggtattgatctgacgtgtctttgacgtgatttttggacgcacttcgtgtaaatatagggaaactgaccagagtcatctccggtcatcttggttggatccgttcggtagcggtcgagcctggaaaccaatggtttgctactggagctggtgatagggtcatcaagatttgggatcttgcctcgggagagttgaagcttagtttgacaggtcatatcagcacggtcagaggtctggccgtcagtccaagacatccgtatctgttttcgtgtggagaagataaggtgtgtctcttgttcattcgggtgacttgccatgttcaaattggcaagttttcagaaggctgatcgatttctggaatgcgagcggagcgtagatggtaaaatgttgggatttggaagtcaacaaggttattcgaaaatatcacggtcatctttctggaatttacagtctggcgtatgtcggctctcatatcttattgtcatttgtttggaatttaactcgctgacgcgtaaaccccctcttgccaaataaatggacaaacagccttcaccctacattagatgtacttgtgacagctggtcgagatgcaaccgctcgagtttgggacatgaggactaaagctcaagtacacgcattgacaggtcatacgggtacgatcgcggatgtcaaatgccaggaaagtgatccccaggtgatcactggtagtatggatagcaccatcaggttcgtagtctgtcgtttttcttatcttcggcgctcagagttctaactcatagcgatgattgaaatctgacttccccttcgatttgttcgaattgaatcgatagactttgggatttggcagctggaaagacgatgacgacgttgactcatcacaaaaaaagtgttcgagcactcgcggtgtcacctgtggagtactccttcgcgtccggtagcgcaggtggaaacaacatcaaaaagtggaaatgtcccgaaggaacgttcgttcacaacttctcaggacacgatgcgatcatcaacaccatgtccgtcaacgacgaaggcgttctcttttccggagcagacgacggaacaatcactctgtgggactacgctaccggtaaaccatttcagcacatcaaagatatccctcaccctggttcactcgatgccgagagtggaatctttacgtctacgttcgacaagactggaacgaggctcatcactggtggtgccgacaaaacgatcaaaatttactctgagcaaacctagacgtggatcatcatctctgccatgggctaaccttacaaaatgccccggttggctgtacagagtcagagagcggagagtgaacaacgacgagctttcccttgagacttctcccatctcccttggtgttttcctcttcttgctactttacctcagagctgtatcatattattcgttttttcctccttgccttgctcagtgatcctacctagaaaggagtactcatctgagacatacacaaatagccattcgcatccttaacctgatcattataagaaacatatccgtaccgatatatgttcatcttaagctgcaaacccaacaggaaacaaaccccttagaacacgcctcaaatccgtcatctgatgctacagatatatatgagcagcttgcattgaaaaacagactcgaaacagtctaaggataagtcttgtcagacccgatttgatgacgttgtttccgtgtcgattgttcgttctttccacatcgtctgtttttttatataccaatcttcttgaaatttcagtcttttcaacaagagaagagctgataatgcagtctaagattgatttcataaacaaaagtcatacacgtttgactcttctctccttgacgtccttttactccattcttcttctttgatttttttaagaaacaaactttacttgtaggagacggaaaggtcaactaatcctggtcccaatcaccctgctgcttaggagctgcgataccagcctgcttggcgacaatgatcgaatctacacgaaggacagacacagctgcatctgtggctagcttgatggcgtatgctttaggagcgagaggatcgagaattgaggacgaaagagcatctgtcgttccgtttgattcacccttgatttggtcatttagacaacggacgaaagatgatagaaaaaaatgagtatcttcttccatagttggctcaaccaaagtttgttttcttctttccccagagcaaagagaagacgacgtacctcgatgtctactcccagactctgctgaccttctccgtgtcctttgtacagcgcgctgatgacttcagtagcgtccaacccagcgttctccgccagcgttctcggtactacctcgagcgcctcggcgaactttcgaattccatgctgagccagtccaggagtcttgtctccaaagtcacccactcgcttggcaagttcaatctcgattgctcctgctccagcgacgagtcttccatccttgaggagtgatctgacggtgttgacaccgtcatcaaccgaacgctcgagatcatcgagctgattggcagtagctcctctcaggacgatggtagccgtcttggttcgctcatcctcctcctgtcgaagcacggtcactcggtcacctccaatttcaaccgtctcaaagatatcaacctgaccagcctcttcaggcgtaggcgcgccaactcgagcaagaggagtcgctccgcatactcggcataatcgtcgaagatcgaatttggagagaaccttgaggacggcgataccctgtcgattgaggtaatgcaaggcaagatcaccaattccggaaccggcgatgatgagaccaacaccagaatcggcgatctcttggaaaatctaacaggcgaggatgaaacgacatccgaagtgggtttagagcgcaagttcaacaatgcaaacaaatgataagaccaactcacgttctccatttgtttctcctcgcccttggtgaaatccaacatctcctgagcgttgttgagcaaaactgttcccttggtctcagtctgcgagatatccaatccacaagtatacacagccaccttaagcttctttcccttcttgacaacacctgttcaagagacgatatatattggagaattcttgtcaactcttagtacagcaaaattgttgaatgacagcagaacgaaccatcggcctcccttccaaagaccattcctcgaatgactctgctctgacttaagcttcctcccaaaatcttgacgactcgaatggaatccacattgtaatccttcgggttccggggcataactgtgagcgaggcctcagcaacaagatcagacaagaaaacctcagatccaggttgcttgctacctatgctgggagcgatggccttagaaagcgccttgagggaaggaggaagcggaagatccatgacggagagggctgaaattgaagataagaattgagcatttatgacaaagcgaacctagtgagaaaagaaacctactttcgatctcttgccgagccttttcagaagcaagctcataaccgagaatgacctattcaatgacaagtagaagacaaggatgataagagagatgaaaaagaaaatcatggatgtatgcagaaaagaaacagccagtttacctcagtaggatgaaggcccatgaccaacaagttgaccgctcgtttgagaagctctccagccaagatcaacacaaagtttgttccatctccactctgaacagcatataatgaggtgttacaagatgtacatacaacgagaagatcagttgcacgtcttctacctcgaatatcctcgagtcaaagaaacgaacctcagcctcttgagcctgggaagctcctactaataactttgcagcgggatgaacgacctcgatctctctgatgatggtggcagcatcagaggtaacaaaaagtctggacagatggttgattataagcttgtttcgtcctgtgaaagggttatcaacagtgagctcagatcgttgcttgattgtcagtatcactaagaaatagaaaaaaacagatgaagctaaccgttgggtccaaaagacgttcgaacaatctcactaagctctccaacggcttcgatgtttcgaagaacagcttcttccagtccggagaggtgctgtagaggttgggaaaggagataacacagtagaagtagcaggaccagaaacgatgacataaaaacaaaagcacgaaaaaaagatgaagaaaggagaaagagcaatcagcactgaaatcaccaggtagcatcatttcgaatgtggctcaatagcacagagaacgcctgcaagacagaccttgtatccgtccttaaagagaccagtttggggtttgggaactttgagagacatctttgaggtcgtatagtctcgagtgcttgtttgatggtagaccttgagttcgctcaaagtgagtgctggatctttgagtgttaggtaagttggcttgtgtaaggattgagattacgtaaacattcatctatctggctcgtgtaacccggccgagatccgaactgaccgctgagcgatagcaagcgcacacaaactagagacaagactcgagaaagtgttctcggcagctctctctacgattgatcgtaggagtgcgtgtggttctccataaactcgaggctcagagacaacgacatatccagtcttgcttcaagtggaagctttgaaacatacaagtagtaggctttggtcgctggtaaccacttgtgtaaccagtgactaaccatcgcttctcggctatgtccgtttgttgatcttggctgaagaagatgttggaaaagcaaagtgaaaaagactctcaggcgaactccatctacgaccaagaattgttactcttgcttgctcgctcatatgtctgctttccctcaaaaatttacttctaccgtgtcccattggcaagcttccgttagtattgctattgtcccctttttccgagtcgatgagggagggagacaagctgacgatacgcaacctcgtacactttcatgatcgataatgacgattcctttgataacagaatagaggacctaacagtctatacctccatgggtctaaagatcctttgccaaaggaagaggtcgacttcttgatcataggagcaggcatcaccggttcgtcaaagtacctaaaccatgcttaatcgagaccagctgctcttttcagtctagacgacttgaattcaattgtttgacctgattacgtcgtgaactgagaaacaggtgcttcgttggcttatcaactcactcgcaggggtggagccggtgaaggaaagtcggtcgttctcgtcgaggccaaggatatcgcttctggtgctagtgagttcctcgccaagtaaatcatccattcaagaaagactgctcaattttttttgatgtcgattcatgacctcccggtctctgattgcctctttgaaatcatcgctacttctactcagccggtcgtaacggcggtcacttttctcctgcagtcgacaatgcattcatcacattgattacgcctctgtcagaaggaggtgctggagtttcagaaaaggaagctgtccaaattctccttaatgagaaggagaattataatattgccacggagatcatcaaaaaagaaagacttgatgttgatctttggcagggtgaaggagttgaaggtaagtctcgaatctgggaactcatactattaagaatcagatgttacgtctaaaagctaaattctgtaattctgttcttcatacctaaaacagtgctgaacgaagaaaggctggctgtaagagagcactcgtataaggcttggatgaaagctcggaaggaattagggatcgagggtgatggaggagtcgtctttataagagattcagccaaggctaaagaggtgcgtttctatttcagccttccttcatagctaactcatacttctcccctggtttcttgtttgattaaccaatcgcctacttgttctttgaacaaaaaaagatcactcgttgccacactgctgtcgccgctgtcctgaaaccggcaggctctgttcacccacacaaactatctactgagcttgtccgactcgctcttgaatcccctcactccaagttttcattcttctcttggacacctgtcaggaagtttgaggctcgatcgggccaagatgaggaaggttgggatgttgattgttgggaaaaaggagtgatccgggcgaagcaggtagttttgtgctcaaacgcccacactggccagttgtttgaccacggttcggatattgataatcagtaagttgaattgtcctagattcagaaagatgatgaccgacgaatgagctgacaagaagacgatggtttcatgaaagtatcactcctgttcgtggccactgctctctgatcacccctacgatcaactactcaggtcccaactcgcttgattatacatacggcttcggaggtccttacatggttactactcccactgaaggcatggttcttggcgtcggttggctcaaggctcagacactcacgaagggtggaaagaatgactttgtggccaaggtagacgatagtgttatcctgccagaagtagaaacctgtcagttttaacgttccctttccctttcaaacttacaacaatcataagagtggatcactctgacaagtacagctattcttatgttttggtagtcttgtctaattattgcaaagacgagtttaccaattggggtaaagaagctcatggagaaggattaactcgaatatggacaggtatcatgggatactctagagatgttctccctcttgttggtcagattcctggaaagaaaggactgtggacggccgttgctttccacggacacggtgcgcgctctgtccatctttttcttcttctcaatctccatcttgatactgatgtggattctcttcgcttggtcgaataaatattcgattctcaaaggcatgtctcggattataagttgtacccaatcactggctcaacagatcaaagatcaaggaacctgggatcccagattacctcgaagtttcgaaatcactcaagagaggttggatcgagcgaaagccgctccaaagatgtccgatctgaattggagggaagccgctgtacagagtgatggtgcggaggaaggtgcgacgcctgtcaagtcagaattgagcgcatgatgggtttgatgatatcctctttctcttggagttctctgtcatagatcagaccgttcaagttggaaggcttccactatagatgtcgtatatcgatttagattatcagattcgttttgttcgtcgtgctttattgtcatgagtacccttgcattttccgtcaaacgcgatcctaaaagatgattcacgatgtgtgatagttagcgaagttacatcatgatatctcgtcgtcgctcgaatcaagaatttcgataacctgattaggcaaacacgaagcagtcacacaatttgatagaccaacttctgactctccccacttcgagagttctgtctgattcgtcaactcaacccgtctatcaggcgacctgctagatctggcagactgaaaacctgcgccgtaatgatttttgacggcattctttcttattttcgtcctgtagctcaatccactttcaccgtcagattcatccgagtcacttatttcgatgacttcaggcgtggacatcgtgctcgagcataacaagggtttatctccagcaaatgattctgtattcaaaggctcaagcagtactgacgatgatgatgatgatacggatggtgaagcttgtgatggagataaggttgttgatggaagcgacgatagcagatccgaagcgagggtgtcaaacgatgtcgttgttgattttggtctagacaatttcattggaaaagccaaaggccccgatggaagtttcggtacaggtgtagcatttgatactgttttactattcgttttcggaagagatgatggaggagactcgatcggaatatagatggaggataatggtttcctaactttcgagttcgctcgaggtgtgtactgagagggttcgtctcgtgatacattcactgtctttgaaggagacaaagcaatcggcaaaggaatatatgaagggagatgctgtgttcttctaggcaacatatgcgacgtggacgaagatgaggagaaatggggtagagatggagatggtcgagaggggaaggataagttatgagaatgaccgtcaagcctagatattgacaaagaagaagccttagtcttggttggttcaggtagtttgttgttgaacttggagtttgtaatcgcagacgatctgatcggcgaagaaggctcttcgttctgatgaccattgttcgtcgatatgttttgagaaacgggacatgacccaatcaggtctgtggtgggcaatatcatccctgcctttctgccagcagctcgtttctctttttcgtgtttctccatgactttttgttcttcgcgctcgttgaagctttggacgaggcttgggtgggtatggcggatcagtttgtaaggcagccatacaaggaatggcgcgttgtggtctttagacgacgatgctgcttgagaagagggcacgttgtcttcgtcattttcatcggacgagttggcgaacgtggtcttctttttaggagatcttggcggtggttcaggaaggccccgtatcccaatcgttagttcctgaatacagaaaaaatcaaaatcatcgcgttcaatgaccaagcctttatcgcgcagatgaggaacatttcgtggaagtacgcacataggagaaccgagctggttccatcaagcacctgtactccagcaactcgtcggtggatccatgtttcctgtatgtcgtgatttttattattgtgggataatcgagtgcggcctccagacctctctggcatgaacttcgtggtccatatagctcggtcgtaggtgagactgaagcaaagattgcatttccttctgtttcattcaattctgcctccacctctatccaacgtcggacccatgtacctggccgtctcagctccatgagtaagacttctgccatccacttgtctgctagcacactcccgagtcgtttaattacatcctctttcccccagccaaacgccttacctgcgaaagctcctaactcaccaagtttcaatcccgtcgcctttccaaaagatttccacttgacttgaacactatctgaggcagaggtcaacgggttgacgtacgactccaagatgcgcagatcgggaaactgtggcgtgttctcaatttcttgagcaagcttcgtcattttacggcctagcaacccttgagggtctcttcggagatagtcacttagatccatccggaaggctgggaggaatgtcgagaggaaggtctcagttgacatgcttcgataggcatccacgagggcggagccgtaattctcacaagccagctgaaaggagatcttgggaccgcaaccagagagcccttccttattgacgagataagatgatacgcaacatagataaaacgaccatcagaactagaaaatacgtcccagtcgacaatttgagataaagcgagaaatgttgacgtacttggtcatagtctcctccactacaaaaatcaatgcaacggttcagcacacgtacaatacgttttcagctggcatagagcttacctcaacagcgctacaagtatcaatccatcagcatccacatttctatgctttctagcaatttccttcgatcgaaagacattatatctcctgttgtcggatttagagcttttttcgctgaaaatcgtcatacgtagattatgaggatgcggtcaacaaacatcgagaaaacaaaagaagaaacatacggtttgaccaagactgtttttgctttaaacaatagtgcgtccacatcttcggtgattatagcatccaaagcacctatgtcgttgagatatcctagctcggcctctgcctcccctggggcctatgcaaaaaagccgaaggcacatcaggaaagaatcggatcagtgtcaccttgaccgttaatattgatactgatttgagatggaagaaaccccacctcccatatctcaaatccaaataggtgaatcatcgtcttaaacgacttctctaagcctttgcctaatttggaggatgtgttgatcgttttgccccgcttgaatgctggccggccgggtccgtcgaacacaaatagaagctggactggtagtccaaccagatgacacagcttgaagaaaagtattaacactatgaggagttgatatattctgatcagacgtgagctgacatcaaagtatagaaagcaaaaactgagctgtccctacgggcatggttttgaacatcatgttgagctacgctagtggcttgaaagagccagatactgatagcaaatagaacgagatcattatataaggaatcagtatcatcagagtatcctgattgatttgatagttctggagagtggtggcactctcacctgacatcaatccccactttcattgttttcttgaaatccttagcggtaaagtaatggctccaagcgagacttgttaagcttttagactcttctgttcctctaagaatctcccaaagtcctgggacacccatggtcagaccaatccccacggacaaaccgagcgcaatggcacggactgcttttgagagataagttgaataatatctggatgcgctgatattccgtgaacgatgtttacacgattgtcatttcgtcagaggtgactaaccggcccgcaagatggacttctattccattcctatcttattaaagtcatctcaatatcaaccatcatgttccctgcttcatcgtcctcatcatctacaaggctagatcctcagacctacctacctcttttgaatacgtcgaatttgtatactcttgatgacgaggatgatggtgatatgcaaacaccaacagcaaccacaacacgcggagcaacgaatgggtcgacagctccgccttatacggatgaagcctacggcagtcgatacgacgacaaattggacagcaagaggtttcatgacacagaaggattttcacggactgggactttgagaagtacagtccagagtagagagactggtgagtttccttccctttccctcagtctttgcccagtattacctcatcggttagacagaaccccagctttgtcgatgctttgtctgaactaattgatatcttgttgccttttctacatagaattcgatttggatgatgattctgtctcttcagctggctctgattcaactattcttccatctcgcagcccactgttggtagggctactaggcaacagcagtcggtacagtcaagacttcgctttgcacagcaatgggagtataggaggaagaggaagtgctgatagggcatcggaagagggcggacaagtcggcgaggattggaaagaaagaggaggaaatatgctgagcggaatagccaacatgtgagtgatgatattggtcctatcggacaaactcttactttgcgaaagaggcatttatgctgattgattgacttgtcaatcttccagggccaattcaatattgggagctggtaaactgatcttgattttgatagcattctcgttgagaaagggttcttcttctgacgatttttcatgtcattttgtctgaactttggactgaaaaggaatcatcggtaatttcattagccctgacttgacaacacaagaaccaaacttgcttatcctgatcttttctcatccttttggtttcaggtcttccctatgcaatcagagaagccggcttcttaacaggtattttccttctcgtcacactatgtctcgtgacagattggacgatcagactgatagtgtacgtatattctgatgtgtcgctattcaagttatggataatagcatgctgatggcacctcgctcttctcttgaattgtttggccaatcccgaacatgccatcagtttgaatgcaaaactctctggtcgtaactcatatatcgagatcatgggccattgttttggaaaatatggtcgggcaggggtttctttctttcaacttgcctttgcatatggaggcatgtgcgcattcggcgtaatcattggtatgttgtttttgtcttgcgtccatttagatacaaattgttagtactgtgaattctttgctgataattctatttattctgcgtgattatcggtatgcaggcgatacaatcccaagggtgttggcgttcatcttcccttttttaaaaacaattcccgttctgtcacttctactcaatcgacaattcgtgatatttttagcaactgttggagtcagctttcctctgagtttacacagagatatctcaaaactatctaaggcctccgggattggtctgttcttcgtcctgctatcaacggtttcaccggtttcatcatggctgatgatcttcctttccttttaaaaattatcatctgaaatagcactggttgggatgttgatcatcgtatgctcagttttgatagagggatcaagagtagacgataagttaagaggatcagatgatgccagatgggtgagctcggtaacatcattatgtctcgatgttgccccttgcttaagaaataagacctttcgacgcttcgctactctacagactatcatcaaacccagagttttcgaggctataggagtcatcagttttgctttcgtcagtatacaagttgatctgacgacttgctgttgaggaaatatgcgcttatctgataccttgttcatacaggtatgtcatcataactctttgatgatcttcggcagccttcaagcgcctgtaagtagcttctgtctagtttgaatcattataatcatagtccgactacactatttgctgattcttcactgttgttgatcataatcagacattgggtgaggatagatcagtctctattattcatttcatatttattggtaaaattggctaacaagatttgtatcatttggacaaccttcggtgccaactgatctcttagatcgatttgctacagttacacatatctcgaccgcggcctctttaattgcgtgcctcgtcatgagcttatctggattcttagtgttcaccgataagactcaagtgagttgcgcacttttgtgttgactattttcctctctcttctatttgcttgctcatgcgcgaattaacatatggttttcttcttcgtttcacccgttcgatacacttttacggacaaactaggccaacattctaaacaactttccacacgacgacctattgattaatatcgctcggctttgctttggactaaatatgttcacgaccctcccattggaagcattcgtttgccgagaggtaagtccccttgttcattttccatcggtttgacacttccagtattagactgatctaaacggcttttttatatctttgtgattacaactttttgaatcggaactctgtgataggttatagaaggatactttttcgacgatgagtttaataaaaaacgacacatcattgtcaccaccgctatcgttttttcatccatggctatatccatgatgacctgtggtgagtgtccccttcatcactctttcttggtcaacatatctctcttgtttgtttggtggtcctgatctgtggttaattttctcatgtgaaatatgatgaagacctcggagtggttttagaattgacaggaggactctcagctaccgtgttggctttcgttgttcgtacatatctcctcgaaaatcattccgaaaaggctcggctcctctctgatcgctctttttttcctttcctaatctatcgcccttgttcaaaatcagtttccagcgatctgttttctcaaattgtcagatgcaccctcaatgtcacgtacaaaattccccgcctgggtatgtgccgcatttggcctactcgtcatggtcctctctgctggtctttccttatacagagcgttttggggtgaaccaaggacgggaggaacatgtgggttcgagtagagtgaagataaagacaagtgcaaagaaaggggaaaaaagacacttaaagaaagaggcgatggcgtgcaataatttccgcgcctccttcaagctgtagccatgtgaatttctcttattcatcatatcacaccagcagatctatctaccttagaaaagaaaagatatgtatgttttattccaaagcagccgatctgtgagggagagatgtgcatagaggatgcaaagagcagggatcagcttcgtgggatcgagaatttggcaagatgaaggatagagtcgaagacgaacctgtagaccaagatatatgcgctagagtcctctccaccaccatccaatgttgagaccttctccctcgtcacgctgctgactttgtcgtcatcgaatctaagatgatgttggatatgaacagcgcgttagttgtgaattcatatggtaaagcactcttttcgtgagatcaggagatggagataacgcacttgaaccattcttcatccgtgctgatctgagcagcagtgttgaccaaactgcttcccacggaagcaggttcagcttgctttttgactagattcgattcaaataaatgtatatatatatgtttcagttatggcgcctcattagagaccgatagatatcaagaattttgcagaaacaacagacgtaccaaacgccatgtaatgacccgaatccgccgaggcacccttgtgagtaacgattgcgcagagctcatacatacccgactggtttgctcctacgtcctccttgagtccaccatcgatcaaactcgaaagcaacgctttctcctccgcccgtttggcgtcttcttcctcagctgtgcctagatagacttgctcctcgccttctttcttcgagccggtgggctcgttaggagtcatagccacatccgaagtggttgaggttgaagttgatgcggtagcagcttcggcagcggcagaagctgactgagctttcacacgcttgcggatccgggcgcgctcttctcgattcttaatgaccgtcttgagagcagtgttaacgggaaggattttggcttttaattcatccgtgcacatgtccagcgcgtcgaactcgaatgggaatttaacctttcgcctataaaaaaattcaatcacacaaggacgtgttgagtttagacagatagcacactgatgaggaagaaggattaaactactgacatgatcttagccttggagttggtatctcttctccaatagaatcggacaagatggacggtcaagacgcccggtaatcggctcagccgactcttttgagtgtacaccgcggatctacctaagctaggcgaagccttctcgatcttctgatccagagactgatggaaagtgaaaataacaggatttgaaaagaatgggaaattagataaagtttatattcgatgtttgaattgtattcaagatctctttcgtcggtagagtgtaacgtacatccaagattccagtgtgcatataatttgtggtaatagagatgttgcagtccaattttgagatcctctctgtcaaagttgttgaaggctcctcgggtgcctcatcacaagtcaatctaaagcggtgggcccgatggaaaaattctagtcagaccaagagaccggcaacgcacatgatctagaattgactcacacttgctgcatctcacccatcatgtactggctgatgaagtttccgctagaggaattcacccctggtaaggcctgcaacgcgttggtcatcgtcgtccaacactcgtcagcatctgttacaaccaagaatcgacattcacgacagacgcgtcagcctgcgcgcttcaatagaagtatcatgaatcatcctaacaccactgaaacacataccttgctgtgcgtatcctccatgtcggctctgctctgcaaattgaggtgccaacgttctcaaagcctagcagtcattgattgaagtcagcttggttacctcaacagcttctccatattgaaacaatcaaaaggcggacatacctgcaagaagactaaaggaggaactccttctgtagttctttccatgctgttccaaaggtttttcattgcgtttgttaaaccgttgtcaccggtgccgaatgcgccgttcggtcttggtttgtattcggtcagtgcggttcgtaattctggaatagctcgaagagcttgaactgatgcattggcgtaactatggttggatacaagtttcataagcaacgggttggagctgagatatcgagtaagcttggaccttaccaggtatttcccaagttcacaagcccggtaggcgccttagtctaaagagttcatggtgagagccgtcggcaagacaaggaagatgagactaggacgtatattaaacaacatggagatgatggaatgttcactgacagccaaagcaagctcggaatcatccatgtcttctaagaaggtgatagcttgcttgggagctacaggtaagggtccagcgtttccaatgaccatgatagcggcattcttgattcaaaagtagagacgatccggatcactaagcctgggcaaccacaaaccaaacacaggagtcatgggtatcgacatacaggtttaatagcaagcttcgtgagatcggcatcatccttgagcattcctcctttgaccataactggaacgagggaatagaatgttcacagtgagcaggatgatcacaaacgattatatgaactcttggaaaagtcaacgaacccttcattctatggtgtcacataagaatcatcaccaacgacatgtccgtaggagaaagatgttcaaaccaaataagcaaggccttccagccaccagcaaccatatagaaacaatatatgcatacctgtcaacaggtacaccagtcacctggtagatcgcattcttaaactccaaggctggccctgcaaggttgacttccaagggataggcctttccagcgtgtttgatggtgactggaggatgagtacaagaatttaaggtcaattaagatctataaatccattctttcaatcgtgacgagactgactggcagtagtagacatggctgctttgggcatggatgttgttgggtgggaggaagaatcaaggctgaagaatgagaagtggagatgagaggtcgatgatgtgtgttggaagtcatttcatatgtaaccatatgattgtgtaaccattgcttgtagccatatcgtgcgttctctgaccatagaatcatatctataatgctattctatcgatttagaaagaacgtcgttgcccaagctgctgtcgaacgtacaggagttccaaaaggcatcgaatctagacgattatctacgcccatcccagccacgccacccgtcttgagccaagtatctgtcaagggaatcccgattgttatcagaacagaccaggtccatagtctaccccatcgtccacctaccaaccgaccagtcatctgctcgaatatatcttcggctgtgatgaacagcgcattcaaaaggaaaaagtagagcattcttggaagggaaagcacccacaggcgtttgttaggatcatcacagagacatctattctgacatgttcgacttaccttttggctagcattcgatcgagcggatcaggtgatatataaccaagcatatgaagcagtccagagaccaagctatagaagacacacacggacagacagaactgccagtcagacgaaaggcgcaaaattcatagaactacgattcaaacaaaacgccaagagcgacactcacaacgtgctgaacaccccaccgaatctaccgcctaatttgcgacccggcttgtaacccaaaaagaggaatgtactccgatacatatgcttcattcaaaacatgataccatgggagacgcaagaccatcaggtttctctaacaaacgtttctaaatgtgtgttgtaaacacttacgtgccacctattcccccagatctctttcagtgatgtcgcatcccaaaatctgtcaaatagcaagggataatgcagtgcggctatccttggtttccttgagagggccgcttgtacgacaccaagcaaagcggcagggaaagcttggacgatccaaacgcacacagccatatgaaaggccagtacggcagccgaaacaatcgcaggcaaacgcacgtcgaacttagaaccaagagggagacgcagaggagtatatatcgatccatatggcgcggtctcgacgaatcgaaaatacggatgatacatccagaggcccaacgcagcatccatcatcatataagttctgactagatagagattgggggtgagactaagattagtgaaaacaaggacgcaccatgcagactcgtaagcgatacgacggtaagggaagaatacaacgtgtgcactcacagacctcccaaagacaattcctgatgattttccacctttcttcagggatgttggctaaagagtggtggaatctggattttgatggtcccgttgaccagccgatagcccgatatgaatagcagtatcccaatgctttctttagcctagccactcgactctcctgttcaactgtctctcttgatgtcttctcactctcttcctctttaccctcccagcctatccatctcggtctctgctctctgaatcccagctctagagctttcatcgtccaatacactgcctgtatagccagccctttgtttctctccttcatctccaatccggcatatcgaaacatatgtccaccatacagcacgagaaaagcgaaaggtagagccaatgatttccgaatgaagcctgtcggcgcaggcgaaaacaacaagtaagccagaaatatcaccaatagatgaggcagagccacaagaaagaccgtctggtcagtgaccgtccatggatcttttggaagcagactgttgtatgtctcccacagcggctctagagagttggccatgataatcgagggaatgtcttcaatgtatggaactctgagccatctcctaccggccaacctgcgttgaatgttgattggactgttacctgtatgccgctagacatcaaccacttgagccttatgtgaggctgatattgacacgtcaggatatctcgcttgatcctgcgtcttactttttcgctggcagatcaaaagaaaaaacacttaaagacactaccatcacaactcaccgtccacttctctttagtttcattccttgttacatcatctatcaaggaccttcttgttttcttttgctctaaacctgtttacagcagaccacctgcatagaatagattagcatgctttcccctcgagcgctcttaccgctcctggcgcttctgcttcaattccattccgcatttgcttcaatcctagcgatcgactatggttcagaattcactaaaatctcgctcgtcaagcctggagttccaatcgacctagtgcttaacaaagattccaagaggaaagtcggtagtgtcgtcggctggaagaaggatgagcgactgttcggtggggaggcatcggctgtggtatgtcttttaaacagctttcacgtatctcttccccttacttgtcagccctcgggtgatagaggctttttgcttactgatttgtacatatgtcaacctgcgaactgtttcactttggtctaataccatcctatcaacagtctggtcgatttcctcatgactcgtttccttatttgaaaccccacctaggagctccctttgaatccaacactacaactctgttccctactgtgcttacccctcactcaagccgaccgactttatctttcagctcgcccacaacaaaagagatctggtcggtcgaggagcttattggaatgcagttctcctatgctcgtcagctggctgaagatcttgccggggaacgagtgacggatgcgattgtgaccgttcctggatggtttactcaatttcaccgggaggccgtaattgatgcgctcgagattggagggctcaaatcagtcggactcatcaacgacggaacagccgtcggtatgaattttgcgatgactcgacagttccctaccaaggagtaccatctcatctacgattctggatctctttcgacctcggttacactgctctcgttccacacttatccggtcgtccctcattcgtctctgttgacaaagtcgtccaagatcaaggtcaagccggtaaacacgacccatgttgaagttcatggacttggatacgacacggagctcggaggaactcatctggacttgttgatcaagaacattttagttgcccaggtggaggagaagatgttgggtggacagaagggagagggtaaagagtgggagcgagcgcttggaaagcttggaaaagaggcagccagagtaaagggcattttgagtgccaactcagacgccgctgttggggtaagtgttcaaatttatcggtgtatccttaattcggaaggagatgggcagaacgggatcgaaagaaagatgatttggatctgacccagagctactcacgcaaaacaactgcagattgagtctctctacgatgatcgagatttccgaactcggatttcgagagaagagctcgagcttgccgctcaggacctcatcactactaatcggttcggacagcctatcctggatgctcttgaaatggccaacatgactgccgtatgttcacaagcctttgactcttactttcgcgttgtgcttgcattggatagtaataattgttgtttgtattccttttttttctttttcttttttttctttaccactaaggccgatatcaattctttgatcttatttggaggcaactccagagttccaatggttcaggcggccatcaaggcagctatcggagagtgagttcgcaggatttgtttttatcgagttcaattagctgatttccatgattctgcaaaaacagagacaagattgcgcagaacgtcaacactgatgaaggagctgtgctaggttcgttgacttccactttcggtaaggtcactgagtgtcacaatagtactcaccctcaaccgttgttctgcaacgtgccgctcgcatgataggcgccgccttctacggcgccactcagagccgacagttcaagaccaaagactacaaggtgactgatatccaaccatatgatatccagctctcttacgtcgccgagtcgaacaaagaggagagtgagccacgaacagttcacatgtctctcttccgaagaggaagcaagacgaatgtcaagaaagttttcagcatggtgagaaagggggatttcgagctccagatcagttacaagaactctgaagaatccaccgtgtgagtgctttgttcttttgactttcaaaaactgcactctatatgctcaggcactgaagtccaccaaattaacctaattctaccgacttttctcctgtttcatctcagacttcttccgtctgagatctcgacagtgtcgatcactggcctgagtgatgcgatccaaaacttgacgaactcgactaccgacccgaatgccgacgcgattgccaatccactggtccgacttacggtcgagatttccgacgccggcctcgtccatgtcgtcgacgctacgggtgtgtttgctgttgattcggcaaaagaaggttccaagggatggctgaaaggtttgttcaagggaggaaaggatggaaaggatgagttggaggttggagagggggagaagactggggagacggaaggagagatcgttgaaaagttggtgcctttgaaggtcaaagttagcggaggagcaatccccaaatggactgcagagcaaaagaaggaagctcgatcgaggtacggtctccttctttttctcctctcgtttgttaacgtctattttgatgatgctcattttgccttcaacttgttctcgttctcaaggcttctctcaatcgatgcgcttgaaattgcccgccgacaacgagaggaggctttcaaccgattggagggatacatgtaccggctgcgcgatcttcttgcacctgagaaggagggctcgatctttttccaattctctactcccgaggagagagagctcctccgaaccggtcaaagtgacactctggaatggttgagcgaggatggatgggacgctcctacaaaagaattgatcgagcgcaggactcaattggagtacgtttctatcttttctcgttgttgtcaattatcaaacagaaacgctgacggctgatgatttgtcttgcttaaaacaggaatattgagcaccctgttcagttccgaaatactgaggccgtcaagcgagctaagtcgattgaagacttccgggctgctctctgggccggtcgagcttgtaagttagctctgtgtttgcataatcattgtcatcattgatcttagaacatccattggcacgtcttgacgttctgactgatcaacatcattactgactctctctacagtcctcgcagacgcgcagacgaacaacacggctgacgtgtctgccgatcgacctgcaaagtacagcgagagcgagctgaacgacgtgcgtgtccacctggccggtttggaggaatggttcggtgccaagttggacgagcaacacaaccggcctgctcatctcgacccggtcttattgacgaaggaggtcgactcgaagggaatagatttccaagacaaagtgatgaagatgatcaggaggaagccgccggtgaagaaaccggtggtcaaagccaagaaggaagaagggaagaatgagaccaagaatgagaccaagaaggaaacaggtgaggaaaagacggagaaggaggagccgactgaagcgaagtcggccgacgaggaggaaggatcgaactcgaagccatcggccggacacgatgagctctagggtattgaaggagactattcaagaattgcgattagatgagatttcataaaactgttcggataagtgtctgatcgggtgttaaaccgaagagtgtgctgtccagacggaggttcggatggagcaaagggaacatctcttaccatgtgtgttgatgttgaactcatcggcccaagtcggatcttgattatcagactacacaacgtttcgacgggcttgaatggaaccagcagagcaaaagaccgttggacattctggttactcggttactctaatttactgcgcatatatagtctaattgcttggtaagtacttgtgggatcccggggttatacccgttggccggagtgcaggaaatccaattctcatctcaatcgccgtttacctttcaatctctttcttccccatcggattggttctgttctctacttatcatccatctcggtctcacttcataaagctatactctgcttgtcaaacctccaatctaaccttcctttactcttacactcaaacatggtcaacgctgtcgttattggagctgccggtacgtctgtctttctgttgtgctcgttcgtgtcagatgaccagctccggttaaccatcaccgaggcaacgatgctgagagaaaaggcacagatgggatggcgtgccagataaatgatcttgatgcagatggaacctatctctgctagagatggatggttccttgctttgggagtcctgttgattgatctgtctcagctcacaaaactgatctgttcattgttctcatcctttacggcgaaatgaaaccggccaaattttcatctgatcctcctgtctgtcgaaacaacgttcgtgcaactcatcgattcgtataggtggaatcggtcaacccttgtctttgcttctcaagtccaaccctgcggtgaccaagctctcgctctacgatgttgtcgctgctcctggtgtacgtttgacctgttctctctgtcactttccggaaacgcctttaattgaatgttatttatatatcttttggaccatcttcaaatttctttcatcaacggatgattgcacgcgttcttaggtcgctaccgatttgtcccacatcgatacccctgctcaagtccaaggattccttcctccgaatcttcctgctgctctcgagggagccgagctcattgttatccctgctggtaagccttacttccctttgttatctgaccctttcaccatctcaccaacatctcctgacccagcttcctctctttttgtttccgatcgtgaatcatccgatcaccaggtgtgccccgaaagcccggaatgacccgagatgatctcttcaagatcaacgctggaatctgcagagatcttgctaagggtatcgccgaaacgtgcccgaaggcatacgtgctcgtgatctcgaaccctgtcaactcgactgtgcccgtctttgccgaggtcttcaaggcaaagggcgtctacgatcccaagaggtacgttttcctttgtactatcggcgccctatgtttgtatgggcaaactcaccctgactacttatccgtcgtcttcccaatatagactgttcggagtgactaccctcgatgccgtccgagcctctaccttcgtcgcatccatcgctggagttgctaccaaggcccctgattgtgagtccgtttggtgtaatttacttacttgtcctggccttgtgctgacatttatcgatcgtatctagactacatccctgtggtcggaggtcactctggaatcaccatcgttcctttgctctcccagtccaacccggccttgcccaaagaggtcttggatgatgagtctaagctagctgctcttgtcaagaggattcagttcggtggagatggttagtctcaatcgagatcactctggtcaatgtatctgatcaacgtgctgtcagctgatgatacaatcgccttgtaataattccagagatcgtcgaggccaaggcaggaaccggatcggccacactatctatggcctatggttagtcgcctaacgactttcttcagttacgtcctcaaagttgatcactgacctccatgttcgaatctcttctctgatcttgtcacagctggtgccaagtttgcagagttggtcatccgatctgccttcaagggtgagactgggcttaccgccccgtcttacgtcccccttgctgccgatcctgagggtggcaaagccattgcaaaggagatcgagcaggagctcgagttctttagcgctcagatcgagcttggagtaagtagaacaggtcgttttcatcttcttttggcatcttgttggatcctgctcactctctcgtactctcacatctacagcctgagggaacctccaagatccttcctatcgggactatcagcgagtccgagaaggcgctcctcaaagctgctgtccccgagttgcagaccaacatcactaaagtcggttctttacaacttctgatcgatgatacgaatctattctgacttgtcgctccctcttctctgattgtttcaattcaccagggatcggctttcatcactgagggtgattccaagctctgagtgtctcagtagctctctcttcgctgcttctggttgtttatgccttaaacgatttgctgttttctgtagtatttccccttctgtagtatctgtgccaatctttctatcttttttgggctcgtgggttcctagggtcctttcgcgatgtcgtctttacaatggtttgaccatgaccttgattggtctgggttgtctgtaataaagtattgatacatgccctgatgatggtcacctttcgatcagatttgtttattacacggagaatacagccgagcgcctgagacacaaggaaaagagaacagagaacagagagacaatagaaaggagacaaaaagaaaggtccaagagaaggaggatcaaaaggaactttatctagggaagagctcttaaatccgatgaggtcaattcaaaccaaacagagtcaaagtcatcttcctcctctggttctcctctcttttccctatcctcaagatccggatcggaaggttgatcgtcgatggatataggatcatgaaccagtccgctttgttctagcctaggtgattttgctgatcgtctttcactttcgtttgtccctcgaattgtttccgactcggagttcaggtctgaacttgaacctatgtccacaatctcgttttcgtatgggtataaatttggcgtggtatatgttatcgttgttgttgtttttgttgttgttgctattgttgccattggtcttgatgtcgattctatcttactacatgggctccatgatccagctcggatataatcctgtttcggagcaggcggcggaggaaacaaaggggatgaaatcaaatgaatcgtttctcggtctttggtcacatctgatgcatggacttgaggatgagcttgatggttgtctgcttcaagatgtgatctagaggagcgctgaagggctagagggcgcgctggtcgagtaggagtttgagagaggtgaatcgttggattggatattgatcggtggaagccattacggtttcggtttggaattttatgccattctctccgagaagtgtgttgactagatggtgattccaggatagcctttgattgtatctgcgattgcgatgagtagaggggtacagatgattgtcgaataaaggagatctcgctcggatcagacccaatgtcgatactcgagtcgtcgatcaaagttggttcgatcgcttctctctcttttccttttcttttctctctactcttgacaccgcccacggtgttctcttccacttcgttcccagtctgacctctggccagaaaggcatccatgaaagcccgttgatctttctcccccagcttttcctttgtccatctttccacctttctcgccttgttcttctccttcatgcctgatcgttcgattttcaaatcttgagcggcttcgaacgattggacgagtgatcgatgagtgagactcaggatatggttcgggagccatacgaggaacggctggtatggatctgagagcggacgggatcgtctaggttgatgaaccgaggacgggcgttggtcgtcatcttcctcctcaccgctgctaccgccgggctcttcatcctcatccgtcaagctttcagcatcaatcccatccgaacgcttttttgttcgcttcctctccaataaagaacccgtgaaccttcctagcccggccattgtctccttaacaaaccgactcggatcgatcacacatcggtattccaatgcgttcgaccgggagggttgtcgtctagagagcgtgatcgatttgatgaacgggtactctgatttgaacgttagggacggtggcggaggcaggagcggatcagaagatggtatctctgtcggaccgcccggtggagaagacaacaacgatacagctgccgctgccgatgccggcgctagcttagagggccctcccgtcaaggtggtcttctcgtgaacgggccgttttcggacagagaaatggtctgtcattcttgattgaggacgctcgtctactctcggttgtgaggttcgaacaagtagagcgacttccagtcgatcacacgccatgttccatccacctggataggcgagctctgcgggaagaaccctagtggccgctcctttccatagacatcgtctgaacttttctagcagtaaatcatccttccagccggtgattcgctttgtcaatccagcaatctcacctaaccctaaaccttccctgccgtcagtttggaagccaggccacccaatcacaccctcggaagcggatgtcaacggacggacgtatcgattcaatgtctgtatgttggggaaatcagaaggaatcgcctctgctgctttacgttgtctgcgagcgaacgtcttgtccttgttctccctgagggtactagctagttcggcacggaagaagggaagaaaactatcggtaaactgatcgatcggccgacgcttgtatgctgtaacaaggagttcgccaaacggaatgttttggcatggtcttgcttgggctaagagaaaagcgtttcgatgacccagtcctttcacgccgatctagggaagataatagtaagttttgatacagtcggaacgcggcttgaagggggatgatgtgaaagcggaaacgaacctgatcatagtctcctcctgagagtaaggcgacgaagattaagccgctcgagtctagcttaaatttattgtaaatcttgtccatccgaaaaaccatatagctgtctgttgctaattctttctcgcctttcctaatgtacataaagagcatttagagtatgatatcagtgaataagatgctatgagactgagaagatcggatcgtgtacagacctgggttgcttggccaacacgatgggcgctcgaaagaggagcgcgtcgatatcttctgtgatgactgcatcaagctgacctatcgagcaaagatatgccagttcagcctctgcttctccaggagcctattccaatgagcgctgtgtcagcaaaccatgacgaaactgaagagagaacaggcaacagacaacagaatcaatagatgcttacatcccaagtttcgaacccaaaggaatccaacatatctttgaacatatcctcgttgacaatctgcttgtctctatcaatgtccttccctctcttgacgctcggtcggtcctttccgtcaaacacaaatagcggctgaacaggggccgaataaatttgaaacagcttgtaaagtaagatccgggaggcttcagctgcttcaaatctttggtcgatggatgaagtactgatgagccaaatcctggtagtttcctcgatcggaccaaatgtgatcgaagtaagcaacgggaagaaaaacggatgatcgaaaaggggacgacttgaacgaacgagacatcgattcctactctcatcagcctatcgccatatgcctctttgagccaatagtcccaagcgagctcatgtagggaacgttcttctgcgatttcttccaaaatcgaccgaagaccgcctacaccctgtttcgtttatatcgacgagtttgtcccagtaaagagtgctaaagtgtttaacatccagtcccataatgcgagacaagcgactgtacaaacggacagaccatgtttactcagaagcggtcctgttgacttccaagtagtaccgatagacagagcgttgatcagcctgtctgagctcgatttgaacagtcgaccagaagaaggtgaggaagtaaatgagcgactgacgcgcgcatgagacgcgtcgatcgtaaccctaacacgcgtcatgattacgaccatggttacgcatgtaaacccaaggcttagaccaaggtttccgctacttcttgcttctgatcaagcagttccagcaacaactttatgatctcgcgtttctgtctatctttaacgcttctcttgagagcagcctggcaatcgacgtcgcctgacggctttgggtgttctaagtcagactcataccggacaaatggtcttccagatattggcggttgagagctgagtcaatgcgatcattcttgactaggacgatatgataaccgaggaaagaacaccagtataaagaagtcaagataaatatcgacttgatacaaggagagagatacaaacgccattcaagaacatctgcttacgtgcttaggatacctctctctttctgactgttctatcgtaaagcctcagaacatggatcacactggctttgtgtatgatactatcaacttgaaatgccaccacttcagtagtcttctctgcgcttctaatcccgtcaatactgtaaatcacagtcgctcatgccatcagcctttgatcgattcgttgcgtattcagaccgctatggctgatgatctttgccttttgactttatcccgtcctgctgtccgtaccgtatggtctgccccatccaccagtacgacacgaatgcatgtatgcattgctatgagattgcgcatgttcgccttccgttttgccacagcctctctcttattcttttgaacagtatttcttcgttcttcacgagtggatgcgtttcatatatatgcaacctcgatatcgctgatgagattctggtcatgctgacgtcagcgacacatactgaagaccaattggatacaacacaaagagtccgtccatccatcagaaatgaacatcactctcagacttctcttgattaaagctctctgtctcgtactaaccctgatcggataaccgtcgttagacggggagaggctcaaggtagaaagcggcggtgtgaaccaatctgatgtgttcttgccttaacccagacacctcggccggatttggccgaagattacgtaggaggttcaccttatacacgcaaacagctccactccatcatcaccaccatcgtcagcataatgaatctcggggtcggtttcggtttcggcgtgatgaccccatcgttccgtttagcttatcaaatgcgttgtcatttaatatctcctttgcgcttcgtgcgctcgttgaaatgaagacgaattcttgtcctccctggtctggtgatactctcgaagagatcaggtattctctaagttctgtctgactctgtggcatgatagatttttcgagtgtgatcttcagactgccgagaaattgatcgccagcccggttgcatcatcaggatgatcaattatccatcctcagtatccatagaagtggattagccacacgagagtttaatgcttaaataggcaatccttttaccaaagggacaaaaaaactccctcttctcgatccacctccacttgttgtttagtttgctgaaccaaaaaccaaaaccaaaaccaaaactcaagaccgtcaacgtcaaggaagagaaatcgaagaaggcagagagagagcaatgtcctccctaacagaacatcaaacagtacttccaccgtcccaaccttctcagcctacgtcaaacgatcacacagacgaccaatcacacagtaggcttacgccatactcaaacgaagaaccagcagatacaagtagagaaattgatagagaggaccatcatgtggaacaattcaagatgggtttccgaggaaaagttatctgtacgtttcgttttgtcgtcttttcccaatctccaggacgatcaaaatttatttcactcattctctcgtgtgcatggttgtggatgcgtgtcttcatctgccatgtcaactctatggaacactatggaacaaccatcagctgcgttaaacatggtgatccatcctaaaaattctgatgaataaatttactacgagttttacgcccaactacaaagctgctgaatggtgctcgcctggttctgtacagctccgccttgctttttgccttaagcttgcatcacttcgttgttcatactgtcttcaataccgattcgttttataacacactactgtatcctttcttcctcccctttgcctgcgcttcctatgcgatcattacacataccagattgccatgtatattgaaactttaatttctcgtgctttgtctatttcttcggccttccctggagcacgacacatcctactctctctcgccgtcgctttcttctccttcgtcatcctccataaaaccctctctgacggaccagagagcttccaagagctctcttccctcatctctaccccaatctcctccaccggatcccccgagtgaggcgcctcctccaaaagcgagacgcatgtctcctctgacagaaaggaaggagccgatagattgagtgaacgagtttaataagtgacgagagttcgtcgagcttgatagtgtcgaccagattgggatcgacttcggactggtctggttcgatgaagaaggttcgggtgagaaaatcgtcgaggggaaaggagaggctaagggcaatcgttcaggagcggtccgggtcgtgaacaacgggcctttcaatccagtcttttgttgaagactatcaaacaatccggatgcgtcctgctctgggatcccccgaaggacagattgggagaagaacggggtcgttgtctttgcgtccagcaagatcgagcgtttgagagcgagaccaaagttcggtaagaacgcacaaatgtcgatcaaagagaacatgaaggaaaactcacagaaccggcgaggccgccaactgaactaaagtcaatcccgcattgctttttggcaagttcaacatcccacaaagccgcccgaccactcaattcacaaagcctagtgtctcctctccagttcagaccttgcctcaagctcgccatgcccaacctatccgtcttgagacggaggggcatcaaaactgataccaagtgacttgctacgagcgcggaggattgaaacagatttggaggggaggacaacgcgggaagccattcgggggagggaggctggacaggaagcagagtagtatctgcctgtaggaggctcacgagtgtctgagcctcggtaaagatgcgctgaaagaggaaagacacaagcgatttcgagtcagagagctgcttccgattgcctcaatgtgccggtagaaatactcgtcataaatgaacaaactgtaatcgagttgctctcctcaagcccttccagagagcccatcaggccggtgacgaagacgtctcctttagggtattcttcctttatgaattcttcgactacacctgcaccgattgggccgaatccggtggacatatctacacagagttgaacaccctgaaggagatcagcctcttctgcgaatagtctaaaatcgtcctccatatgggagtcggtcttgacggctgaccaggcaagcgaacccgtctcccacgaggtaaaccccgagacagaggccgacacagcagaggagccgagaaattgtggaggcaagggatgtaatgtccgtggatggtaatatactctgttaaaatctgaccagaacctagtttcggtcaaccgaggcggttggggtaatttgtcatcgttgtcattgtcggcttcatcatcgttgtcagtttcataagttggatctggctgatcagattcgagaaacgtttggtaagctgagggagggatcggaggagccgtctgaagtctctgtagtctagaggtatggtcaacggaatacgagcctgaccaaggatcagaataagcgagcaagaaataaagggcctacctacttttcagctgggccatcagtcaaaccatcttcgtcctcatctccatctgtagtgccgtagagggcgttgatgttgggaagcgctccaaaattctctttttgtttgtacgttttgtttacagtcgtcagtgatatcgatcagccaggtgttcaaaaagcaaaataatacaagaagaacaaacctttaaggtcgcatgcgatcaaccgaggcatatatgtttcctcattctaagttcacgccgtgggacgatcagaaggaaagccatcagtatattggtttcacagatccagacgttctatgcaaacacacctgtctgcccaagccttgtctccagtcgacgtcgtgagcgactccgtgatcgacatcctgatcagtataggcaaagagtgattctctgatgttccagctgtgtgtcccgacgtggtttgatctcgggccgagctggaagtgaaggatctcgtgcatgccttagattcttctgacctggtataccggtctgagtagaagcaaggacaaggtgaacgaaacctggaaggtgggatggatcaagacgaaaactgaaggatggagaacggcgcgtgaaataatacatctcgaattgaacccttgtgttctctgtacgtcatcaaccatcttgggctgacattgacgctagagaagccgttcttcatctgtctgtatatccttcactttcgtcttctctggatctttgagaagtctgtctatcttcagtctctcagagttcatctctgtagtttacttcttggctcgttgctctcattcctagcctgtgagttgtgcccgtaaacccaatcccgattccgatcgtcttgggttcttttcagattaaggaaaaaacagaaacaatgcctaggccatccgcttctccatcacgatctccttcagcttctcgtaggtcacccgttctaacgacaaatcgcgaggacgtcatcgagctggacgatccaactgtaccttcggcccatcgactgtcaatctcgttttctcaacacccggtcattcacgatcttgtcgctccggcggatgttcttctcttgggcacacggtcgtcgcggttcgaactgccggccgaccaaaaatcaatggcagcagaccaggaaacactcgaagaagagatgataagcaggaaggagcgcgcgtttgcgttgctggtcgcatgtatgctcagcatcggctctcactatggatcctatttgcttgggcctctaagtgagtatcaatctgtgtatgtgtgaaagagacagctatctgtgtgagcaccttgccgatcattctcattcattgggatatcctttactctctcttcagaatcaaggctctctagagagatgggcacgtcgaacactcaattctcattgctgctcgccgcgttgtcgtgagtccttcttatactgcaaggtccaaacccggaatgaaaccatatacctcatcgaccatccttcatcttttagcttcaacaacacatggactcctctcgttggtggtatcctaacgaccagattcggaacccctcttgcctctatcattgcaacctccattgtcttccttggccagttcattgtcatgctttccaccggctcgggtggctccggaagtataaaaggcatggcctgcggactgtgagtaggctcctaacaagtctacaacataggaacaactcttctgacatatccatgtgggctcaaacataaaaaaaattagattcatctttggaatgggtgtctccccattagccgtcgtccaagagactatcatcgtccgatatttttcgaaccatggtctgggggtctctcttgcgcttggcctagttgccggtaaaggcgcgagcttcctctcatctatcacaagctacccgctctccgactattttgggatgcgagggccattcgttgtgagcacactgctcgcagggtgagtcaatcctgtatttttattcttttcttcttgcattctatatcgagaactgatagccatcaatcgctctctcgtttctctatgaacgtcttcaggatgagcttcgcggtcaacattgtctacctcatctttcatgcgcgtgttcatccggcttcatcgagtaaatcgcaagaagaagcagctcgaaaagttgtccaaaaacgatcagtcaagttgcttaatttggcccgattaggaggtccgtcataatcctttttttatatttttgcattttcttattgagacttccctactaaccaagtcaagttccggctttcgtgaccgcaaccgtgccaatttccgatcagatccattctggatctatctcttactcaacgtgttctgcggagcgatctggagtccctttctgcatctgtcgtcgtaagcttcttttcgtctttatatctcacattcagaacaacctgtctcaaccccttcataccctacagcaacctcatccagagacgatatcaaatggccgacgcccggtccgcttcttatgcctcacttcttcttatgggttcaatctttctatatccactcgccggttatatccacgatctatcccatcggatgcatcacaacaaattcaaggctgctcgctctccttcctcctcctcttcctcatctgaacggcccggctcgtcatcccacgtggtgtacaaactcctcacggcggcatccgttcttactctgacatgtttcatctggctcgtccttccacccagttggacgaggacacccatcccggccatgctgagctttgggcttggtcacggctttgctacccttctcttggtcctggtagttcctggattagttggacccgaatgggtgtctactgctctaggggcccataagagtgtaagtagaacgctcgttttccacaagctgctgactgtttgacttcttctctccaacctggccatgacttcactactgatcaagcggatatatctaatattgcaattcatcactcttgaccagatggaagcggccgcgactacgttctctcagacactttctggtcttctcctcgacacaaaaatcagaaaaccatcagcccttcctcctgtctcctcaaacatcacagacacaccctcctctttgttccattcggtcgtccgtcgagcgccttcaaatgatgagcccccaaaagtcatccctcccaacacgcctgccgttacggttcttcttttcacattcttgatgataaatatctgtcagttggtcaccgtcatagcactttggaggtcggtaagaagaattagaagaatgtcgagcgagatgtatcgacctgtcggagatcgttttgaaagagaagatcatcttgaggaagaatattttgaagatgttcctgatgaagacggcgacgatgatgatgatcacaacaacatcaacaacaagttgttatcaccgtcggcccagccttccccttccaaatatacgcaaaaatcaagacattcaagatcgttctcaagctcttcaaaaagacctttactctggtccgatcctatcggttcatccaacaccatccactctcactcttctgattcaggcgatgaagctgaagaagggacggatagcactcatcaggaaaacgggtcgaggtcccgagcaggatcatccagaatgtatcatcagcgcgacgaggaagaagaagaggaacgggatagagagttgaagcgaggaaaaatattcttcgcgttgagttttggtttcttgatcatcgtttgggcaactttcggaactgttatccttgtaagactcggtaagacccggggctgaacactggttcattgacttgatctcgacgatgctgtaattgtatatccaattgaatgtcatttcataacaatgagaaaggacgattgattcttgaccgacgaaagatgctctttgaatatgaaaaaaaaaactagactaaaaatcacatgtgtacacaaggagcctcaaccaatcatgaatcggaagacatactcttgagaaatatagccccaaagaaccaaagatatgatcacaatcgaatccagccatgctctcatcgccgaccttgtttcttccttcggtttcaatcccggtccctcctccccgtttttgttattctctgatgacccgatctttaccctttcgatcgacttatcaccaaaatcaatgctaatgtctctgggcgaatctacaagtataggcctcaataggacgctcaacccaaaaccagctcctaaaccaccaaggaccgtccgaatcacatactccctatcgatcgtctcaaatccctctgttagactctgtacaagatgcccggacgagactgggaaagaacggatgatctgatagacgagtggcgaaaatgagtgtgtggtgtatgatttgaatacttgactcaggtggtgcatagggaaaggaggcgatgaggtcggcatgattattgatgagctcgatgtggccagctcgggtctccaaattgagacgaggaggagaaggacaagtttgggacatgaggaaagttgaattgataacggtgtaagtttcgtactagcatagagacgcagataaaagaagttacaaagaaaccatgttaggagttcccaattgacaatgagagagcgagagaatggagggagagactcatacagcaaaaaaatcgacccaagacgagaacctcggcgtgaatttgaaccacgggtgaacattctccaaaaagcgagaactaatattattgccaaggtgatgcttccctgaaacgccaacgaatccatgaaggatacaaccaagcatctcccgaaagacgtagaatgtcctatcatcctgtttgtatcgtctgccgaagtcgaacagcgcatcgttcgccaacggaatatggaacagtctcgatcaacccaaaacgcctagacagagagagcctaagtaatcaagcaagcttactatttgaccagaccgttgcccatctcaaatctttccgtttaccatacagcacatgattgtgaagacacgacatgaggcatgttttcagctgtcaggcctgtgtgacgattcagaagaaagataacatgccctacaggattcggaaaacactgtgacgatagtcaagtgcataagaatctggtttatgaccttgtttgtcgtatccggaagaaaacgaacagaagcttagagaaaaggatgctagacacggagagaacgaagagaccaatttcaagtacctcttttctctcatccgacacgatatcttttggacccttctctttcgacgtctcatcgcctgactctccgaattcagactggccgaccttcattggaggcgtccccctgttgaacagtagatgtctatacacctctgcgttcataagtacgaggtcgagtgcaaggacgagtaagggttgttcgacatatgggtcggcgaattgatgacatgttggctgaggtagaggatggtcagtgagtatgttggcagagatcgataactgctatatttataggagattggaagtaaggcatacgtacacaaagagacaaccggacgttcgttgcctaaatatacatatgtcgttgtttaaacgcgaagaaaatcgtcaatgcagcgaggaccaagagtcgaaaggaaaggttagtggtatatcatatcactcgactgtacaactcgacgacaatcttgtctaggatcggaattcaccgaagaatataccgtccatagggacgggatgtatgttgtacaatgtacgcatatcgccatgggtcagaatatttatcaactgtatgtttcagagaaagatggaaatgatcgatgagacatctggtggaagtagtgtaacaatctcggcgaacccaatttgctctcgctcataatttacagactccatctttggctcagaatacgctaaagataggaaacaacacttcattcgatcgcatcgaagacatatacataatagacacagtaacagagtacaagatacaatagtggtaaacaaccagtagaaccctgtcatgcagaaagttcatatgtgatcaaactgtctggtcggcttctcctagtgatctctctggatccgggttaaatagcctacccgcagggatcaacgaggcctttgggttgagaatcaatccaaacccaggctcgtccgagacgttgattcttccacctgatattaaatacaaattcagtcttgcaaacttcgacgagctcatagtgcgcacagaaactcaccaataggtataggctcgttcaagaacaaatcaccaaatacaggcaagattgactttccatcgggagagttggcgatgtactcacagaatggagtatgcggttgagagatgatgaagtgataggagtatgggcccgatccatgagggaccacgggaatgtctgatggacatttaaatgtaaagtcagtgatcgaacaacagtttaagctgagtgtatagagttgggcctgaacataccataggctgcagccatagcgctgactttaagaagctcggtaagtcctccaagccacattacatcaggttgcagaatgtcaattgatcgatcctcgatgagctttctaaagccatactttgaatactcatgctctccagtggtccacttgacagtaggcatagcttttttcaagagccgatgtccgtcaaagtcatctgggtgaagacactcctcgaaccagttgatgtctaatttttgatctatgcatttttgagcaagctcgatagcataagggaccttttgggatggagaataattcagtgactaagctctctaggttgtctgagttcaatgacaaatatatggacaccacgtacgttcaaagacatgtagcaatctaccatgattgggaagctgcagaaaatacacgcaaagcacaatcaattttactgaagtgagattgagaacccttggacgagcgcacaacactcactctggtccgacgctctcccgatgttttcggagaaagtcaatgttcttcttcattccgatgtgtccttcagcaggacagtacggaagaggcactttggctccccagaatcccatttctttgacggcaggagggtttggcccagtacagtagaaaggaatttcctctcggcaacgaccaccgatcattttatagacaggctcttttcgaagtttacccaaaagatcccagactgattgaagaagcacaacactcgataaatcaggcttggttcattatgagggtgcgcatgtcagaatggactcacttgcgagatcaacgacagagatggttgcgagagtgatgccctttcgaccgtagaacattctgtcaaacaccgagccgcgcgcaggttaatctttgttacaagagggatccaaatgaaaacgaagcgattcacttacgaagctttaaacaattgatcccaaatcaagttgttgtctcttggatctttacctacaatgaatcgcatgaaatggttctcgatcaaccaacaagagggaggaccaccgaaccctaaatccaattcgaaacgacattgacttcagcgatacaaatcagatctgttcaaacctggcaaagagaaatctcacctgtggcatatccaactgtcccatcagaagcggttaccttaacaaaaagacttccgagcacgccaattccccatgatgttcgggacgccctgtattgttcgtaagacgacataggattcgagatggatgtgtccacgatccagtgaccttgggattggttgtgatagtctcctcccgatcctaagaatcccaatttgaagtcagctagaagtctttctggttttggaatgctaagaaggagaaatgagaaatctggaatcacctttagctgatggaacgaaagactcgaccatctcaattgtaggaaacgtgttcgcagaaccattagtagtggccatgttgactatgaggaatatatatgttctggtgagcgcaagttatagggatgaacagggtgaacaggatgagtgaaaagaaaacgaccgaaggatgtaattcattccttcgccttttgagaagccgagaaagtacgatctctcactcggcctattgttcggaccgaccggcagaacgaaattcggtcaaacattcgtccgacagagtcacgtgatattcctcaagagctcggctgttcctctgtccttctataatcgatgaactatcgtacgacaaacttccacgtacacagtctgtgggtgatgatggtgacgataaagatatgaaacagaagagaaaaaaagatagaggaagacacctctttgagaagctatatgtttgagacatgcctcggatggtcctgcccttttccgtttcattaacgccttgaacaaattgctcagaagatcatgaactcgttacctcgcagtcggatacgattcaaacttggaatagcaattggtgtttgtgtggttgtacttgcctatgcggttctaaaagtgtacctgcaaacaggatatgactcaggtaagtgtaggtatgttctgagttgaggtttcacatcgggtgattgaagtcgtgtcgttgaacttacccatttactgattaatattcgagatagacatagtaccatccgctcgtccgggaacccaaggattccatggtatcaaattcaagccaggtcgcgtagaaatcatattagacatccaaagagataggattcctatgggtgaggtatgtagaaagacgatcttaagcgatagcttgcgcagtgaaccatctagcttattgaccgatttgatgattttcaaagatttggccacgataggcatatgccttggaagcatgtataatcaattcatgaaatgtactcttcgacgagcttgtatgtgatttgccatcatttacattcacaaccatcaatctagtgatgacagaccgccagcataccgtttggcttagggcttgaccaatggtgacgagtgactcaccgaggacacagcctcgatgctgagtacagcgttctgggcaaactgcgaccgcgtcccggacagctccgccgggagaagtcgcagtggaacaccataagagctgcatcgcctatatcggtctgcgaggatcgaagagacttgaggaagactaagaatactgacttataggaaaagacttaattggatcctcttctgctttttatcctcaaacgcaaaccaacgccaacaaactcaagcgattcgaaagatgtacacgacatatcgacaatcctccttctcgtcttctcccttccgagtagccctctcgctcatactccacctggccctcgtcattcttctcatcttccccacattttctgcaccctttttgaagagcttctacttcatccggacagcttcatcatcgagcgcaacggtctacggagcgttcggatcctgtacagaaggaaccggaggaaagtgcacttcgttcaaagtgggttgggatggtggagatatctttgcgccacaatggttgatttctgtaagcacttttctctgtcttctgtctagtcttatgtatgaatcttgtctaagttccctctgttcttcgaccctcgttcaatcaggctatggtcacctggcttcctgcctttggtctttcaatcatcactttgctcgtcactctccccgctttgttcaggcgccctatcgttctcggtcagtctatactattctctttgctctcggactcatgacgtatcagtctgttcaaagttcatgctcatatcattccttaacccaacccatcaaacctaaaaggtctttggagaatcttggatttcttcacttcgttagcaacaagtctctcttttggtttcactctgtccttgatgatgtaggtatctgtccatcatctcataactgtttctgagatcgctcaaattttactaatggctctcctcggctttgaccaccgatccatcacagccgtgcaaaggctgagttgaaggctgccggttacacgtaaatacttcctttccctctttcactttatttaccgagcattctcagactcttctgaccaccgattcttctttctctcgatttctcctcagcacatcatcatatggctctgcgctctggataggcgctgcagcactaggtgtctcaatccttatctcatttgtcggtccacccatcatcgtccgtgcggtcttcgaatctctacctaccggccccggagtcaacgacataggatatgtagatcattcccaaccacgagggttcgtaggttacgaaggatctccggctccaattgactcgcaaagacatattggcgaatatcaggagcaggagcaagagccggtggcgggcagaggaggatggttcgcgagattcgacagaaagaaaagagcgcaggagaaagagttggagagagaggagcaggagaaatcagacagagatcgaagggagggtagaatcgccgaggcaatcgtttaatacctttgacagtttctttctcgtaatatgtttttcccactgtaattctttatcaatttatccggactttgcactgcaattcgtgtagatcatttttgatcgatgtaatagaacatagtttatctcttgcacttttctgttcatctactcttgctgtatttttattgctcaacagacgatgtggaccttatctctccttaacgatttcgatgttcctgtacgctccgatgagcttctggtttttttatccaacagaattgaaccgaaataaaaccagtatacaattccgacagaacgatgatttacatcatcaaatatttcaacagactgatgaataaataagacacagaaaaacggcgcaagatatgcgcaaggcaacaacgaaactatcatattcgcttcgacaggtgatgatcaacacatcctaaaatccttcatcggtcttgatgtcatcgaacagcaaaatcaactctacatgccgagaaagaccgatcgtacatcaatgaaaattgcaaccaaaacagatcagcgccatatacatattccaacatctggtgatatgtactagataaattgacgcaccatggtaccaggccaagccttcgagatgtgttttaaacaagattttttcatcaaccgtgtgagccgcaaaggatgtgccaatctaaccggatgataaacaacgtgttggacagtgatcagtgaatgaagtcatgaaaaccttcgaatcgaggacaagacacgcactcgtcgggggacgaatcggtaaatatttttggtcaagtcccagtaccacttggtgtctctgtatagcccggaaaacattttgtttccatcgaacgtcatcagcgataagaaagagagcagagaacaaagagcagacgtacgtgtttccagtagcagccgagggtgagacgataacctcatcctctccatctttctcaaagactcgtctagacgcccatccaaacagatcccaagcctgtccgtgaacaggggtcaaaggagccggtgcgagcggatcatctccttggatatcaattcggatcgtaccatctgaaccctcgtgcaagacggttttgttgaaagagatcaacgtaaagttgtaagcctcagcggtaggaagaatggagtcagtgtagatgtcgagaacagtctcagctacaagaagaggagatagatatcaaaattctggtcagtcaagattgaaacaaaaagatagtaatagttctgtcttacgagactgagagaagtcgattcgagagttgaagacagctctggcagattcaggcaatgcgttctgtgagatgagattaatccccaaggactggtcaacaacgtcgctcaaaatacaaaatccaatgaatctctgatgcctactaatttgtgacctgacacaacatattgtcaaggaacaagataagaatcagcgttgttggaatattgtagaaccagaatactgatcaagtgcttacctccagaaatcaaagtcaccgccttactggtcctgaccaaaaactctcctgccattctacctctgacttcagcgtaggcagcagccagcttgtccagagccttctgggtttgctttccctgcaaacccttcttgagccctgtggaaacaattcagattgagaattagtattcaatcagatcagtgtgcgattttgaggatgaacaaaacgatgcgaacaggagggaacgagcgaggggacaccatgagtggcaacgcagttcatgtaaccgtaaacaggcgaagaagtgtgcaaggtgggcgggaagaggttggcgtctctgcaaacaatacgcattgaacaccagtttgtcagtttcagatgattctcgattaaattagctcatcaagagagagagagagagcgcactcgacagaagcgacaatcctactaaggataccaataccggtatgcacggaaggcgttgaactgatccgaggacatgaacgagttagtcgagcaaagacgtagcgctccagcacacaaggaatacatacctgtgtccaccttcagtctcgaccagaattgccgggctcacgtttcctttctctgctgttccaggcaaaatccagagcttcccgtacttctcttcaactccggatccaccttcatctactagcatcgcaacaccgtttgggccgtaggtatccaggagatgctttccaatagcagatgcaccttgaggcccaccaatctcctcacttggattattcgaaaccaaaatctgatgattagctcgatcttctctgcgaaaatatcatttcgatgacaaagacttactcaaacccgaaggcaaggactaataatgaccggaaaatgacgacgtggaaaaaatcaggatgatgacattcagaaggagacacacgatggaattgactgaccgagcgttcgcctattcttccagccttgctcgagcctatgttctaaagcagtcatgatggcaatcaaagagtttttgcagtcactggatcctcggctacatttggcgagatcatcaatgataagagataggaaaatgagatgacgctcgatttcgacaataatcgattagaacgaatcacttacccccaaatatattcgccgctggaagtttcgaattcaattcatgtttcgtgtgagcttatcatccattgttagatgtacagatacacacgggactgactcgaaaactcccttgaacggtggataagtccatctatcgagggttgaatccggcgcaggaacaacatcttggtgggcagctgtgagaatgatagatcgttggatctaattagcttatttgtctcgccaacaaatgaaaagaacatggagaacaagcggagagccatactgagaaccagaggttttagcttgggctccgatcctcggagggtgtaaaccaggttgaatcggtgctaatcatccatacaagatgaaggaatatgttcagaatagagcacgaaagtagaggcccaggagtgcttgaaatcagaagctcaccgggttggctagcgtcgtcttttcatagctgtagatgtagaggaagattggtgacgaatgagaagagttagtttacagttcacgaccagatctcgaacgtgtctctcatgaacgtgaccaactcacatcaacggataagtttcttccagataggcatgcagctttttgaatccatcgaatctcacatcataaccttctccttcttcgaactttgcgttagtcatatcatcgtagctctgggttggaattctgatagctcctaggaaacgctcaacctccttagccttgaacgtgtcattctcaaagatgaaatcgcttcgagcagtgtcggagatgtatggaacggcgggagcctgcacacaagcattggataccgcaggaccagagagagcgatcgatggagtgttgtctgtaaagttagaaaaggtgtgatgggcaacagggagcaaaaggagagttccagtgatgaggagggctcgtctaaggggagtataggtcgtcggggttggccgagaagacgtaggcagaggaataggagccgctgccttctcggagatgggttctatagatgacattatcgattgtaaacggatctgacaagacaaagaagtagaaggtgatggatagaaagagaaaggaaaactggaggaagaagaaaccgaacgaaagaagaaagaccattctttatttatacaacgttctatcctggctcaacggtcaaatccgatcggccttgtccgttctgtttcctcagtttgtctcactcctcatccttgcttttctccttatcgggcctgctgaaaaacattgccatcagacaatcccaaaactagccggtatagagctcggtaagatcatgtcgtcttgactcgctccttcttcccagctcccaccgctcccgtccctttgctcttcgggccgtgatgagtgttgtattgatgattgtcttgatgatgaagacgatggagatagatcctgtccctgggaagtccttgatggatgctgaggtggaggaggaaacgagttagtcgagaacatatttagaggtcgtgaaggttcaggtcgacgtggattcaatatgggaaggatcaagcggtggctgtttcatttcaccatcgatcatttttgtcgcaacggccaggaagcttgtcagtcgatgcacatctcggagcactcgtaagtacatatatagaaagtgatcacgcacgcatctttgccctataaacccggccgagccagcatgagttgaaaagtatcatcttagtattcgttcaaaacgggacgatcatctgaatagagaggaagttgtgcattcaacttacattcagatagaacctgaacaatcgtttttccttcataaaacccatacttgaatataatgctaatgctcccaggttgtcaaattcggtttccaacgcgatctgttaatatcgagagcgatataatcatgctcgtttgaacgtcagaccaacaggttctttgtgtacgtgatgaaaacagacgtaagttggaaagcatacctcttccgaaccattagcagtcattacctctatcgctatctctactagccgactagcgatctttcgttttcgatactgtttatccacactaagcatagcgatgtatcctcgctcgcgcttcatccggtgcatctcttgtttgcatacgacgataccgatagggagagcggggttcagagaagaatatgcctgccgaagacaaatagagtcagcgattgaacataacaagggagctttggagaacgcctcgagttctcacgaagtacgccaagttgggcctgtaacagaatgaaaagcgatttatcatttcgaacgttcagcgattgaccggcttcggtaccagcataagccctatggacatcatcaaggtcgttgctcaccactggtgtaggaaatatctgagatcacgattgagttgtgaaaccaagttgtgaaagaggtcagtcgtctgtttcaagacgtgatagacgtatcgtgcgacaatcagaggcaaacctatatgtatagacctgttcaagttcaatgcagagaagggctaagtacaattgaaggctcttgggcaaaggcgacaagcaaagacgtactgtgtatggctcgcttaattcggtctcaactagcctcatcacatgctcaatctcgtgttctcctccatatggtcgatacatgatctcttctgttcgatcctcctcagtattcatatggttgtttgatggtacttccaaggaagcatttgaacgaggcattagttgatgttcagacagatctaaacttgaagacggactagcaggggaagaaaaagcgtcaaggtcaggagaatacaagctaagagacgatggcaatgaagattccatcacgactgtatgtggatggcgatgatggaaggatgcaagaacacagtcgagaagaaacctcaactttcaatcgtcaaccttccatcataaccatcattctccttcctctcgatcattccgatacatcgtcgcgtcgtccgtatcgggtctgatctcttgtactatcttacatgtctgttcctcagtcagtttccaagaagaatccggaagctgcagctcgtgctcgagcacatcgtgctcagaaagaggcagccgttcagcaggtcaacaacgcatccgctcctctggcttctcaacctcgaccacctccttctcccggtccttcttactacactcctggcaacgacagttatagaaccggtaattcttttgtagggggatcggttcaacagtatgagtattccaaccgttcttcaaacccagctcatcaatatcaacaacctcctcagccatatctctcttcccaagcacctcggcctcacccgggatcaacactccaagaacagtcgcagagaagctcataccatcagcctcagcctcaggttttctccgggggtcacactgggggagctgagagaccaatctctattgtcggtccgccaaaggcggcgatgatgcggccgcccaccatctctgcctcatcttcgtctagctctcttcctctctcggcagcttacaatcttgaacgagatacaaccagacctatagatcagccctcttctgctcctgctcctgctcctgctcttgtttcttcaagacttggttcttcaggccatcctaattctcaacctgtgtaccaatcgcagcctcaacctcaacctcaacctcagcttcgacctgtatcacaatctcaaccgcagtaccatcaacaggggtatgctttacagcctgtagaaacaaacagttcgaacgcgcactacttggcgtctgaaggaacaggttccattatgggatcggctggcggatcaagcattagatctggagcaagttcttcatatatcgggtcgatcaagcgacatacggatcgactgttaagtacgttctttcacaaacctatccagttgaatgcgattacgccaagattaattatgattcatactcttcgatctatattgcgccgtttagatctttcgagaagtaagtaccataatcgccctgtcatggagatcgctgaggttggtgattgcctacagggattcatcatgttcacgcactgtttgtgatccataggcttgagaaacatgctcctgcgaaggactcacgttggtaagtctccattcaactccctaactgtgtctcgttttgcttttgctgatagcgacttgtctcagatcaacatttaggtcatgttgttcatgctattgaaatcttttcgagcaatttgaacggacacgtgagtgattcttgtttgaacattcatatcagacttactgaatgacaaatctcactttctgcaaaccagatcggccgtctagaggctagagaactggacctcacaggacaagagagtcgcgcattgggtatgttgtactgaaagttttgtaatctagaagaagatacatgtgaggcttgcagctaagactagggatcgctcttttggaactcagcgtctgttgcgcgagatttcgagaaagccgcggtgagtgattgttttcccttcagtgtttttgagaaaatgatacgtctgggtcctgagaaattcgtgttgtctgattacttttaaataaattctcttgctggatgatgtggcctgactccaaagatttggatggaggagaatcagcagtatgtgaacttagtagcactcagatccttctctgtttgcaaactacatattgattgctcgatctgtgttaggaacatcacctataactggcctcctgccaagacggccaaggttctaaaagagctggatgacgggctcacaaagtgtcagtccatttgattgacacaagtcatacgaatattagtatatatgaaatgcggcctaacctgaacaatatatacttatccttttggatcttgtagccttcacggcaaaattaggggttgccatctttgagtctctccaagtaagtggctctttgtcggtctcgtcatcaaacatgcaatcaagatgccgatcttcttacttgattgcttcgatgtttcaggatactcgacatatctccatgcatatcacccgtcagatcgagggtttagaggccgatttaccaggaatgatcaaacgtatcgttgcacaggccaattcggagacgatcgagaagacaattcaaagattgaggatagaggaggatgcgctgaagcctttgcaaggatcctatggaggcaatggaagacctgggggaggcagcgagttcagatcaggctatggaggaggagaaggttcgttgatcattttcagcaaagttacagtgttcatttatatcggactaaacgtttgggaaacaccctttctgcagctgagaaaagtgagttagctcagcaacccggtcgttatatactctgttactctagctaataacttttatatctttctcttccaaagccatacagagtctgatcgacgcgctcgagacccaacggcaagctcaaatcgagaaggaagaacgacaggcagccaacgaccgaatcagctcatctcatggcgctcaacaatcgacaggatatcctggtcagcttcaacagccttctaatctaccgatagcaggaccaaccggaggaccgttttcccaccagccgcctcaagctgttcttcgagacgacgcttctcttagatcaacaagaagcgactcgacgacgacgctaggtgcatctggagggttgaacatttcggggatagttctgccaggctcgatgggtgaaaaagctgtcaccagttcagagaagcatggcgcctggggggaggatgcgaaaaacgagggaggaggaatctcatttcaccctagtttgtctatttgtctatctgcttcattctcgaccacaactgatcagggatgttcttttttcacccgaaaaacaacagtcgaccccataagcaagatggaattggttgatcctgtgctggctagcgatgggtatgtgcggttgttctactttgtccttaacatgaagacgtctaacaagctccattatcctcaaaagcttcatccatgatcggttcactttactcacacacaaaccaaaccatccaaccaagccaaacgaaccgctccggatactaggtgacattggtcaacttcgaaccgccatcttcgttcggtacccagagcggaaggacgaatgtttttctcgccgagctcaattcacagaggaggccgtgagacattcgtctgatttcttctttgcagaagttggagatgtcttggaaaaattatctgctgtattgagttggaaggctggcgaagaggttcgtttagtttttttatctgtttataaaaaatctaacacttggcagagaaataaactaaaaacacgacttaaacgaagtataggacgcaggcttgctggtgagacgagggattatcagatggcgtattcggcatctgactggtgcattgtccgacttccagaccgctctcctgctgtcccctacgcttccgatctatcggctgcttgctctcgttcatctcgaactccatgcttacccggatgcgttagacgctgtagagcatgcgctgaggactgatggatctgactccatagcgctcgccgtcagagcggtcatatatgctgaccaaggcaagttgactgaagccagacgagtgcttgacgtcgcttcttcttcggcaaacaaagagggcaaagaatggtcccaggagtcaaggacgtcgaaggcagtttattcaccaaagccaaataggacgccggatacggctttgcctttgttgtgggatgtatcccatctcatggtggtcagcctgcttctcttttctctttccatttgttcataatgatgaagtactgtgcttatttgttcctaatttggctgatagggtttcgcattcctagcacttggagagtctgtcaagtaagttctctggcaaagaggtctcaacctgcgatggtcgacgtacatgcgttaatttgttctctctcctgtcatgcaaagagcggctgctcacctagcaaaagcagtggaaaaggcacctggaggagattgtttctctcgggcactatggggtgagactacgttctttttcaaatcctcatttctatgaatataaaaacactgacagatgtgaaattttcgatggaacaggctacacactcgtggagtcagtagaaaatccatgttttttcccgccaacactcaaatcttttctaaactctgtcttgtcaatattcactcgaacccatcagaagtgcagatggcgatacgaaagaagaaggttggcgagaattagaagccagtttgaaactcgccggtgatatcggttctcgagtgttcataggtgaagaatccgaaggactcggtccaacccacaaaccgcttcaatgtgtgttggcctatatctatttctttcttgttcttccattcgctgacccagatgatatcgatctgtctcaaactcaagctgcggtgggagttctcttggcccaagtgacagcgatcgatgataaagaatccgcaaagacgattttgatcgagtccctctcgttagcccatccaggaaaacgtcagacgtcaaacgaacaaggctttctcgctcggatgtatgccgagacgggggatttcgagatggcgagagccgggtatgatatggcggttgcgatcgcttcacaagctggtagatcagagtaagtctcatcttcttgtttccccactcctcttctcattccttttctgtccatcttctttccttgttatcgaataggagaacggagtgcatctgtcgaaactgacggagctgactgattattaaaacagggaacgagcggcgttgatgggcgagcgagcgatgtacggcgttgcataagaccttccaccttctgccaatagatgggcgattctgttggtttgaccttcaggaacagattgtgaaagagagtgcctgtgtatgatttatatagaatataggctcctcgaggcacggtcaaagcacaacaagtaaagacactgtccgttcaaacagtgaacattctcaatatcggatgtagcagaaacggtggtaggagtcaagaacaaaaaggtaactaagggtatcacgaagaagatctctcgtcgagtatcgagtcaagataaagaagatatggatgagaagaaagtgtaagaggagtatgatgatatgctctatgaacaaaaagggtgacacgatgcagatgtatgagacaacatattttaaaaacaagggagatgatagcatggacagctgaatggacgagatcaaaaacagaagatgatcggacggccatgattcttctagaaaggaagatgcatacgaggcggactgtgcgatgaccaacgaccacgattgacgacaacatagatccgaaagcgagtgaggacaagaacaaagataagaaaaagatttacagaagagacttggcagacaggaaggaagtaagcgaacaacaaaggttagaaagaacgaagcaaccttcaacggttgaaaggatttaagtggttagtagcccatggagatgcatttgtcccaatactgtgaatatggaacatgcaatatgaattcgccgagaccgtcaatcttcatgtgttagacgaaaaatccgacagatagacatgatgaagaccaacctggtcaaccatcttttgagctatctctttctcgtcttcagccaactcttcgacctgctccttgcgtgctctggcttgtttccgaccctgtagactgcacaaccgtttgatcagtccgccaaatgaccgcttgggcgcaaacagtctttggtgtatatctattgagaattacaaaggaagttagcaagcgcactccagagagagatgattctcatacagaaggtaaagaaccgttcagaagttaaagaagacgtacgagagctggaactgtcagggctataagagggaatcgaaagtgcggtagcgctgtaagaaggaaggtcgtaaaattgatcactctcccggaacgatggggaggacaccctggtctttaccgaaagagacattgtgtatcaagcagcagatgtatagccaggggaggcgcgagtaccaatagagtctaaaggggacaggataagaggttacttgccgaaagaaaggcagagagggaaaaggatttgcagaaagaactgaaggtgttcttgtaccaatcatacatgagtgaggtatatcaattttttatttcctgtatttgaatgctgacggaaatgttgagtgatcgatccatccaaagcttcggtacatgtgaagacgatgtgaaagcgagagagaaaaaaaggaaagaacgaggagaagtagtgtagaactggtagttctgcctataagagctgtgatgataagccctttgatctggttagttcttgatacctcttcctactctccttccgttgattcttcgttccgttgtgtatacaccgaagaaatacacgacgcagctcctcgtacaggacatagagagcacgacagacacaacagagaattatagaaaacacgagttgaaacttcgcggagttgaacagtatcaattgtgaagagagcagatacatcaaagggggagagcgatcgcatagagatcaaaggagacgacgttcggaaacattttcttttctcacttcttacgaggataaaatctccagggtgaataagcatatggcttttctagaatcatgcgctgtattccgaatgtcacgtaaacataatgatgccaacgatcgatcaaggttgtatgaaagattgaaggagaagaatggagagattgatgttgtgggagaaagcgaaatcctgctcttccgactctatgctcaatgtgctgatatgatcgactctctctttctccctcacacacttgcacacactctcttcttaggtctgtcggtatccagcttacatgtttcctcatccactgtgcgcgcttgacatgctccagttgcccgacattgacgaacaacttagacagtctggggtcccaatttctagaatgttcggggttagccgatgaaacgtccggccgggaaagaaaagaaattcgggtcgttcattttctttgtgagtttacagcactcttcacaactctagacaatacttcagacaatgcccaacgcagacaaagagctatcgtccccaaaaaagagtcctctagcgcttcccgctccgtcagatgtaccggcatatcagttagacgtcaatggcggtggttccgtcaagttggatgatctcggaccaatgatcgtcaacaccaatggggtcagtcttccgtcggatctctaagtttcgcttcgatctatcgaggcgttccgcaactgaatacatctgatactgacacatgcatatatgtataatcaaacatggtgatcaatagacgctttcgagaatcaccaattggaaggagctctcggaaccagaaagagaacgaacgatcagactgttggtcaagaagcgaaacgtgtaggtaatctgtgcatgtattgtaaaccctggacgtcctggctgaccgctccatgactcttggtgaacacgcatttatcatcctgcttcccagactacgtcttcaaaaccaacctcaacctccagctgactcaacaacttcatcaaacgacttgttggccattgttgctgagcctcctgccgatgataaaaacaataaagatgtatcaaacaattcatgaactgtatcacttcttgcctgtctttccctctttcccctttcttgttccaatctccttcctgttctcaatctcccttctggtccccattcttctctctgatcccatcctatcgccacctttaaggataaagagcaattgtcccatgtcgttgagcatacggccagaatcaatgagacagaatgtaaccatatatgcgcgtaatcatcgtaaccaaagattccctcaagcacacactatccttatcccttcaatcctccaacccgacggccatctcgtttctcgttctccttctttgaccatcatcaccaattcttttgctatccgcttagcttcaagtccttcaatccaccgttttagatcgttcctccttcttttgtgcactttcgctcctgttttctcacccttccctcatgtcgtcctcccaggctccagcgagggagcagaaaccggtgaggatcggtcagtatcacatgcttcagacgcttggcactgggagttttggtaaagtcaaacgtacgtgtcttctcttttcctttttattcctcctttcaaggcagttgaatcaggcgagttcatactcgtggggtaagggttgtcgcgtcaactgttccgattttcagtcggaacttgcccgtctctcatcgtgtggggtcatcttttctcctgagtcggaccagaggtcttcggtcggatcgattagaaagatcattgtcattgccttccgagctggtcgtccgatgaagatcatctgaaagagtcgtctcctcaaggaagatctggttttgaaacttacgggacgctattatcagacggcaacgaacccgactggtctatacttcagctctagagaatcgctatctgtcgatccccgactttttgaataccctttactctcaccttcattatctcttttgtcggttgatccccacacacaaccacacacaaccacacacacccacacacaca

SEQ ID NO: 1062 - DNA, 3115 bp, Xanthophyllomyces dendrorhous
atatatatatgtccaattgagacgtcagcatttggtcaatcgttaatgtgtgctcattctcgtatcgatttttgtttctccctcaccaacaccctaccaggtacgaagtgattactacaccaacggacatcattatggtgatcgaatatgcaggaaacgaacttttcaactatatcgtcgacgttagtgataccccacttcaagtcttgatactcacgttgaggaaggctgaattttcattctgtgttttcctctgaaattatagaagggcaaggtttgtgatatgttcaaccgtttaagcacagaacaacctagaaactgatcctgctttgagaggttctttaataatttacagatgccagaggacgaagctcgtcgattcttccagcaaatcatctgcgcgatcgaatactgccatcgacataagatcgttcatcgggatcttaagccagaaaagtatgtagctacttgttgttttcactcctgcgcgaggtctcagacgagcaactaattatatatttcatctagtctgttattggatgactcgttgaatgtcaagattggagattttggtctgtcaaatatcatgcaggatggagatttcctcaaaacgagttgtggaagtcctaactatgccgcacccgaggtgatatctggaaagtacgtaccctgtggttttttcttttgtaaaaaaagggccatctttgttcattgtaattttatgaatatctcattcaaattttcagattatatgccggaccggaaattgatatctggagttgtggtgtaatcctctacgtcatgctttgtggaaggttaccatttgatgacgagtatatccccactttgttcaaaaagatcaatggtctgtctttcttcctctcttccctatttctctcatctctttcactctaccgtttgctaatccttccatattccaaacaccacggacgccatttaggtggaatcttccaccttccctcctacctgtcggtcgaggcaaaacatttactgtcgcagatgctcattgtagacccaatgaaacggataacaattagcgaaattcgtcaactcccatggttccagatcaaccttccacgatacctccaatacctccctccgacgccctctcatgaactctcgcaggacgaagcgaaccgaccattgataggcgcgcttacctcgctcatcagggaagatccagtcagaagtagacggggttcagaatcgagtgaaatcccctgtttgatcgacccagcacaggaggcggataaacggggattggtttatacatatgatttaggaattatcgatccgaaaactgtcgaggctctcaaggagaagatgacgggctgggagatggaggatctttgggaagctttgaaaagaccgggggacaaccagatcaagattgcctttcaactagtcagagatcatcagcgtttactcaaaggaggttagttcatacacttcgttccttgtttcttgtcactttccacttgaactcactctctgaaacccgcatcgatctgtcttggctgtgcgtgtgtacatatagccggccagctggatgaggaagatagcgctatggaagggtttttaccggtctcgcctccagcctgggatccagatggcgcggtcgagggagctatggatgatgacgactttgacgaggatgatgaggatgaggatgagatccctgtagagtctgggtttgccctgttggactctagtctacctggttataacgaaggtttgtctttttgtcttttattgcccaaagcttatcgaatttcatgtcaatatcttttctgaacatgtctttctccttctaatttcaatttgatttgaaattacgagcaggggatgatccatcaatcaacttatcatcctacgccgccgcccaaactgctgctcgcaccgtagtctctccacctactccagccaaaagaagtcataaaccccgttggcatttcgggattcgttctcgatcgccaccaatggaggtcatgctcgagatctaccggacactcaagtcattaggcatggagtggcgaaagaaaccaccggcaccggatagcttgagtccgaacaacggagaatcaccagctggagtcggtgcacatggaagagcaaagaaggattatgcggcagaggagaaatatctacagggtctgttcttcgttgagacccgatgtagagtcagagatgtcgtggtgcgtacttctttgtgtgttcaaccatttcccttttggtcttagctgacgcaagaaccctcgcgaatttgaatctgttcacggaaaaaataggttcggatggatctacagttgtacaaagtcgactctcaaaattacctcgttgacttccgaaatgttggatactaccgaactccggctgatcagcctggtttctctcaaatgcccccttctgattctacgtcctcccgtcgctcgtccgccgaggacggatcggatccgtatactcacgggtatccatatcagaccacagccagcacatcacccacaagctctcctcccacacggacgaatcaactaccgagtctttcggcctcgaccaggaattcactcgatcagacaaaccatccggtaggaagtgaggaggctttggcggcggctgctacctcgcgaagggcttgcgatagagctcaatcgcaggcggcacaacaaggtggtatccaggaggtcaccagtccattcttgtttttggattgtgcttgtaggttgatcgtcgagcttgccggtggttgatggaagggtttcgttcttgggcatatgtttaattctttcttcgtctgtttccacacgtctgaattgtatactcttgtttttctttcacttttcttcttttctctttctttgttcctcttttcttatgtcggtcgtcgtacctgttattacctatagagctagatgggttcccaattctgtttttctttgcctttttttgtttattgttttgtatccaactcgacgttctcccgtacataagctctatgtcttgcacagtttcctctttttcccttggtttcttctctctttgagaatttcgtgctgtgggtctgggtgtgagtccggcggggggaggggtggtggtg

SEQ ID NO: 1063 - DNA, 4720 bp, Xanthophyllomyces dendrorhous
cgtataggccgacctggtcaatctcactattttatacatgccccattccttgcgttggcctggttcaatcgtatgattttttttctttttggtggatgtgcaccaggtaataggtagaggaagataatcaggaagccgacgcaatatatctacaacagaacatgatcgatactcgacaagcaccaacagatgaaaaagactagagaatcgaaagagagagatataggaacagggttgtaggtgatcgaggctcaaagttttgcctctcgattcctggcgttcatccatttccgaccaaccctccaacaggctagccagagtcccaaaggaggaaagatccaacacaatctccaactaggaaacttgcccgatttttctagcaacgttacgacgagcgcatcgactgatgtggatagagatgagggtgtggttgaattgtcgaggatgtggtctgctttggagatcttctcctttaagggcagcttttgataaagggttgtacaatcgaagaatgatgaggacgaggacgaaaggaacgataggcaagacaagaagggaagctctcacttgggattggattctgtctttagcttgttctaacgtgagcggtttgttaggagggataggttctctcttcatcaacctctccaactgaacatcctcatctacatataccaccaccacctcacctacgaaccggtccagctttgcttcgattagtaacgggacatccaacacgaccatccgtttccccttcaaccagtatttgatcagctgacgaagcatctcccgacggacagccggatgggtcaccgagttgagaaacgcccggtcggttggcgatttgaagatgagggatcccagggccgttcggtctatccggtcggaagaaggaagaagaatagacgatccgaaatgagcgaccacagctttgtgacaggatgttccccttatgtgtggtggcaacaattttgttagaagaaacatagaaagtacaagacatgctgagcattgcgcgacaaacgaggagaagatgaagagagaactaacggttcgaggacctctcgagcgatcacatcggcatcgattataggaatatgatgtttggtcttcaacaacccagaaacggttgatttcccagaggctatccctcctgtgaggccgacgactgagctaagtagtgtacagtgagaagaatgtgagagacgggcactgcatagtgacgaccaaaaacgatgttcttaccgagcatgatttggctgatggttatgagaaagaataagaaaaaaagaaattaattttaattcttttctttttctttcaccttcaaacgacgacgacgacaacggcgaccacaaccaagacaacaacgcacaacagacatacataatcatatacgatcgtgtgttcatatggttagttcttgttccttctccgaccaagctgattgagacaagagatagatgactgttcgaccaaatatcaacgtctttctcagtcgtctagtttactatcgaccatcaaacacaaagcgactctccgccagattgaaagcttgaaggacaagctccgtcggaggttcgcgttcatctaccatggtatggacctacatatatgttgattctaattatcatttatgtttgttctttcgcccttggtggccatttgtacgccaaacagacagatctcggggtcctatactgtctctgtcgagacggcacaactgttgaagctggtcgtgtcgaacgcaaggttcaactctattgaagacctcatcagtgctatcaaagagattggcaaagagctttcgtctgctcaacctaagggttcgtcaatcttgtctctcgatttgaataggccatgttgcagtacataatgaatcactccccttgtgctgatcctgtcctacgcgtttctggccctcgaacggttcttagaattggcttctggaaacatcgttcgaaagatccttaaactcatcagagaagaataccgagcctttcttctctccactcgagcacccccttcgacaccttcgatcagtctcgcaaacttgactctatctcaactaactctacagactcccgcgtcttcctccctctctacctccctctctctttccacttttcttcagcaaggcggcgcgacccgatcgattgccgccgcacgagtcccctccggtatttctgcctttgactctgtttcaggtcaactctacaccgcgggtggattgatgactgggggaggcgccccaggtggcttggcgacaggtacacccatcacgttggaacctccggagtgggattgggaggatgctaccggcggaaatggattcgggtcagggaagaaggccggaagtatcaagcccctcctaatccaagccatccaggaggtccttgatgagttggaaaccgtagtcgagaatgtcgcaaagggagcaggagctcatattcactcgacgtaagttttcttttccttgccctcttctcgtcatcaaggatgatttaactcaattgttctgattcattttcaccttccaagtgaaatcatcatcacattaagccattctcgcacagtcgaagccttcctcaaacacgccgcaaaagacaagaagttcaccgtgattatcgccgagacagcgccgtctctatctggacatatcctagccgccagactagccgctcatagcccaccaatccctactctcctcattccggattcaaacatctttgcgttcatccctcgatgtacgaaactcctccttccatgttccatcgtactctctaccggtggaatttttggaccgtcaggttcaatcttggcagcaaaggcagccaaggcacacagtgttcaagtcgtcgtctgtaccggccagtacaagctgacacccagttggaatttgtaccaagagtttggggctggtgattttggagatcctggagaggtcctagagttcggagagctgggcaaaggcggtgatatggttgaggttttgaacccgaggtttgattatgtcggcccagagttgatcgatgtgttcttgaccgaccagtcagtagaaatcctcttctgactatttctcctcggattcattcctatctttactgattcgattgaccttgttgctcattcaaaaactttagcggagatcatgctccatcgtatatctatcggtgagactcccttccttatatactttgtcatgattcttcgtattggtactgattttggatgaataaacttcttcggttgtgcatgcgcatatgtgtgtgtgtgtgtgcgtgcgtgttgatagactcatcaaggaaacatacgatgacgaggacgagcaggatttctgatagctcacagcctagatataaaatggaaatggtaaccgcagaagtgctgaaagcctggctagcgttttcattctgcccttgatagtctattctaagtcgaagaaaaactaatccatcaatgtgacatctgggaatctaaagatttatagtggataatattatttatatcaacgcttcttcccgccgttagaggataagatggagaaaaacgcttcttgaggaagctcaatatttccctgcaagatcggaaaaaagaaaaagaaagaatgagtattgccctcatcacgaactgatcgtttattaagtggaaaatcagacgaacggcgtatttcttcaaacgcttctttccttctttttgtttgttcaaatgtttcaactgtaaacacgtcaaataaccgcagataactcctcgtcattcaatactcgtacgcatgatgtgaaggagtcgatgataaaggaacgacgacaaaaacacaaacttttcgttcaaaatgacctccataaagaccagcggtgacatcctttctcatagccgttactctgcacgtcaaatgtataacaaaccaatatgatcaattgaaaaactcttaacttaacccgaatgaaaattcataaagacgatgaaagacgaaatcatacttttcagaagaaataatctttgtcccgatcactgattgaatagacatatcgtactgttgtcgaggtaacacgctgttcatatcagagatgaagagaagaatgagtttttccgttcttgtgtacactcgaaatgaagaaagtatgaggagaacacgacaggagcgtacgttcgtagtttagacgtccattcacgtccaatcgaaattgctgaccctcgatgaatgatcacttttcacacagatgaacaaacaaactatcagcatttgtaccagcacaagaggcagcatgcgattgtgaagatgaaagaatcaaagaaggcttactggataaagcatcgataggttttccgttgatgtgcaaattcatcttgcaaacatcgctcggctcccagcctgcgtcttcgtaatccagactcgcaaatccagagctcagtctatatcattccccaaattgaaaacatacttagtcaacatcaaccaagattcaagcacaagctatgctcagtaacaaaagagagagagaagtacgcacgacttcagttcatcaaagaagccctgaaccatctctgccatcggaattttatacttcaaaatcgcccttgacccagaaaccgattttccaggagcaggtgcactagctgcagcttgagcttgtaatacttgctcattggttagagtggatgaagacgacgacgaagaagagattgatggggcgtctaagtatgagtactgagtctggac

SEQ ID NO: 1064 - DNA, 4682 bp, Xanthophyllomyces dendrorhous
agtctggactcctcgatgtgaaacgcaaagttccatctaaaatcaagtaattattacattttgagtttatggtctttttttgataaatatatgtctgcttgtcttaccatgggtccaatgtagtctgaattatagagaacagcggatgtctagtcagcttaagatatcaacatatactagtgatgataagtctgaccttcggggaccaagatagtcgcattgatcataggttcagcaacttcctgaatcttcgatgagtgattcaccacatctggaaagtcgttgggattactgataatcacagtctttccatcaacgtaggtgactacatcaaagaaaattgaagcataagaacaagaattattacaaatcgattgagttctcgtaaaagtgacgaaattgaacgcactcttgtacggcacggaaggcgcggtgatgataacatccgaattatattcatcctccaacctttgtctgtttcggtcaagaacttagtctttgtcagttcccttcaatcgttcatcacaaacagcgatcaacctcatcagccaggacaaattgaagaaaccaacctaaagacatccatatgtaacgttcctaggcatcctaatctaagtccaacacccagcgcctgagaactttctctttcgatagtgacagatcgatcacttagcatcaacttttcgcgagaagacaatatgatggattagaactcgaaactggttgagaagcacgagaccatataaggatgaggttgaatacaaactctatgaacagattcttcaagcttgtagaaatcgtttgagtctatcggatagattcctgcaaacacctgttgaatcatcaattgtttgttatgaatctcaacagtaaacacagatttaagattaaaggaaagaacgacaagagttgtcgtacgaaccatcgcttttgtaggtttgaaaccgggtaaggcctcgacactctcaccagcgatgtggaaagtatctcctacagttgcctccgatgcagccttcatattgcaaactgagcaagtggggtgtcgtgcaaaaacgcgagtgaagtatatataagcaaatacaagatagctgatcaacgagagaagcataggaccaacttacctatataaccaacttgacctgccgttaaaaaattggttcgttcctcctcaggatgcaagataccgatatctagcacctcgtacttcttcccagaatgtgcgctttcgattttgtctcctatatgatgagacccacaaaataattttataaaagaaccattaatgactcgtctcgtgagcacctattacctcactggaaaagagaggccgaaaaaactttcagtaccttttttgatagttccttctttgacggccaccaaactgacaactcctctaaacctatcgtattctgaatcgatcactaaacctctgaactttgactcttcgacttttcccacaggtggtggaatccgttctatgatagccgtcaagacgtcttgaacgccttttcccgttttggcagagataggaaggacggaacttggttcaagaccgaagagagagtgaatttggttgattgtttcagtgggagatgcatgggctagatcaacctagatggcgcagagaaagggtactaaaagtcaacagagcgtagtcaaaatctaaacatgagatgtcataccttatttataacaggaatcatttctaggtcattgtcaaacgcaataccatgaacagatattgttctgtaaagccaagcagggacgatgagccttggtccactgtactaagattcactatatgatatcttcatcactctcaacataaccgtcaaactcactgggcttgtactccctctaaagaaacaatccgtgtcatagatcattgaatgaacaaactttgtcagtctgcagtgaaattgttgatgaggaagtcacagtcgagagtcggagcctttaataactgacgggtgcaatcaaccagcaaaagcgcgccttcacaagcagccaatgatcgcgacacttcataagaaaaatcgacatggcctctatcaagtatagacgagagtatcacatgtcaacattctaaacaataagaaaaacacaaagtctagcaagatatgttgcacatacggcgtgtcaatcaagttgagaaggtattttttccctttatattcatggatcatagacaccgtttgagctagatttggcatagagatgaacagtcatatgaaaatctgagtgatgtttctcgaagtgtgatacgaagagagcaaaaggaaagaagatataaatcaccttttacggtgattcctctttccctttccaccttgagctattgaggacgatgacaagttcatccgaggaaaagagcgcacgaaactttgtcagtttcaagactttcgaacccatttcactgacgagatacctgtagactaaccttgtcgagaactggataagaatacatcatcattgaaatcatgccttgagatattagttatgcgcgcttttctcaaaccgcattccaccttctgttctcgaatcaaaataatccaagccgaccttgttggtttccccctggctcgccgactttgatcgtccctgtcagctcaagcagccggtccgagagggtgcttttgccgtgatcctattgtgagtttatttcaaaagtcagtttacggaccaagatagctcattcaattgaaaaccaattgtgcgaaccacaaggaagagtgaaagaaacgaagacgaacgatatgagcgataactgagaagtttcgaatcatctctggaggaaagcctgccatgtcaattgcaaccgaagtctttggaggatatgacctggtcgatgagctagtaagagacctctttccgcttaagtagatggagcatgtcgatgagcctactagaagtcttctcgatgaatagatggttgatggcgattgagccaagaacggccgtgctagaagagaggtatggaaggaagatgattgtgttctaataccaagggattttgtgacgcgtatcgattgaacggatataggaaaccccttcgaccgaagcatgtttgggatcatagcctgagaggaagccatccgagtatggatgatcgaggtcaaagaatgacattcatagggagagaatgttggtggtttccgttagggttagtcacctcttcaaatcttgagacgcattgataaagctcagtcgttcatcataaacgcataccctgacctggaaaccatcaatcatggcaagcacatcagctattcaaaacacgtactgtcgatattgcggaaaggggagtcgagaagaaggccgaaacttccaaaagtaggtcgcacggttcatggtgtatggtatcaaacgcgtaatatgagctcatcatccacgctttggacggttggattgtcttgtttcctaattaggtgtggagtctgttatgtgccagtatactgtggaaaggtaggcagactactctttgtctctctcgaacgaggtttggttgattgcaaaattttgactgattgtactttcgcgtcattttgctagaaatgccaagttgaccactggaagaatggtgaggcttgagcaccaagcctattcttttttcacattactctcagtcagcgctcactcttgttctccctatctcgataatctcctactccaggacacaaagccgaatgtgagaaagccaagaagatgagggaatccgagagcttagggagcaaccaagcctcggatgaagttccgctggaaggtttgtctctgtttctccatgcattctgaaactataagcgtcaacaggatttgtatatttcttgactgagttttcctctgcggataaacctgcacattaggtcttcacgattgggaagacgagaattctaacaagctctggattgctggactccatgcacttgggttgtacgacaagtctaactggagtcgaatggtatgaagcgcctcgtactctttcgctatgaagtcgtccacgctcatattctgataacgaactcgattcttatcgtcatgcgtgggtatatcaggataacgaggcgatcctcgtttcagtcagctacgatgcttctcgtcctaagaagttccaatacgagtccctcatcaccgtcgcaccagataaggtctgttttatctcgctctgcgtcgtgatcaccaactctattgttttgttctttccaatctgaaacagctctctgtcttgtcctctcaaaccgtctactagatgcaagccttgatgcctgtagaggctgatctcgatttctacaagcaaagggatgatgctaagaaacagttggcaaagacacagggcgcaggtgacggagctgccatcatggttgtcgtctgcgggtaggtccacctcacttgtcttctgccttatctagctctgcttgtctctctgttcgtctcctctcgactatttgctaacatctgcttattttcgtttgtacttcacagatcacacgcgttgatcgccgcgaggatctattctcaagacgtaatcaattctaaaaaggacccgaactgggaacgaaacttgaaacgattgttcgatcgagattagaatggggatagaagtttaaaccgaatacctaaacaaatgatcaccagtgtcggaaataaaaaaagagagacagcaatcatcggatatgtcatcgtgg

SEQ ID NO: 1065 - DNA, 43581 bp, Xanthophyllomyces dendrorhous
gggggggggggaaagaagaacagacaaaagttgttcaataggtatttagtgaggaaggggggttaacacaagatgtgacctgggatataagagacacatctctatccacatcgaacacagggagtgagacgaaaacaaagaagaagaaaacaaaaacaaagaagaactgatgaacggaaatcagaattaccatccaaggattctatcagagtcttttcaaccctcttttcgcgccggccttggtcccaccggcctttcccgctccactaccaacaatcttcacacctgatcctgccagctgtgttgactcgggtgcaacgacaggaacggtcgatcgttcgacattgactgctatcccagattgaaccggaaggagaggggtacctaaaggagcttgcgagctctgcgaggtgatcgttgtcgattttgttggttgcgcaaattctgtaggtgggttctggaattatatatacagtcgaaaatgttgagtaaagtgaagttaaagaggaaatattgagaatgtggagacacactttaggtgtcgcatggatggaggtgaacaaccgagcatgcttgcagcttcgaaattgaaatacaagataggtaagtaaacatcaccagtgcacccttcgagaacggagatatacttactagtcttcgtatgcctcgagaaggagtttgcctgcttcttcatcaagcgcggattctggattaggatagatgagaagacatcgtatgaccttaaggatcaagatggaaagcgatgcttgtttgtaagttattctctgaccgacgtggtgatagtacaagcatcacccgttgatagggtacatacacttagaatatgactttataggtagagtgacaggatttaaggagaagagatcaacgttttcgttagtatatgcaagtatacaagtaggccaagactatcctatacgaacctgattccaaactccggcttccatcctctcttcagagtgtctacacagatttcaccctgtttcgatacgttcggatggaatattctggtgacaaaggtacctatcaggagtaaccaacatcaaactcagtttagatccgtttttctatgccataactggtacatattctgaatgaggtcacaaagtctcacatttaggaggctgactaggatatgtcgatccgaattcgaatttgactcgaaagtaacctcctgtgtacggggttccgtctttgtattgaacgaaacgcttaaggtcagaacaaacggattaagttaaatcatcaagcaaagagacacactcaccaggcccttgaacccaagcggtgaacatggtgatatcctcttcatcaaccacaaccctgactccctccggaggttcttttctgagttgaccgagctccttagctatacggcgaacggaggatgctggaatggagtctgtctgtaaagtttaacaccagtcacatcgtaaaagacacatcagaaccttgaatgcaggaggtagagagctatctggatacagagtacaacacactgaccattttgtaaggtatgtttagcagaacgtagaagaattgggagaagcgcctagacatgaatggaatgttgagcgaacaaaccgagatatttgattgatatcaaataaacgcgtcgtccgagacaacataatatattatctcgcgtctagggtcgagattgtgattcctcgtacgcgcgttatcttatcatcgatgggaagaaggtaggctcaacatcttgaccaagacttcacgggtatagtgagcgaggtattgaggtcgatagcctcatgatactctgctatgaattgtctttctcgtctttgagaggaaaatcagacaaagattcatgttctccgtcgccgaaagaaagtattcatttcgaccaggttatccctttccctaatcccggcctccaccggcctccactttcctccactttctccactatgtttcaaccaaatcgtcctagatgcacctttaggtatctggaagatcgtcgggttgatattagaggtagacaaatcaatcgcggcgtcggacatcgggcatcgggcatcggtgacgtttatccatggtcaatccttggggaagtgtcgagcctaacccagagatgctttgaacaacataaaagaaagcactctgccaccatctcattgttcatatcgtttgcttatacttcttataactcatacacttattcaaaaacccaaatccaaacttaaacctcaacaaactaaactagatcactcagttcaccaaactaccaatatacaatcatgaaggtcttcattactggcgcatccggccggatgggtactcacatcatccctcatctcattactcgtggacacaccgtcaccggcctcgttcggtccccagagtctgccaaaaagatcgaggcacttggagcaactgctgtaatgggaactctgtccgacaaggatcttcttgtaaaggaggccaagaattccgatggagtcatccactgcgcgatgaaccacaagacgaacgacatgatggcatcttatcaagaggaaaaagagatcttggatctcttcgccgattcactcgaagggacaaacaagccgataattatgagctctgcaactggattcttggatcttggatcggacgagacctcagtagccagcaatgaacttactcctagagcggcgaccgagaccagttttttgggatacaaaacacgcggcatcaggccaatcgccgttcgactcgcgataaacacccacagtccagacgaaatccatctgtttgaggccatgctcattggtaccggcagaaagaccggatcaatcccctatattcgagatatcagatggtcaacttgtaacgcggaagacgccggtcttctttacgtccttgcgttggaaaaggccgagccaggcactgctgtccatgctcttcaagacaccgtcgaggtcaaggttatcgccgaggcgttagcaaagagattaggcctcaagacaaaggaggtcaccaaagatcaggttaatgagatgaatcttggatggttgggcagtcttctacagatggatcaagatgtcagcaccatttggacaagaaagactttcggatgggaaccaaagggtcagcgtttgcttgacgagttggactcaagcgatgacgcttatttcggaatagcttaagatgtttatcagtcgtgctgttgacttgctgtatgaattatctatctacaagatacgaatgtcgctttatcttccttacgaagactgagacaatttgaaagattgatttggccgtagttgttagagattactttggataaaagataatgtttgttcgtgatctgatcaatccctcacaaccctgatatcaacctccactctctcacggcatgagcacctctcagcatggttacttcaagtacacagatctcatattcaagttagttcagtccagatcataattccatcgatgttgacgttgtatcctgacccggttcttctttctcatctgatagctactctcccaacgctggcgaacatgttcggtcttttcccgtccataattgcacctcatctggttctgactacattagctcacttgatctggtacttacatggatacaggccgaagtactcaaggcattcttcttccatgaaagcttgactgacccaggttgccccttaaggaaagcagaccaggatggaatagagcttttcctcggtacatcataatcaccatttcttcgtgtatggctgctagagtctaatgccgcttgagttgaaaaatatcttggtctcgttaggcgaatggacacctccaggaaagtccgagtcgttcacagagaagcacttgctatttagtactgatcagctcggtatgtttgactgtcttcttttcactgtttggtgatagtgtataaggagaccgatctgatatattgtcttcgttcttgtagaatatatccgatattatcttctcaaagtcggctacactcacacacctgtttctctaccgcctgtggagatgttccttcacgatgattcattcaaatccatagttcgtctctcaatatgttttattggtttgaccatgctgcagctcctctacattgctcaccaaattttgtagacccctacgatcatctgtacgactcaagactttagaaaaattcggaagtctaacgaaaaacataataaagccgcacgaaaaggtagaacccctggatcccctggggagacactagggaagcagtttcctttgagagagctgcaggcggctagagattcatgggcttgggccgagaaaggcgtcggtgcatttctaagtattgactttgaggtgggtttccaatgcatttgtcatatgaaaccatagacgagttcttctgactctgttcacgaatatgatggaagcttagagttatgaatttgatcacagcgtgagttcatgtaagaaaattcttcatagaagcgttaattgttgctgatcattgatcctccactcactacagaaagtcactgaatggggctgggcaggctcaaggttcatacctcgaacagatgaaaccagcagtttcgcagaaaagattgagtcgtgagtgtgcttgccgtacctttgcgcgatgaaagtgaatctagactgaaagcgtactctctttgcgtccatttgatagtggtcatttgatgtaagtcagtatcgccggagcgtttgaaagtgaataacatagactatatgccagcattcaagcttctgacaccggtttattactgttcatcatcaagtgcgggagaacatctacatctgcaaaacaaggtctacgtagccgggaacagagacgtaagtgatgagcattgcgatcattaatccgaaagcagttttgtctgatatcctcttcctctatgtcttcaaagcattttctgtttggagaatcagagatcattcctacatcagcagagcttcaaagtagattgaaagaccttatcgagaaatgggaggattttgctaaagcgtcagggggacctttacaccttgtttgtcttgttttcatctctcatatgtctcctccgactcttggcttcgatactcaacattggcatcccaatttctttcgaaggtatttcacgatgcttccgccgatctcgcttacttccagacttgcggcatcaacaccgatcggattgcgaaacagcttgcgttgtatttgagtagagaatcagcgactgggttgtctccccgggaaattttgacggccgacacgaaagtgatgtacgatggttgtgtgatggaggtatgcttcgtcatcttctcgagtactgtctttgccctgaaacgctcagatctgatgcttcagatcatatcggctttcttgtttatggatacatcaggcgaaaagcacgacgaagcagaggaacctcaaggttatgtgtgaagtccggccctttccttttgatatccgtctttcaactctttgttctgagtacatactttctgacaatcttttcaattgtttctccttcgtttgataggatcttggaatccaacctgatcggttgcataacgctggaaacgacgcttatgtgagtccaatctgctcctctctctttctctttttgtttgattaactacaaagctaaaaacaatgtgtccaatcacaaacgcaattttttaattcagtttactctcgaaggattcaaagcaatggccaaatccacaaatcctgtccagttggtgagtcccagagatcctgcttttctgacgatttcttttcttttctttcctttcatcatattgttctaataaagtgtcttggttctgggctaccaattgatgtaattcagatgtacaaagaaccctcgaaggctaaagtggaagatttcgaactcatgtaagaataaaagcaaccgtcaactacctccgacaaggtctctacttcattctcgaacaacagtcgcttctaagggagaagctatttttcgtgggccgtgatggtagtcacgtgaaagaagatgaatgcatatatagaattcgaatctctcgggtgagtcagccaggagatgcctccaagtaggaacagaagatcgaaaagctggctgtcaaagaacataaatgcaaggggagtatgaaaaaggaagggggaactatgtcttcaggtagagaaacgacctctactggacggttcgtcgccatttgatgtatgccgtcaagttctcgaaagcctcatccgctcttgctcggagttcgggggtctttcgcttgtcaattcctctcgtctgtttcccagaaacagacagaaatgttaggctcaaaaaacctgattgaggcaaaagagagacgcgataacgaaagaagcagagattaaggaggaagaggaaagtaaaaaaagatcacttacgatccctctgaccctgcttacactcaacctcaatttctccaagaatccaccttgcctgaagacagcgttatcccaaggagcgttttcatccgcatatacgtcgaaaatagcgttgagaatgacgaccgaagattcaggggatggaggagtcgaagaagtaagttgatcgattaggaatgttcctatcgtctgtgtagcaaaatgaaagttaagtgtcgattagaagatagaaatcaattctatggactcatgatagtgaaaggagccgaggaaaaaaagtacgaactcgattgatctcgatcgtctcgtcagagacatcaacatctctcaaagcaatccagcccagtaaacccatcaacctacacctcaacccttccttcgtcttgcctgtctgtcctgcagcacttatcatgagtgtcaccttctccttcccgacgcttaacccgcctcgagtgacctgggcgaggcccatcaaacaaccagtacaggcctccagaagctccgctcggatctcttgtcctttgatttcgaccacatccgatccgtttgacgtcgatggggcgatcgccaaaagaagctgaaagaggtcgtcgaagatcggctggaaggcccgcctggtctctaaaaggaacgactgccattcgggactcgcatataacggggatgtggggagagggacgaagaaggagatggacaaaaacaggttgttgagcgcttcaagtgcacgaagatgaatcgtagagagaagagcggttgttggtggatggggagatggggaggatgtaccagtcgaagagttgatcggtaggaatgatagcaccgtcggtttggccaacgttagtaaccggtgaggaaggttgagagggccgaggaagttgagaagcaggggaggaagagggttggtgaagtccgagccaacatcagcatcgactgtaagagcttgttgatctctgccctgctcgatcaattgttccacgtccattcctccagcgccagtagcatctccatcctcatcggccatcatctccatatcttccggcaactcgtcatcatcatcctcagcggtcacttcttcttcttcctcatcatcatccgaagccccaggaattttggagcagattcccgtccagatttccaagccaatttggagagtcatcaatcgaccctcgataacctccaatccaatctcctccgccgtcttgtggtccgtcttaggatcttttagctgagcagcgacagtcgctgcgtccggctgtttgttttgtaaagaaaatatgaacaagatatcagatttgaatatcatgatatcgctattgacgggttaatgcactaaatgaagactcacaagtttagaagctagctccaaagcttgatccgagacgtcggacaggttcaggttcagaacttcgttcaagaggggcacgaaaagagtcttgtccaaatcctgagcagcgataggcagaagaggaggaagaggagaaatgtgtcggatggtacctgcaacccgtccaaaacagatacaatatggttgagcatggattgtgtttcaagggttaaatttgggtattctacttaagaaaaaaagagaaaccagagactgaccggcagccaataccttcaacaacaactctccttccttaggcccttcactaacaccatccatatcagtcttgccctttccttttcgtgattcatcttcggccttccatccatccttgacgacatcaaccaaggtgttgatccacgatccatccgagcgcaggtgcgtcgccgccggagggttatcgtcagtcaacacatacaagcattgtgctaagaaaggtcgaatagacgtgtcagacttcaggcggtggataataaagaatacacatatgacctaccggccgaagtcaccaagctcaggggaagcgaagcccgggagatgaggaaagatagaaggaagggagtgagggtcaagttgttaacagcagttagggctttgttggatgtctcgctatacttgtcaaacgtccagacatcaagaagaataagaaacgaattttctcaagtcaagggattcaagtgtaggttctgcctgaccttaagcaccacagaatggtgatcacgttctcagccaaatcgaacactaattttcgtttcgtgatcttttcaaggtccttctttgcgtccaaaggctctgaagagaagattgcattgagcgtttgagtgatctaagagtaaacaagtaaagcgcgcggaagagtttgtcagttgtcagttatcagttgtaatagctgatgacatagggatcatatataagtcgacttgcctgttggatgaggttagtcaagggagagaggacgcccttattgtaaacctcagcgcaaagatcgtaacctccgtcgatacacaaattcctacatgtatagagtatacatgagcgtcagcaaatacatgtcgacatatttgacacagagaagacaatccgcaagcattgttctttagttgtagataaagtacgtacctaagagctccagcagcttcaacgacaacatcctcaaccgagtctgtgagtcgggtgattaactctccaaccacgttcttaccctggaacagtcgcctggttcccggatcattctggattagattcgtcactgccgcacatgcccagactcgatcagaggcctctggtgcggaaagctgcaggtatcagaattcaacaaataaatcacaccatgtgttcattaattgagtaacaacgtctctccacatgatcagtatcagatcgagcacaatgtacaaattgttaggcaagtagaacgagcgaaacaaaccttggcgaggataggaagcacctgctcctgcttgtctttgctagctcctgaagcgagtccatgttggagatgcgagtctggtactcggacagggttatgtctagccttgcttgtctttttcttttgctgatgcttgcccattcttgatccaaaagttgatttggtggagggaatcagtggaaagatttcaagtgattgaatgaggaacttcagtaaatctttgagagcttatgtaagcagaaactctttaagtgtctagataagatttcatctactggctggttgctataacccagcaaactagcgcgcagagacaatatgtactcttgcgctcaagaatgtcattattctcctggaatggtcaagtctgttcagggagtgtgatatcggtttgtgaaaccccagtcttaatacacaatggttggcaggatgatctacgagagatcgattgtcagtgacgtccgaaatgtacagacgctcagaaagttagacagttgactacaaaattgattacaagatctctcaaactgattacagaaagtactacgaacgagttacacaaagagcacactcagctgcatcatctctgttaacatcgtctatccatctgtgctgatcagcatacacctcgagcagacttcatcgcatataccttatcaaaatcatggcatcctcaaaaacggcatcctcttcgacagatattccttcgaaccctcggggaattccggcagctcctttcgtggtatgttctgaaacgctcgcccgggtcgtcagaaattcgtcatgacacactcatcctgatcttttcatccaatttggacgtgtctccgctatcaataggccaatgtggaggagtacattggcggtccggatggtgactgtgaatcagctcttcgaaagttccaggaaatggtgtcgtatgtcccgtttcctagatatacaatcgattggcagctttcaagattttgtgaactgatccaaacgaactttcaatacatcttttatcgcttttcgtttcgttgtgatagaaaatatcgatacatggagatcaatctaaaccaacgaagaaaaggcctcgaagaaaagatccccgacatccgtaagactctctctgtggtagaacatctgatcagtcgacgagaagctgttagttttttcttcataatttataacaattcctaagcccaagccggatctgatatgattagactggccaccatctttgaaacttagccctcaacggatgacgacgagttaaactctgaggagggatctgaatcggcagcaaacaagccattagaagcgttgttcgagctgaacgatactctctactcgagtgcacagatcgaggagactggggatgtctatctatggctgggtgtatgtacttttctgcttgtgactaaaccctagatgcttgttcaacattggcctatctcctttcttctgtccgcatctataggcaaacacgatgctctcttaccctttggccgaagctcactccctactatctgccaagctagcggcggctgaagagaacctccaggggtttgtggaggatgttgagtttatccgggaacaagcaaccgtaatggacgtgaatgtggctagggtatacaacttcgatgtgaaacggtcagtcttcttcattattcagcaatgacctcaacggaatcctgacgattactcgctcatgacacaacagacgaagggaaaagaaagaggcgctcgctcttacaggtcagaccgaagaagcggaggaggaggacaaaaattaaaagattgttatctgtgtggcatcaagttatgcaagaggacaacatagaagtatacacgtattgaaaagttgaggtcacatagatgcaagatgattatgagtgacaacgatctggcgactagggagagcggaggtaccatcagaagttgcacctccttgctctgggcagcctgttcgggctgacatccatatgcccgggtataactcgatacgttgaagtcttaactgagtacgagtaattgctgattgcaaactataaccgaacactcctcttgtgtctccggaccattagggaatatttgtacattgcctgcaaaggtatcatctcttttgcccgcctgccttctcgcttatttttcttccttccttccttatttctcccagccttcattgttgctggtttgttttgactaccttgaatttgcctctcgctgtctgtctggagataggtgaggcgccgtcttccgaaggaggaatatagatacggaaacgaggttggttcagcagtctgaggcgtctttctgttgagaagactatttcattccatatttatcaaccattcagtcccgataagactaagagaattttgaagattaagacgataaaaagataaagagcttcaaaggagaaaagaataaagatcagaagacgaaagaagggaaggtggtattaatataaagaaaggaagagcaaaaaggagaatgtgggaaaaggagagtagggagaactacatatagtaacatgccctgcttcacatgagaaacccaaggttaaccagccgtttctatgagggaaagagaaaagaaagaatacagctacatcttgagacagacagataaacagagtagagagagcagaagacaaacataggatgtagaaggatgaaagagacagagagaacgaaggtgaaaggtcgcgacgacagggaccagagaatatgttcgtgtaggaacaaagtaattttgagagaagaagatagagctacaagatacgatcatatgatgaccagaggagagtcaaaaacgaaatgtggaatcaaaaggaagagaacaactatatcgatgcagaacacacgacaaaggaggctatggcgtggtgaaagaaacgcagaagatagtaataatatagtgaagaaactctcgaggatcaggtctatgaagtcgtatatggcattggtgaacaccaaaaacagacgatgctctgaattgatgtggcaggatgatgctgtacaatatttagatcacgatatcaaagacgggtcgttctcggaagtagaagacacaaataccggatcaatcccttcgacctccgtcacctccaccctaagcatcggacaacatagattggacaaaaaattagcctttgacctcaaatgatctgtgtaaagccaaagataggaatgactcacagcaccccaaatgaatcctctggcctccatcgacggactaggtgtatttctcacatcgctaattcttccctcaactccgattccgattcccatgtggtgatgatgtccagctccagcaaatgggctcatcatcccacctcccgagagaccaaacggagaaagtggtggtggtcgggacatggtgaatcttggtgaggtggcgaaagttgagaagttgaatgaaggcgttaggagtgccagatttgttgatgaattcggagtaaagaacgggagcgaggggagtgataaatgaggtgactgtatgcatgatggaatgtcagatgttacatgatggaacctttgttgacaaggaatagaaaacttacaatatttgtactgctcccgcctccgtcactttttgattcttcacccgatccatcaaaagtggtttctctttggagcccactaggctgtcttctgatctgaattggtcgagtcttcttcccgcctttcgacatatttatggtcgacatcgtcggtaaacggggtgaggacgaggcaggttcgatcgaagattctgtagagattgctggtcgtttaagattctgattgaaagctgtggatccctcggttggcaacgcctccggacgggaagaaccagagccggtgaacttcaaaggtgaagttggtgccggactagttttgagccgctttgaaagttgttcagtattgggtgatgtcggtcgagtgttatcgagggctgattgattagatgcatcggggtcggttgaattttgaaggcttatgtataatggtggaggagacgctgtagatccaggaaagttctccctagcaaacgatccgttcccaccgccgaccgtatgctgttttcgatcctcgttgtccagccgttcatcagagtcgcgttcttctctgtcttcgtcgtctttgttttcttgatcaccagatccattgtcctccttggcagacctggcttctttctcgtccatcatgacggccaataagcggagtccaccctcattttgcatcggagcggcagctgagtcttgaaatgcaccctccgacgctggcccgtctccaaagtaaccccccgtgtctgttctaggaggaaatgcaggcggtttcagatgactggatgaaggatttgaagcagctgagtgacccggttgagtgacagtcgttgagcctagattctgcgacgattgatcgagaaaagacgggggtggaaaattcgacggaagctgatgagcggcgtatatgtttggctggaagtacccatcggtataaggctggtagggcatggaagggtgctgagacggaggagggtagaatcccggtggatacacagatgatgtagacgaggtggatgaagagggatggatagcagggtttgcgaccaaggttgatgtggccaacccagctcgagcggctatggagttcaactcgtccaacgtttctcttagcttgtcgatctcgcccctcaatccagtgttcacctcttcgagttcagatacttttgtctcgagcacctcgagtttttccttctttctcgatcggaaggccgaagctgccaacctgtttcgctctcgccgtcgggcttttgggtcgaccgtgcctctgttgaaagaggaatcttgattatcaaatgacttggcggatgatttgttgtgttttgcgggagaagaatctggactagatgaaccggatgtgttgttggcccggctagtattagatttaggtggcattgcggctgttgtttggagttcggataagatacgttgtccgtcttgttgggttgggcagagcttaaagtgatattatagcgtttttctctgttcttttttccgacaatgaggagagggagaaaaaaacgcgtgcagagaagagttaatgtttcaggaggatatgtcatcagcagagaaatcagttgaagaagggagaaggaggaccatgaagacaacagcaaagcgggaatcagcataaaacacatctctcatatgattgcatcatcgattgatcgcgacggaacgagagtatagtttccacggacagggcgaacgggacgtaccagatgatgtaaaaaaagcaagcttgatcggttttgcaggtcatccgagatcgtttatgtcttgcttttggatgatcaagatcaggacagggaagaactaggaaaagctattcttcgagaaggtcaagagtcaataggatcaaggggattttcggctggatgggtcgaatgaggtgacagagtgaagggacagcgaagagagactacgaaggtgaaaaggtacgtcatcttgctgtaataattgtaaccgtgtgactttgtaaccagatcggcagatgatccaacagcatcaccacaaacgcattctgctagcgatcaataagacatcagacatctagatctaacgaggctgtacaaattatatagtgatatcagtaatataagaaaggtagttataaaaacgaggaagaaaagaaaactcgaaacatcaagatgatcaaaatgctcagagaggcccagaaatggcagccgcttctcctttggcgataaccttctgctccaactccgctggcacgccgtcttctgctttatagcctccagagagactaacgccgatttctttgattgagaaccaagctggtatcgttgagagtccccacacggcgacatcgataccaagcgggacgctgtggggtaaagtctttcgagcggtgatgccgtatccgacggccgaaccggccgattcgagtgctcgaagaatggaagacagtcgaccaatgtcagattgatcggcggatgaaatggcaccgatatagaaatagagcacgttctgtgtcacactgaacaaaacatcgataatatccaagaggaaaaggccaaagtttagattgatacttgggatgacatatgtaaagtagagttacatacctcgtgttgagagcatagagaagatagaggcagtacgctctggcaaaatcggggcttccgaagtcaagagaaggagctttggctctcttactgaactgaatctgaatgactagtccccaaacccaggaggcaagcatcatggctgtgacgatgaggaaagagaccctcgcccgagtggcaagggtaaacctctattaacgagaggcaagagcaaggagtgagtgaatgagaaacatctcgactttgcgcttgagacaaaaagagagcgaaacgtaccctagagtcaaggaaaataccgagcataaagttgacagagacaccgagaattgcgctgaggagtgaggcaagagctctgaagtggaaaataataacaaaacagtgcttagttccctggatgtcgagaagaccacgcaataaatcagacttacctggttcggacagtgaagtagagagacaggaaagtggactggtaaggacccatgagggacgagtagaatgcaaaggcagatctgtatgttttgcacacaatcagtatatatcgtcctaacacggccatgaatcgaaatcagaagccaaaaggttcactcacagcaaaaggacttcctttcgaaggaacgtcttccccaccagcctcatttcttttttgaagccttccttgttcgttccaacgacgacgggagtaccatcctcccgttgaactttgtgtggctcagatagaagtaaagctacaaacggcgaaaggcactccagcgcgatgaacaccaagtatgttttggaggagaccgagccggcaactttagtcctgatgttgagtgcggtgttgataattcctccgagaagttgacctccagacttgaaggccaaccagacagccaaatagattcctcgctttcgggcctcggggtagccaagaataattgctccctcaacagaccagaagattccagcggagataccacaagttgtagctccaaaaagaactagccaaacggttccatggattttattgacatagagaccagcggcatctgaaacccaatcgaatcacacggcacagatgaatatagataccacgtgagaaaattagaagaagagcatgaacatacagggcgcgtaaccaatgcagccaatggccaaactccacttgagaccaatcttgttcgacaatgaagctgattagtgaatagagcgattgacatggatcagcgcgtgagccattggagtaattgaaacaagaatcgccacgactcacttcccatagagcagaagaacaccatgagaccgaacaccaaggcattggctgcattcacaaggtagggtgattgcgctcctcccgcaccagtcgcggacatagcgttccatgttcctggcgacaagaaagaacaaagaccgacgatgactgcctaggatagttgtcagcatgtctgatggtaacgactagaagaacgagggcaaaagattgaaactcacttggaaaatggtccctctgaaccaccaagtcttgaccggcgcggcccctgcgccctcaaccaaggatgcttcgttagaagtaggaccagactcaagttgctttttctcatccgccagctcatccgacgatcgagtaggagttgggctagacatggctcaagaaagaaataaacgggagtttattgaattgtaagaaagaaaccatccggaagaaacagagcttctgaatgtcatttaagcaatttcaccatggattttttggaagacagaaacggtacataagatgattagcacgccatataaaagtctttgaagatcattcggatgataccgataatttgtgtgctgccaatcgatggcaaacgacggcacccatccatataggcataccggcaaatctattgcgctagttcgggggaggtccgtcaacattccaaagatctacggcggagtggatgaatacaaagacagtaacaagaagaaaacctgaaaggcgtgcgaaggagcgatattacttcttatttttcctcctttccctcgcggacgataaccggtttgagggttgactcttttggccgatccgaaattcggcgaatttctacttcaaaatttcaaatgccaagtcgccgtttgttagggttacatttgaatagcacgtgcatgacatgattagcatagctatttcatcgtaagttgttacacatgttacaatacgatcgcgctggcggtctcgttgggatctcttctttctttccttgttcgttctagagatactttcaagcaacaccatcaagtagaaagaatctaaagaatcgcccctgatgtgagtgtctcatacgaacttttcaacttcggttgaagcatcggataaattactcacttgagggcgcatgttttcacgaacagggcggaagtaaagtaggtctttatcatttggtttgttttgtcaataggttaaacggccatccaccagacaattgattgtctatcgctctttttctatctctctacctatgtgttgtagtgttcaatcgccagagatagaggctctgaagttacacaaccctcttccttggtacctgcgcctatattccgttccatttttatctctttaccctgtgttggcatacgcgtactacgtcaaggtcagctctcaattctttttcaacgaaaggtttgggctgactccttccgatcccaacattagtatgattcctggcttcaatccgaagaatggactttccttgcttgtctcactctaggagctggacatgttcttagtttcttgttgacccaatggagcattgccatgaaagctcgacttacctgtgtccctgtaagcctagatcgtcttgatttgtctggcaaaccattgtcctctttcgtctttgacctgatcattcatcgatcttctgcctgatgtgtatcggtgtggcacttagtcaagcgatcttagaactgcccggcttattcaagttgtcccaaagaaacatcgcggaaagggagaaattataccgctccatcacaaaatcacgtcgatgtcttccgaacctgtccatacattctcctactcgcgagacacatacaactacaaccctgccacccagacgtttactcctttgccttacccggccgatgcaaaccctccactgtcactttacaaagacacccagggtctcaccgccgctcctggtccgacgaatgactcggtacccacagctctcgagaactatggaaagaacttgtgcgagattccgatccctaagttcaccgagctcttcgccgagcatgccgttgccccattctttgtcttccagatgttctgtgtcgctctgtggtgcttggatgaatactggtactactcgatcttcactgggttcatgttgatcgtttttgagtgtacagtagtgttccaggcaagatcactctcgttttcatgcacattttcggccggctcaactgataagatcgcttgtgctcttcgttcccacacagcgagtccgaactttgaccgagttccgaaccatgagcgttcctccataccctgttcaagccttccgagacggcgagtggagtgaagtcaactctgaccagcttgttcctggagacgtcatcagcatcggtcagtcaaatcctccagtctttgctctcatttgattgtctagctcatgttgcttctgataacacagttcgaaccaagcccgattccgcgctcccctgtgatcttcttgttctctctggaacggccattgttaatgaggccatgctttccggagagtctacccctctcctcaaagagagcattgagctccgagaaggatcggataggctagacatgaacggttcagataggaacaacgttctcttctctggaaccaaggctttgcaagtccatgagggagatggaatcaatggaaagaaagctcctgatgcagggtgcacagcggttgtccttcgaactgggtttggtaccgcgcaaggtcagcttgtcaggacgatgctcttctccacggaggctgtcaccgctggaaacttggagtcgttcatcttcatcggattcttgttgatctttgccattgctgctagtgcctacgtctggattcatggtgtggagaagggtatgaagaagtccaagcttcttttggattgtgtattgatcatcacgtcggttgttcctcctgagctgcctatggagctctctatggccgtcaatgcatctcttgctgctctttccaagtacgccatcttctgtaccgagcctttccgaatttcgtttgctggtcgagtggatgtttgctgcttcgacaagaccggtaccataaccggagaagatctcgttgttgagggtgtcgctggtcttgacaaatccgacctcaagaaattgctgcccatcactgagaccggccgagagacgactttgaccctcgcttcatctcacgcactcgtccagctcgaggatggtacgattgtcggtgaccccatggagaagaccactttggaagcactgggatggcaggtcggaaaaggcaacacgatcactcctaagcctgactatgagaccgagcacaaggttcagatctcgatcaaacgtcgattccaattttcatctgctctcaagcggatgtctactatctctgtcattcctgaagctaaaggcggaaagaagaatctcgtgtctgtcaagggtgcgccagagaccctcaagactatgtacgctcagctcccggagaactatgatgagacttacaagtggttcaccagaaggggaagcagagtgctcgctttgggttggaagaacttggagggtgtctcgacagatcaggtaggtgttatcattggttttatctgtataccattaagagaacactatattcatgcgatgatttttatcctttctgatagatcaatcatattcctcgagagaagatcgagggcggcctgacatttgccggtttcctcgtattccactgcccattgaagcctgacgctgtcgaatcgctcaagatgttgtctgattcttctcaccgagtatgtcctcgctttgctatcaagcttccaacgcatgttgctcactctctgattttccatttgtctgtctagtgcatcatgatcactggagacaatcctttgactgccgttcatgtcgctcgggaggtcgaaattgttgatcgagatgtattgattttggatatcaaggagggagctacctcagagaagggttcgttttgattttctatcatcgttgtcttgggaaagagcgtgttctcatctttttctttttctttcctctttgattccttttcgtgtatctttcagaactcatctggcgatctgtagacgagtcaatcatgatcccagtcgatccgtccgctcccttcgacaagcagctctttgctgattatgacatctgcatcaccggaatcgcgcttaagcaatatgagcatcttccatcttggcacgatttgatcctccacacctgggtctacgcccgagtctctccggcccagaaagaattcatcttgtcgacgttcaagaacatgggatacacaaccttgatggctggagatggaacgaacgatgttggtgcgctcaaacaggctcatatcggagtcgccttgttggatggttcggcagaagatttgaagaagattgctgagcaccagaagaatgagcggctcaagaaggtttacgagcagcagtgttcgctctcagctaggttcaaccagcccccgccgccggtaccggctgctatcagagatgtttacccagagctcgtcaaggcacagcaactagctcacgcaaaccagcaaatcgctaggaagaagaaccctatggaaaaggtttgccactctgctgattcagacctgcaagtcacctaaagaatcagagctgatttgtcaatgaccttttacttacttttgcggcaatgggttggtcagttcgatctggcctctatcaccaataagctggccgatatggatgatgagaatgagcctccgaaaatcaaactaggagatgcatcttgtgctgccccgttcacctccaagctctccaacgttgctgctagtatgttgccacttggtctctactttggcttttgtcgatactgtcctcttacatctctattcgccttttcttctagtcacgcatatcattcgacagggacgatgcaccttggttgctaccgttcagatgtacaaaattcttgcgttgaactgtctgatcaccgcctactccttgtcggttcagtacctagacggcatcaagttcggtgactaccaggtcggtgtttctttcctcgagtgtggcgaagacgaacttgatactgatctgtcgacttttgatcataacagatgtcgatcactggaatgttgatgagcgtgtgttttatgtgtatctctcgagccaaggtctgtttagctaaaatcaaatttcatatgttgaaacttttaatactgacgattgatgagagtaattttcacatcaatacagcccattgacaagctttctcgagagcggcctttgggcaatatcttgaacatctatgttttactttcgatcctcctgcaattcgctatccacattgttgctctgttgtacatgaccaacctgtccaagtctctcgaagagtaagttattgcggagtttcttcacagtatgtgctgtaaagattagctgacttctgcattggtttgaatttgatgttcattagtcgaggacctattgatcttgacgccaagtacgagcctagtctgttgaacacggcgatctacctgcttggtctttctcaacaagtctccacattcgccatcaacttccaggtgggtattcacttagctttgttcaacggcttacagagtaacaggttctgactacatatctactctttgattgcttgtcatcagggtcgaccattccgagagggtatttctgagaaccgaccgttgttgtggggattgatgggtgctgtcggtgtcgcctactctggttcgaccgactttttcccggagttgaacaagtggcttcaactggtggacatgtcgcccaaggttcgtcaaggtgttctcatttttggcgtttgaaacagagtgcaagtgactgatagtctgaatttggatcatctctgacgcacatagtttaaattcatcttgacgaccgttatgttggccgactttggaggatgctacgtggtcgagaagggttgcaagtacttgttcgccgatctcgagccaaaggagctcatcactcggggtcgggaacgacgagagaagcggagggcggcagaggagctagcgcttgaagccaagaaggatctgtagagagaggaggattttgttttttttttaattaaaaagaacagagagaaagagagttgtttctgatgtctatacgttgttaaagacgatttgtatcctcattcctctgatgtgttatacagagcatagagcttgctctctccatctttgcccctaccttatatgagttatttgtcccttttattttcagaaacggcatatcgttcctcaggcttttgacacaggcgcaacttaacttcactaatatttgttaatccgtggagaaagaaacggagaaaacactcatggatctccctcctgcactgagggtgtgggcgaaggcgaccctcttgggttgaatgatctcgaccaaatctcatccttcgggtcaaccctttccgacaagagtccgagattcctcttccaattgtagtcaatctcgctgtggaccgtctgtcggatctgtttgcctgtcgaacggacatatcgattgaatgtgatggattcgcagtgaaggaagaggctatcgggcggtaggacaaagaatgctttgcgattgaaaatgggatggacgttgttggtgttggagaggtcgttaaattgataacggccatcaccaaccacgggtgcagagaggtagtgggaagcgaatacacggagttgatgcttgtggcctgtgataggaaacattcggatcaaggaaacgttcaagtcgacctatggatgtggaagttgtgcgcgcgaaacatgaaagatgttactacggccaatacttggaatggaaggaggaagccagaagagaaaagaaacctgggaaatattcacgaacattacctcccaaccactcccagcgtgtctcgacctctgccgcattctcctcaccagatctcgctattgatacccgaccattatccgttcgaagccatgatttatgatttttgggaacgacaattctttcgtccggatacatgtacctggacacaagcgcaacatacgctgtcgaaagagagacagaaaccaatcgaaagactatcatcagggtccctggccaataggaaggaaagaatcgaaacattgccgagacatacatttctctactgtctttgctttgaattggttggcgaggtccttggccttggcctgattcaaagccaggatgagtggtcctgttgtttgcttgtctagtcgatgcaccgttcggatctggtgatcctcggaaaggtccaatctagttcgaagatcctcaaagtgatcttccatggttgtctctttatgctacgtacgtttcgtgcggtacgacagaaagaaggttgtacaccctatgggttagaaaaactcgatgacctcacaagtcggcttctcggcaaaaattcaaggagaaatcaggaccaacacctcacccactgtttttcggccagggcttcttgggcagccacatccacaccagcctgtgcgaccagaccagccggcttatcgaccacgcataggccctgttggtgatgttcagcaaagtggtgtctctgatcagcccttgaaaggtgtcgaatgttgaacgtcaccgaaaagcacataccttgtcgctgaataagatcttgagtggttccttcgctaaactaggccatctgagtaaattccttgtgatggacattatgtggaagcagcagctacaacgacgaagggttgtaaggccgagagaacgatgggagaaataaggaaggaaggaagaaaaataagcgagaaggcaggcgggcaaaagagatgatacctttgcaggtaatgtacaaatattccctaatggtccggagacacaagaggagtgttcggttatagtttgcaatcagcaattactcgtactcagttaagacttcaacgtatcgagttatacccgggcatatggatgtcagcccgaacaggcagcccagagcaaggaggtgcaacttctgatcgcactttgtttcctaatgagtttgtagtgcgtattggatgacttcattacagtgtttttgcagtatcgcctattacacaatcacagtcaactttacccagattcgtagttgtattcggtcgactgtgtgatctttatcgctcaccttctctaatctataatctcattgaaacactccaactcaaatcacacactctcccttctatcacttctctacagctttcgttctcgtcttctctatcccggactgatctctcaagatggccgatctgttaccatcaccacctcatccatcgttacaatactcttcgctctcggtcgatcagttagaagcccttcggtcatcaacctccttggcgcttgttcacttggaggaaatgttaaacatgttacattggggtggagagagtgcagttgctggatggtgagcgtttcttccacttgaacagctataaccttaatgtcctttttcttttccttcatcatctcaagtagaaccaggtcttgaaagctgactgccattatatgttcctgtatggatttggatcacgcacgatcactatttctcaacaggccaaccttcctatcatcataccaaaagatgcaacgactccttgcccagctaaatcatcatttgtctgttggtcagcacgcatcagatcatcatgatggcctgcttggctcatcgataccgtcatcatccacatcaagagggagtcttttgaatagacatgtggttcatccttacatacctgccgatgcagctgctgaaccttggttacaaactctcctaatgaatgaggtgagcacttgtatcctctacttttcaaactaagacgtccactcaatcggtacacatcgttcggctttgtatcttcggccactcttgctccttcttacacatcgtcgtcaatcagccttcaacagcagcaacatcgtcttcgacagaacatttgccagccacaggtacgatcgaggaacatgaagcccgaaggcaacgcgcgactcggatctgtggtcttctcgtcgagcaacacgactggcgcggtcgggtcggagcagtaaaagatgaggatgaggacaatgaagatgccgaggacggcgagggtgatgaggacgaggatgaggatgaggacggggatgaagacggagacgggaaagcaactaacgctacggaaagggaagtaacagcgagtcaagaaacacagctacttgggaacaagaccaaaccgggtgacacgacagagcttgctgtcgctggcaacggagaagcagatgcggaaggggaagaggagggcgatcccgagtcggataccgtcagaaaggatgaggacagcaaaccgagcgaaaacgtcgtatcggtggatgcagagatggttgatgtcagacaagaggatgagaacgttgacgaagatgatgaggacgacgaggatgaggacatatttggagacaaggatgatgatatgtcaaacatatagtataggtttgatcatcgattcgagtattctcatgctccacaataagcgcaagagcatctttcacgtccaactgagcctcaacctaaaaagcatcgcgaagacttgtaaagaaccaaagctatgaaacgcgcgaaatctttgccaagttcaaagtttctgatgggacattcatctgacgcgtccgacaatccacaaaactgttttcatcaatccaacaaccatcatatcctttctcggttttatctcattccataccctccatcgttgattctcaagatgaattcactcagcccggtcaacggttactccacctcgtctggtcagatcatcattctcagtttccctccaagctacctctccatctgatcttgtccttttctcactttctaactcacagacggtctagaatcctcactgtccaccctcaagtcgatcgcgtcgactggatatgtcgatatcgaatggtctattcttaaacaagcaatcaagtcaaaacttcaccagaatgtgcagctatatctcgctcccagtactcagatcagcgctcagcttgagccttcgccatttccaaaatcttcccctgtcgttccgttttcagaggaagaagaagacagagaaaggtcgagcagaagcccggccgatgtgacaacaaattcaacaaacctgtcagtaagaatgggcgaatctgcgggagtagcagcagataacggaacggctgaaaagggatcgaatgatgtgtcgttaagcgaacgactaggaccgatagacgtcattggtggacgaacgttacctggaaaggtcaactcggaagaagcagagtttatggaatccagggtgtcgaggttgttagatgaattcgagtcgtatgtttatcattcttctgtcttgacaattcgttcgagagtcgaggttgcggtctccgtctcttgtcaactcggctaaaattccatcctaaatcgtggtgatgattcaatctagtgacccgccgttcacgatccagcgcctgtgcgaaattctggtagaccctcaatcgattcattctaacctaggaaaacacatccgagcgatcgagcgcaccctgctcgtcacatctacctttcaacctccttctccatctaacaacaattcgatttccacctttttaacaaaaacaaatccatcaaacgtccccggtcatcctatctctccgagaaactcgtcagctccattgttctcaccaatcccgtttttggcgcttcaaatgcctcccccacaatcagtcgatcccgtctcgtcttccacagggtcgaacgaaccgaacgagatggttgttactcgaccaatgagcccactcagtctagaacctagatctgatcaagagatgaccgatatgaaagaatcagcagttcagccgtcagttgaaaccgttcggccgtctatgccgttgggcttggcgtcacgttcgacctccacaacaccatcggggttgatcgaacccgacgaactcaaagtggacgagttggacgcgggtgtcattcctgattctcttcctcttgtttccccctctctatctccatctccatcgaaaccgtctttgacatcgacatcgatatctgaactaccaccatcaccaacaacaacaacaacaacaacaacaacaacaacgacgacgatgtctgcatcatcgacgatatcagaaccatcatgcaacgttacttccgacgaacgggccgagcaagagaccacgataggagaccatcaaccagcaggctcaaataccaatcaccgtcatttcttggcaaacaggcccgtcgcgctaacctcgacgacatctattcctgatggcccgctcttggctggagccgcctctggtgcggtcttaggtgccgttttaaaggaagactctgtcaggcagaggtcactcggagacgatgacgaagataatgatggacaagcggaagacgcaaagaaggtaaaactcgatgaggaacctggaacggagagagcggatggaaatgcgaaggaggaggaggaggaggagaaattaactagagaagaagaaagatttgagagaagcgcgtcgcctgctatcgatccgttgcgaatcaagtcgacggaaggcgaggaagttaaacgggtctgagaagacagagacgagcagagatggatcggcgttcccttatcttccctcgcctatatcactcttgcgttcttgaaactcttgctcaaatcattctgtattcattttgatgtactgtgtggactttatcgatgtaaaaaaagagaaatcccaccaaggccgatcaaggcgctgaaacgttcggggtattcgttggctcattcgtatcttttacgaattttctttaacataacatgggtttgattcattgagtacaaaacaagaaacgccagtagataaaagataagatattcgaaaatctctgctcgagcccaatagagaacgacaaggttgtaaagagagggagagaagaagcaaaagataggtgaagagacgaggagaggcataggcaagaaagagatattagaagaaaacccaaaaccattgtaccaaatagagaagaagaaagagagataagagacacatggaagaagaaaaaaaagacctgacaagatgaaagacactagacttttgttacaatcgtagaatatagaagacccggaaaaaagagtatatgtttgggaagaatgccggatgtaggataacaaggagatcaacgaagggccaagatgacgatgtcgatgaacgacgcgaaacgaatgatgaatggtgttggcgttatcagaatcaccaagacctgtgccggacaggtcacacccgatccaattgaatgtgaatgatattcaactcgatctgaagtggtaagaccaaactataaaaatatatgcaagaacgaaggaggtcggcaaaaatatttaaactctgaaggagaacgtaagcggcaacggcgtccttagaacagaatggatttggcactcccaaagaggaaatgtgaactgtttacattcttttgaccgatctatttggtcaagattgtcgacgggcataaaagaagagaagtgagttgacgtgcgctataatgaatgagcacaaagaaagacacatacgtaaactccatgcaactggacctttgtgcccactcgagggatctcaaccttgttaagcgcgttctcatgcagatagatcttgactttgagcggtgcagctgtcaacatgtcttgcaaccagaatagaatcaactgctttgcatctatagtgaagcacgcatagagcaagataggagatgatgatggagcagaaggacacgtatatcagtcaagttgtgcagacaaagcagaactcaagaacatgtagttttattgagaacttacggccgtcttggacatcaatatatttgtttacgttgccgaccaccatgccgaatgtcgatattggtgttagtcgtgagatcttcagatttgccacatctcgaagatcgacattgaggaacgcgctcccaattccagccttgattgggtaaaaacacatagcaagaaaaactgatataggcgatacctcgaactaagctcgcgatagagagtgacaagaaacccaccttatagttctctcgatcaccatccaacgcactaccaagcatctgtaggaaccactgctcggactcgtccatttcttcgggcgtgagcaagcctacggcagctttcaatttatcttccaataatgcaggtccccagcattctaaataattccacacgattatcctgtcgcgctgagagagttgcggcctgagtcgggatacgtagtgatctattcttgaacgtagagagatgctcacagccggaaaggtcccttgaagtgaaggttgaaagatcggcatatttcgaaactgagttctgtaaatcttaggatcagtctgtgcagatttggatagagccacaaggtcggacatggttaaaagagaagcaggtggcgtggaagagatcaatgttgacgaggaagatgaagaagtcgcttggttgatagaagaagaagagggtagggatagtaattctgatgaatcaggagagagaaaagttgacggattgactgtacgtgtgctcaggtcggacattgaccgtgtagatggttttggtctgacgagtgatgaatccatcaaggaggccggatggaatatcgacgccgtattggcatactgaacggaggtctgatcgtgtgagcctgtcttggcatcagtcctcgactgatgactactagactgctcaaagtagtcaagatctgtggtttctgatgaagaagttaatggccgggtggatacatggggtttcttcagtttggtaggaagtccgtacgcgctggtagccatggaaggaagcttttgaagattttgttttgcccaaaggacgtatccggtcatataacccaccgtgggatggactccttgagaccaataaccagtgtttgccttgggataatctgcaatgtatcgaagtgatcgaacattgaggttccgcatgatgtgaatataaccacctttacataactctatcaagtcatgctttgtccgtggcttcaatggagccaactgacgggccagatggattggattcatgtcgtaccgcagagggaccgattgaatcgtattgcttctacagctgatcgactgagctgtccgacggacttgtttctggacggacatctctctgatctgcttgtgctgtgggtgttgagtgcaaatcaggaagcgtagcttggaaagtctcaacgccgctagtctaggcgacctcttggtcgagtcgcgtaacaaagcaggttacgcgtcgagatagttggttacggctgaccaatcgtcgagcttccgcaaccagtataacctctctacagtttgctcgtccacatccttgaaagtcatcgctgtaattgagagtgttggaaagtcaccacaatctgcgcactcatcgttgccgtggtcattgcgctgaaagcaatcttccaagaatctctatgacatgtctccacgcgctataagtctcgtgagaatatcatattcataaagagttttcaacaggatttcctttctcttttgattctcattcatcgtcctccatctcgatctctccttcctcttcgtcttcatcctccaaatcgaattccccttcatcatcacttccttcgtcgtcctgtccatccgaatcatcttcttcaggtcctcgctcttcacgggcggcctagtgtatagatcatattcgatggtcagattttatcttcacaaaaattcaatggcaacaaaacaaaattcaacagaactaaccttctcaatctctctcctcttagcatctctgaccttcttctgcaacttccagaactgtcctagtggagtactgtccaccttgacgccctccaagaatccatcgacctctgatctgtcgttgggtgcaaactctaccgactttctcttttctcctacccatttggcgttcatgtcgatcttttccagcaacaccttgaacaagccagaagcctttgcgttcttggttcccttcttgacaaacctctttagggagctaacaataggaatagcaagttcagggaaagcaatcgaggtggaaagctgagcctggtgttccaagagaatgaatgcaatctcctcggctagtccatcctggtagatttttgttcgtgggtaagctgtaggagcacggatgacatattcgaaatcgagaggcgaaagtgtagacggttttggtttacttgtgaactcggccgaagacaacggctcaagaagggaaggagtcaagggaatgtaggtgtttgtgtgagcggagaggcgaagaagggatcgaaccacgtggaatcggagcgggaagtaccgagacgttgggatcagtctgacgtggcgttgattaaggtggcgaaagcagacatcagttcaatcatcgacataaatgacacaaactgcgcatacgtaccgaatgacaccaagagtgatctgaacgagcgggtagatcaagggctgaagttcgctctcctgcccacctcgggctagtcgagcgtccctgctgcaagcagtcgacatgaccaaacaccagaagtcgatacagtgaacaaattgccagttgtacacagccttgtaggcatcctaatcggagaaacaaagtaaggccagattcatcagcttcggaggacatatagaaagaacaagtggaaggacagagagaaaaacaaacaaaccttagactgtactttgatcgagttcctcaagtggacagcaagctgtcggatgtatccgaaagcatgttggtaagcggtcgccggatcgagattgtagatctccgaggcagagttcttcatcaggttgatagcagggagcgtgtggacggttgtctgcttgcacgatcgaaggaaagtcaagtacagaccctgtagagtgtaatttccgatgatcaagttgataagtcaatatttgaacagccatgagtctttgagaaattggaacgacagaccttgaaggtgatctcacgaacaccctcgtccccgttctggacaagctttcgaatagccaagaaggatgcgattcggacactatctgaagcggaggaccattgctccaaaagcatctacaccaatcccaacaaacattcaaatcggatgagtaccgtgtgttgtgcatccatgcaaaaagacgagtcacagagacagacaaatacaaaccttcaagaggttcttgacgatttttcggccaccgacgatccaaggaaccattgcctctgcacccttcaagcaaacctttagcaatccacctccttctttgtcgtctgggagctgctgaacgaggtgcatcaaattactcatgtaactcatgatcatcttcatcaaagccggcgggggctgcttggtgagcttgaacttgcccgtttgagcggacaacttcaaagggagatggtgcgagagaagctgaggggtgtagtggagtgtggttaggataattttgttgaagactgtttcatgacaacaacggccgtcagcttggaaccaacacaactgataaaagtgagacgtggcacagagaaaagaggctaaccagaagcgtcttcaatctcgtaggcaaacgattgcgatgccttgtccgaagcatcagagttggagtaggcggccgctcggaaagccaggtgtaacctcctcaaactcttgagacttcgtgtctatggcgatggattatcgagcgcgttagcaactgaagtccaggcgtgttttagtaggaaagaggacaaaacgacaacaaggtctgcttacctcaagcatgttcttctgccatcccttaagcatatccaaagtcacgacctccatttcaccttgttccttcttggccttcttgccattgagttggcccaagatctcttcttcttcatcctcatccgaatcacctccctcaaactcttcatattcatcttgccctaaaggcgcttcctcctccttcgcctttcctttagaggcagccttcttctcggcttccagcttagcggccctcttcgaggcctttttcgatggtggagggggggtgccagagttggaagaagtcgaggcgccaaactcgaggagctccttatcgttctcctgtaggtacttgaagaattcgggatccgttttggagagctgagaaagagcgttgacgtgagacttctccatgtctgaaaaaacaagaggtagtaaagatcggtttcatgttacatcgtagcgcaatagtataaacagactggaacagcttaccatcgagatcatcaactccagcgaaatcatcatcggtatcgttcaaatcctcttcgtcgtcatcatcagagtcagccttgttgggagctccttcgtcctggatcatgaaggtaagatgttcataacgtcaactcaaaagatctgactgctttgtctaagcttcaacgctgaaacggatgagagtcacttacgccagagtcctccatgaaagcagctcccatgatgtcgtctacgctctttgggttcctcttcttgtcatcttcctcagcctcactctcctcctcaggctcgtccacgtcatcaactcccttcttggctccaaactctctggcctttccggccgcccgtttttctctgccctctatgagctttcgagatttttggaaagatcttcgggaagatatgacctctttgagtttgcccgttccggcgaactgtttcaaaaagcaagtgatcaaggtttagagaatcagtcatgaattcttgacacgaaggatgaggctgaaggatcaacctttttgaaagatttctgttgacattaagcgcgacggcaagcacaacggaagggaaaagtaaccaagaggcgccaaaataaaggagtggggtcagaatcaattgcacctagattgtgtacctatgtctttctaataggaactactgaccttggccatgatgactctatctagatacagaagcgttcgtaggttgtggaatcaagcagggaagaaaatgttgtggcccagatgaagttttgaggtcaaatatcgatgtggcgaggcgaaagctgtgcaacggatttccccggcctgtatgccttgtgccttgccttcttccgtctgatctgtatcctctctccatctctcatctctcttgctttccaccgcccatatccataccttcttcaacgattgatagcatggatactttctccgctcaaggagggtatcctcaggtcccttatgggtttggccgtgagtgacggctgtccaaataccgactgtagagcctgtgctgatcatcctcaatcgaatctctcctgtcttcgatcgatctatagaagttcgttcccttttgtttgtccacattcaaatgcgtagtgtttgttaactaacactgcagaatttctttcgttgtagcaaacacatctgaggggaatcacaactggccgattctcaaacttcctagggggtcactactcctctcacaacctgtcctcggtcctatatcttgattcgaccgatgctatcacggctgtcaagatggaggtctacactcctcctgccggaacaaaacctacttttgaggaagcctcaaaatctaagtataaaccggtcaagaagggcgagtcgttcggccctagctggagcaaccattggttcaaaatcgccgtcaaagtcccaaaagagtgggcaaaatacaaacgagttcaatgtaggctgaaactttgaccatatacaatctcgatcggagggagaactaatgaaacacacacacttgggctcaatcatctcgttcagtcgaatttgatcccggatgtgaaggattaatctatactcgtaagcttgtcaacatcaatcctgacttgatcgccaatgctctaaatgccgcgctatactttccatacaaaatcagcccaaggtcttcctgtccatgccatcgtaggaggctacagcgggcttcggcgcgtcgagtatgtcttggacgaacactccagacaaagcactcaccatttctacattgaagtacgtctgcctacctatctgatttttgatccttgtcccgaccgtcttcgttgctaaatttaattttgggaacagatcagttgcaatggaatgttcggagttccccaaggagggaatgagattgagccgcccgatgtgagttctcagtacataaatctctatctctgcagcatatggtttttctgaacatttctttctttcagcctaaccgaacattcagtctagacaaagccgacttgattgctcccaacttggaagcctggtgcgtttcctcagatcaagattatcataattcataatctgtcttggaagactgtaaatcactttgcttacaggaagaatttctacaattgcataactcagggcgttgatgtacgatttcaaccttctctcacaaattgctacgtcctctccctcgactccaatctgcgatcgtgcgctcaacgccgccaatgagatcatgtctaccttccgtgccggagatgacaaaactattggcgcttgtagaaagatagctgagagaatcctaggagatggctgggagaaggatggggctcaggtctgggagaaaggtcaggaaaagggagcaggactcatgtggggtttaggtcattgtcatattgacactttctggtaagattcaattgacgaaggtcatctggtgtacagaaaatatactgaagttggtccttgatcaggttatggccagcgagctctactaagcagaaggtggcccgatcctggtcttcccaggtgagctatatcccaatttctggatcatagcctcccgctaacgacctcatttccaatagatttacctgatgtccatctaccctgagcaccatttctcagctacatccgcccagcatttccaatggcttgagaggctttatcccaagctttttgatgctgtcaaagaaaacatcacaaagaaaggccagttcggtgtagttggtggtacctggggtaagttttgttgattatgctattccaagctttcagagagtatcaggatcgcagttcacgcgacttgtttaatactttaatgtgttcgtataattgtcagttgaaatggacaccaacatcccttctggagaggcgctgtgtagacaattcttatatgggcagaactttttcaaaagtcggttcggagatacttgcgatacgtgagttcactttcatatttctacacttctttcctgattgtgtttatggccgttgatatacagtccaaacctgctcccagttttgttcttccagatacgtttggatattccagccagctcccacaaattggtatttctgttttgatctaattaagcttgtagtctctgtctgatccaagaaacaaacctcgttttgaatattgatgtagcacggctgtctggagccaagttcttcttcacacagaaactatcttggaatgtatgttcaatttgtcgacatgcccctcgatagattaatgctgattcgatattggattattcttcctcaagaacatgtatgtacagcagcaacatgtatactatcgaagaaaatacaagcctttacgataacgctgaatgtgcaacatgcaatctttctgcgggggtttagtaacaaatttccacatacttccttcaactgggcaggaatgttagtaattttatatcattgtcgtgtcttgaccccacactgacatatcctttcatcctactatatcgttttcagtgatggctctcagatcctgacccacatgacaccgttcgtgatcaaaccgttaagcagacttgctgatagatgcgcacatcactaatagcatctttccaaacagagtcgacacctacaacgctcaggctgactatggagagatcatgaaaggtgcaacggctaataagaatcttgaagtgtatgtacatcgtcctgggtatgtatcgttgatcgagtctcaactgaattcattacttcatcttactttcaagaactggagatgcattgtatcttttcggaaacggagacggtggcggttcgtcttgatctacattgtccttctcgtttttctcgtcacatcagaaacattaatcagatgcaacgtggacgcgtttatgttcatagggggaccgaccgctcccatgcttgaaaaggtttgtgaagctcgtccatatcaacgcttatctcgagaagtttcgaccatatctgatattggagcgacgtctcttagctgcgacgacttcgggcagtcgcaaacgaaaatccaggtgtccctgtagtcaagatgggcggccacatggacgacttttttgaacgacttcagaagtaagtgtcgtgtccaacatacaacttttggagtaaagctcatttgttatatatttcttcttttacgagcaaacagatcgaccgacaacggaaagaaattaccttcctggtgagtataattctcgaaatcatgattgaggtagactcgtctcataacttatacttgattcaacttataggaagggggaattgtactttgaggtatgtctagtattttattcatcaaaactataagtaacaagctgaatccaatctcaaccttacaactcagctccaccgaggtgttagtcagctctcgtattatcgctcacgatcgttaaagatttatgaaccaaacagtaacttatgtatcaaacctttttgaaatccgaatagacttacacttcccatggtctcatgaagagggacaaccggaccaatgagcttcttctcagagatgttgagtacctctccaccatggcctcacttgaggatgaaaccggttccttccagtaccctaaatccaagctggactggtgctgggagcatcttctattgtgccaagtcagtttcttccaagcaaatctcccacaacacttgatatacttaaccttattttgaatctacaacatagcaacatgatgttctacctgggtcggctattcggcttgcttacgacgaagccgaacgataccatgtaaagattcgtaagcttagtgccgaaatgattgatgcggcctatagaattcttctcccgaactcgacttctctcgcggacaaccctctggttgtcgccggaaaaggcaagattgtcggtatcaacactttgcgagtgcccagaagagaggtcgtcaaggtacccgttgatgccaagggcgcactcaaaggctcaatggctcaagtttgcagaggaggcacacatggatatcttttagtcgatgccaccaatgatgggctagcggaagtcaagggcgtctttgcggatatgagtcctgtttcaggtatgttcagctatcgagctcagtgcttgctccgcgcacacggaagaatagaaacctgatgaagctactgagttatctctcgcttcagccactcatgaatccacgggagaatttgtgctcaagagtagttctatcatctttactataaaagatggaaggatctcaagcatctttgatgtggaactcgaaagagaattgatcgctgagggagagtgagtcttatcttcccaatcaacatcaagctcaatattgcaatcatttaatcaaatatcttgtttcacgataggactggtggtttggtcatctatgaggtaagttcagttctcactctgactattgctcgtagtccgatagctaactttctcattcctcgtgattatctaggatatggtgagtcataaaattattatagcctaagatcagttttcaattgtgaatcttgctagcttagttctcaccgtccattctcttttaaatcagcccaactactgggatgcttgggacgtagaagtgagccacagtcttcctcgcaatcaaatataagcatccacttacagtcgctaattgtatgcccatattgcttatatagatattccatctggaaacgcccactcgtctgaagttttcttctgtttccattgctgaaaacggacctctgcgagctacgttggccgtgaaagctcaggtcggaaagagtactagtatgttaaagctttcttacctcactttgatagtcgttacagtctaattcactttgtttctgttctgtttatgatattagtcgggttcaacgtgagcggatttcagcgtgtgctagctttctgacatgcagtcttattcttaccttgtttttggttttctcctcggaccagatttctttggatgccgtgggaggatcgaccaacaagggatcccgaagtttgatccgtttcgaaagtgctgacatcaattggagagagcgacacaagttcctcagtgagtgaacttaatctgtttgaccggtagcctttttgtacatatcgggatcgtgaatcgaggttaaccgatgcaatacgtatgatttcagaatttgagcttcctactgatatctcttctgctgaggcgacatacgagactcagttcggaactgtttctcgacccactcaccgaaatacttcttgggatcaagctaaggtctgctcaagttgtgcagctcattttcatatctcttcaaaagactgatggataacctcccttcctataaatcgatagttcgaagtgtgcgctcacaaattcgctgatttatcagagttcgggtatggagtcggtatcgtcaacgattgcaagtatggtcacgccgtcgaagggggtgtcatgagattgtcgctcctccgatcctctaccgcccccgatgcagaacagtatgtgttccatcctagttgttgtcaattcatttttatcagcttcggaacgaactgacatgacgcgctcgttgctgcctgtagggaccaaggcgcccatcaattctcattcggtatctacccccatacaggatcgttcctcgaatcgttcgtccttgtcttcctatccttattcggccgtaccaatctaattttcctatctaaaatgctacagcgatctccctcgagtagccgctgcatttaattccagcctgcatcgttcgtatttcctgatctcatccacacttatttatctagataaactgattaatatttctcctttggtatcaacaatacgcatgacagtgcgatacatccctgacacgttggctgcaatgaagactatcactacatcctcccttaacttcaacttcgctgtcgatggtgggcggaacgttttggctgaaaccatcaaacgagcggagaacgacaagttttcttctgagaagggtgtgggcaagggagagaagaacgtcattgttcggctgtatgaagcctttggagggcaagccaaggtttcgctcaaactgtttgtcgttttttagctctcaagtcgatcagcctctgcatcagcaaaattgacagattttgaccgacatttgaccattatcagaaccggcttcaacgtcacctctgctgtattgacgaacatcctggaagaacctatcggaaagcctctcggtctaaaggtcgatggcttcgaagatgaacttacatcagtcgagctcaagttccgggcatttgagatcaagactctcaagctgaccatcgccgagaagtgagtgcttcggaaccagtagtccatgttgcaggcttactgtcagcatgaaacttatggctctgttgcgcttcattgtttctcgcaggcctactcgagatggtgactcgtgggtgaagatacagaagaagtgatctttcgtttgcttctctcacctctttaacaagttctctatttcgtctctgtctttttgttattttatcaagttgtattttttgtttgttgcgatgcatgctctttgtggtgacttgtcaaaattgaatcgcacagtgcaaaatatcaaaagacactaggtcgctttatatctgaatttttctccattctaaatctttcagcctccctccgtcctactcggttgcaatcgcttatcatccagcataatcagcaatcactcattggatcattgaaaatctcgacaaccgatatgccttcaaagtaagtaaccctgcagcatgttcccgaatatgtgctggttgttgatggatcatagtttctggtcggtatcatgattcagaaccaaaggttggctcttactccctatatctaatccttcgcgtgctgtgtagtaattgatgaaacttacttgatcttcatcttccttgttgaccgctacctaccgactgatggactatgttgaacaggacccactttgacgaaagctcagcagaaggcggcagccaaagcttcaaagaaggccgcccagagcaagaagggtgagaagaaggagacgaagaaggcgaaaggcaaggggaaaggaaaggaggcggacgaagatgatctcgaggctattttagattcggttcgtttctcttttctctatgcagtctttctttgattatcgaggcttcattgagcttgattgtatgaaaaggctggttgtactgaccaaagttttgacttgtccatggtggtcttctcctgtagttccaaaaagaatgggaaactgtcagtacttcttcaaactccttttaccttcgtcgtggacaagaactgacaacgccagttcctactcaataatagaaacatgccgtcaaagaagagatcgcatccggacctccgtctcggcgagcaaacgccaccttcactgcttgccccagtggaaactacctttggtgcattggaggggagtactacgacggagatagagcgttcgtttgattatcccctttgcttgcaactgcccgaaaggtctcggtaagagcttactgaacacctccttccatcatgttgtcttaatcaaatccacacagaactttctagtacagcagtctctctcagtatctcttccagcgtattctaaatggcgtactcatcagtcgctctgttcttttcttctttctactgacctgtagcaacgacgtctaccgataccagcctgaaaaagatgagtggagatgtacgtctgatgaattactttgaccattgattcgtttgcccttgctcttcatctgtcatatgccatctatcatgtgttgactgttcttctaactcggtgcgattagtgttcgcttcgcccaactcgcctggtcctcgttcggcgcactgttgcgttgcttctccttctggaggtggaaagctctatatattcggtaagctcctcgttctttacaaactctacaaggtacccaagtagagctggtaccatgcgaatttggatatatatgttgtgcgcggctgatgaatgtgtttgattaaaaggaggagaatacgcatcgccaaagcagacttcattccaccatttccgtgatttttgggagtttgatgtcaacagtcatgagtgcgcgtgtcatcttcctccaatgagtgtttgaggattcgtcatactcaatcattttggttctcttctgtgatggtttggcagatgggaacgaatcgagacgaaagtcaaaccgagtccacgttcaggatgccggtaagtttgatttctgccgtcccctccgaagtgctttaataggactcacgttgaaattaatgatccatgatcaatactacaggatggctatgtggaagcacttcatagtccttttcggtggattctacgatctcggcgttcgaagtttgtctctctgtttttgactttccagattaccagcatgaggtctctttggtctaacgtacttgttcctcgatacagccaactacttggatgatttgtgggtgttcgacactcagctgtacaaatggaaacaggtagagttcccggtgactgctcaacgacctcggtacgtgtctcttgtcgaagccacagactctgtacagacgtctgttcttgacgaacgtacgttctgatacagttgaacgtttactgttctagagctcgatctggattttctctactccctgcggccgaaggagtcgtcctccacggcggatactgcaaagtgtttgagaaaggaaaacgaacaaaaggaattgcacttgaagacacatggcttctccgaatggatcctgatgacattggaaagttcaaatgggagaaacgacgacgatcgggctatcctccgagtgtcaggagtggttgttcgatgacactgtggggagcaaaaaatatgggtgtgctgttcgggggggtatgggatgac

SEQ ID NO: 1066 - DNA, 8222 bp, Xanthophyllomyces dendrorhous
ggtatgggatgacgaccgggatgaagagactctcgagagtgtgttttacaatgacttgttcgttcaaagtttcttctctctattcttcttttttctccttctacccccttggtcttgcatcaacacgacaaccgacgtttttgaactgtataaatcatttatactctgatctggcgatgcttttcgcaggcacggatacagcttggcccacccaggtagatgggttacgatgaatttgaagaaacccaagaaaaaggcaggtggcgggaggagaaaggcgaaggttattcaggctcccaaaccagaagaccaagctgctacgtccaaagctgatgaagcgtataatacggatgacgaggtcgaagaagaggttcgtccatcaacagccgatactgtgtaggtcaagtggatgaacgcattgacatttttcgtttatatcacatgcgaatgctcaattaggactacacggttcgcgttgtggaggaagaggacgacccagatgatcctcagaagagtatacctttgactagatacaacacgtacgtcgaggatcatcttgataatctaccgatatcgaagcagaagcactgattcgacgtctgtccttgtttcgggaacattttcatagtatgatggcgatcatcaagaacactttgtacatgtatgttaaattcagattattctgatccatatttttttctatggacccggtcttactatcctggggtcggaatctttcctttttaaacagttacggaggaatctttgagaacgattctagagagtatacgctagatgacttctactccctctctcttgacaagctcgaacgatacaactgcttgagatcaagtggactggaagaagaagcttggcttgaatccgaggaggaggatggggatagtgatgagagtgatgaagaggacgaagaggaaggtgggagcggacgaaggagacggggtggtggtgatgatgatgaagaggacggtgaaggcgggccggaaggtgaagagtatgtgaaagaagaagaagaggaggacgacgacggtggagacgaggtcgtaggagtggatgagaacggagtagtgatgactaggagagaacaggtccgtattggtgatctttgttacgagagaagtgaaatctgaactgtcaccaatcgagactgaccaacttgtaattcatatggtcttacatcggatcaactataatacaggaagcaaaagaagctgctctccgggaggaagcgaccaaattcttgggtgtttccaaagacgccgcccgatctctggaagacacgctgagcacacctttgcccggagaagtccttcgagatttctacgatcgcactcgtcagtatcttctcaccggctcagcgccatgtgtgactcaagatcactcgttaattgtatctctgttcttttcgtctttccacctatctgactgtgtgttcaacaggtgaatattggacgggtaaagctcattctcattctgacaaccgaggcaaaatgcttcgtaaggatgggttcgaaatggcctcccagagatatgcaggttcgtatggattttgttgtcgttcccttttctttttcttttcttctcttttcttttctgcagatccggcattgacttttgtatcggcccaatggtgactcagaatacgagccgatcttgaaggagatcgagcggatccaaagggaggctgggttggaagcagaagacatgggtaaaggcggaccggcgacgaccggaggtgttggtgaggccagtcgaaacaggcggtgaaataagagaagtagaaatagatgacttgttcggaagaatatataaagttaaagaaaacgcggtgcaggcagacaagatactgaaaccgagtttagcagagaaatataacaaatcacggtgtttcccgagtctgagtggatagcttcataagtaggggtgacaaccgaatatccattggcgatcgagtctaattggatgacacacacacgtttcatcctgtgtacagcgttagacgatgtattgagatcatcgacgccaaagatactccgctctcgtgaacacgtaccatgggagtgagctgatatttatgtcgacataccaacccaacatacatgttgctcccgcttccaggtggagcttttcttccaagcggggagacatttcgaatggttacaagcggtacgcccgtccaagttgatcggcaaaggaaaaaaatttgtcgatttctatctcttcttgaatttcgccgttctctccacaaaacagagaacgcgcgtacggttgactcggatgttagcgctgttggcaggaaggaaccacacggcctcccgctttccttggtccgaccgtaaagatcccttcttcaggtgatcgaatgattcatgtcgtttcagtctttccatcattatcatcattatcaccattatcatcatcaccatcatcatcgatattttctcttctttttcgctacaaactaggtcttgacacatccacagtctttctcaatacccatggcagatgaatccttcggaactgtcgccatcctcaaacgtggttcggcgtaagaatttctcatgtctacaagcagatttatttattttcgatagaaatctcgttctgatcaatgagtactaattttgcacactctatctaccagttgccaggtttgcaggtcggttgctttcctttgtgtgcttctagtgaatgatgaatcagacgaccagaacatgtcctgacatcttaccacctccttgaatcgggttgcgtcgtgtgttggccgggctttacaggaaacggaagctggtgagtcgatcgtcgagtgaccggacgtgaattctaaacgctgtgctaacgtatgctggaactcccttcgtcgattctagaaatggtaagagcactacttgctttggcttcgactaacttgacagaatatttaccctggtattcattgattgtctctagtacgggagagaaaccatcttgcgggatgtgtataaaggtacagatacctccagtcgccaaacaacatgtgcttattcatccttaagcccgtgatgaaagacctgttctcatgtttcttcctctctgccttgaccgttgacaacaatagaactcacaggaatgtgtttatgacgaccctcctcgatcaaaaaaccgaatcagaaagttggaagataagataggtcggtgtcgtcatcatcgaatccgctatgtttgtcgcgaatgcaagaaagctgcaagaggtccttcttgagtttcactgatccctctttaatcactctgtgtctagctcggctcgaagcaatgctttcgcaggcaaactcaagcccagtcgccctgagctcttgcgattcaacacaaagacgaaagtcctcgggaggatttccttatcccaccccaagctacgctggaccgagcggtgtttcagaggtatctcatccagctcgacaagtcaaatgtgagaagcaaaaggccttctctcaagctttcaacgagttatgggggatgagttcggtttctggatatggaagcgcagaagccatcaaagatcgatcacagtcactcgatagagatacttcaaacagcccaccgatgcccacagagacagattatgttgcaatggacgtacttaatcaactcatcggagaagcgggtcaggttggttccgtgaccgacccatggaatgtagatttcagtcaactcatagggcatagcccagtcgattcgcccacggaggctcctatgctcaacctcaatctcttttcatcgctacagattgacccaactgcatatcaacaaattcctatctccatccaccaggcaaacacagtctttcctacccctcaagaatctatatcgtcgctctcaccgtcggttccgcccacggattgtgccactactttaagagcatatgtgatagagcgagaggatttacccgaacccatcaaatattccttgctcaaaacattttttaccggaaaaaatatttttggaatccatctcaacctcgacagattttggaggtcagtggtttttaaatgtttgctttctctggtttactaacaaattagttggttgagttctaagaacttacagttcgttttggccttacaaccctaccttttaacctctattagctctctgcgggaagagtcaagcgaaaaccaaccacatcctgcctttctattcgcaatagttcgtattattcctgtcccttgttgttatctcatctcggctagttagccttcgtcagtcaccaatcaaagctgtcaactcaatctgttcattcggaaactcttatgttcttacgatatcagtaccattgtgtcagtcaactctcgtctgatatagctgttcgggctatggacgacttgttctatgagatggccaaaaaacttctagaccagggcatcgatagttgggacagtcgaacgattgacttgatcagagcttctaccgccttgtcttacgcgtgctgtaagtacatggctgatgaaggaaccgatattgatgcttccgagctctgacacatatcttccatgattggcatctgacgtgcttcagatgcgaaagcaaaattcctgccagcctgggttcttggaggggtaggtcgttctcccttcgacattcctctgacttgagatccaaatgcgcgcgcatgactaattcaaacggcaacaatcttcgcaaaccaatctcagctggggatgcgtctgtgctctcttgcccaccttcaaagaattaccttcccattaagctccacatcagtcaagtatccgaaagtcagcacacggaacccaaagagaaagtattgtaagcaccgaaacaagcaagttcgccctccgaaggatgctatcgagctcggagattatatacatgtgttttggaacgcatgggtaggttttcttagtagctcttttctcgcgtcaacagttttcactctctcatacaaggcgtttttttcattctacaactcaacttgaatcgaaacaggccatcgataaatctggagcgacagctaccgggtttgctccggtgagtttcaataatctgttatgattatgttctggatgttgttgttcatatcaaagcgtcatcgtctcataaacatttgtgtcgacaacacttctgtgaacgtttccaggcaatgcattggtcagaaattgaaacccccttcccgctaccgttagagaagtacgccgacgtaagtttttttttcctccaagtctgtcaccagatttcatcaagtgatgagatcaatatcagtaataccactctctatccttctttggtagatcgactctatcaatagccaacctcgaacagcagtgtatgacctgtttgatgattccaagccgattgtcgccggagatctgttcgtctttctcttattatcgtcctttattcatgagtgctatatgaattgacctgttacgaactatgatgctttcaggagcgcttcctgtcattacatcgcgttattgtttttgaatgaggcatcccggttacaagacgaattcatacaaccttctactcgtaatacttatcttgcacatcacctaagctctccggcagagtcctttcactgtcctgtttcgacagcgagctcatccaacggctcccctgatcaagacctcagtccaggtccgacaggtcctgtccctgtagaaatcatccagcttcacagtgcactttcgagatttgtcaggtcccttccggctgatcgtgtaaatcccgctcggaaagtgtgagtgattcgtctggatgttatcatgtacgaggggtgaatcataaaaccaaaacactcatcgattaattatttgtacccttgggccggtggacgtttacagtctcggcggggccccttgttggaagtcagatccgactctgcaacaagaaggggacaacccgagtgaagcggcctctcagatatggggggtggatccagatactgttctgatgcataccgagattcacacgtacgttgccagatcttgacctttcgtttctcgatcattcatgccacatggaaagtcgatacttacccgattgatcaaaacattcctctggtcagcgcgtttgcattgctctatcaggaacgatcagatttcgagcctagcgcgtgggcgcaagctgtctcgtccgctcgatctgtggtcaagatccttcatataattgccgaagtagatttcagtcgatttagcctcaacttggtggtgaggatccttcttctctggattacagtttctctttctcttgtttctttcttttttcttcaattggagagtgatcgaacgtgagactgaaataactctgcgcttgtgaatcctcgacaggtatgctggagacacacagcgtttgttttgttggaggaagtcaaaaggcatcgatcttgtgggaatgaagaaggttggtttcttatcgaacatattgcggctcgtctcgtcatcttctgtgcaaagatatgttgaaattgacgcctggtttcttttctcgcatacaacagaggctctgcaaatcgcgattgaggtcgagcgtgcgtaacgtttcaataactggataaagtacaaatcttagagcacaacatctgacgcgttgaacaactcctcgatcaaaacagtcattgttcttgccttgaaacggattggtgaactcttcgctctcgggtaacgaacctattctttccatttgtaaatccatccggtttgctcatggtcgttggctaactctacattactggatcatctttaggaattcgtctgccgaagttattcaagaataattaagtgggttgtggatctgggagctatttagttctgtatctgtctttgtgtttagttatcgccctgggttgtttttccctcttatgaagatcttatcctttcgctctatcacgaaccgcctcaaacggcacctttctacagttatgactctcatgcctttcttccaacgtcgtacatatcaccgggcacgaacggtctttacctgcttgtatattactttatatcatgctgattgggattcgaattgtagattgtgttgatctactcaacgtggtcctcttgatacgcttccgcttaaaccaaatatttaccatcacgaggtcaaagctagttgattgaagaaaaaagaaacgaagaagagagaactttcgagttgttgtagatgaggtgtgcaagtcgaacaagctgtcgcactaacacccaatacgatccatgtatagatcgttcttacatatgacaatgaatctacaacttgatctcggagctgcagtcaacagtctgatctacagtgtgactgtgctcagggactaagatttgttgtggcttgcattggatagatccacaataactatgcagacatactccagctgagctttctaactgctttgatctttttgtctattcactgaagactcgttatgattgataaactgcgtttatcaatcagttttgaacaaatcagtttcactttatctctggcgcaaagaaatgataattcgctgatatcgagagtgctagggttagtgaattacataagcatctgacatcaaaacttgcatctactgattcaagcctctttgacttcatttcgtccagcgatgcccacctcttacgttatacatcattcgccttttactaacgatgtcacggagtgcgcatccaatgctgagactactagaatttcttcccactcaactcgagtataaactgatcaaactttttgcttttcgacgcattcgcctttcttttggttctgtatctttacatctttccgaatcaaaaatggaagaacaatgttgataagggaagtgagagtgctggaaagaattcatatatatctcagataaagatctatcttgtttcacagatttttcctcttctcatccgaacctaaaagattctctcttctctttccggatctgtcatcatccccaaccgaaattgtactaccaccgatttctttactttccagtgcactgacaagtctggcgatgaggcgaccttgactttcgactacttctctcaacgaatcaatttggcctgagagtgcttcttggttccttgccaactgatgaaaacattgataaaaaaaaacgtagatcgatcagtccgagattccaacatggagagacgatttgggatgacgatacgaactttcatattgctcagtctgttcacaccttcttgcatacctacactcccactcccgccccc

SEQ ID NO: 1067 - DNA, 20586 bp, Xanthophyllomyces dendrorhous
ctaccgtcccctccccctccgccggcagccgtagccctcgcctctactgttctcggcggcctacgactcagactggcccgaggagaagctcccgtgggaatagttgagtacttgtttgtggtcggaagaggtgttaaatctcgggattggcgaagagacgtcagatgggacgttgacgagtgagctgtggattgatgggctggggagtcgttgtcctcgtcttcgaccgattcaatgacctgattggtattctgttcgagacaatgaacatatcgttagggatttgcgagtttcaaactctgtttctttccggatacggatgatcatgaatgacaaaaagaagcgagtcagaaggccgaaaagatagtcttacttgctcagcatgtcgtagggcgtcccaaacagtcgcaaagtttcttccgagaacgaaactaggcaacgcgatgaggagcagaccaaacatcaagagcgggacaacgatgatcttcccaagtgccgatcctgcaacaaatacagaaaagatgtttaaattgattaaaaaaaggtttttcatcgtacaaaatggagtgatcataggggatgcacttacgaggagtaacctctccatatccgacagtagtgatcgtcaccaacacgaacctacatgaacgaccatgagccaacggaggaaacacataaacaaaaacgataagcgcacgattgccgagaaacacagtccttgaataaaaccccaagactcaccaagctgctgctggaatgtttccgaacgttgtgggatcaccttcagcatcgacgaatgtctgaaggacatcgtcccatgttcctctttccgcaaaatacaccaacctttttatttttatttttaaagaaaaagaaaaagaaaaaaaaacgaagaacccagagacgattgtagaaagaaacagagtaagatgatgaggtcaatgttcgatcggtaagatagacctcttcaagttacgcgtcttacgtgctaaagatgatgacaaccatcaagatgaagaacaacaaggcgagtagcgcgtcttgactgagtttgattgcaatcctcatgacttcaatcgttctgcacgtttttcagacaagccaaaaatttgaggatcagttgcattctgcaatgtcaattatggaacgatcgacatacaagaccacagtgttgctgtatcgaaatgctcgaaatactcggagtagacggaaggtcctgagaatagaaaacctaaataatacagactgacaaccaagatatatatcagacagacgcacttaatctatcgcagactttccaagaatgattgaataaaatacgtactgtgtcggcatggaccagaatttcgatataataaggaaagatagccagcaagtcgatgatcccaaagaaactcgagaaatgactccagaacaaatgtttgttgtcagaatgagccaaaagctatacgaaagttgaatgtcaaatcagcaatgaatgaaaatgcgatctgtgttccatgccaacggaggcgacatacccgggcaagatactcgacggtgaagagcacgacgatcgtggtgtctaatccaaatagggaacgcgcaaggagcggatttttatgaaatccaggaagcgttgagaacacggtgaggcatgctctgtaggttgaccaatcgaggaacaagtgtcgagtagaaacaaccagaagatttcaggagacgtcaataggtagtaacagaagaaaggagaaagcaactgggctgaaagcgactgacgatatgaggataagtgcggtgaccccccaatggatgtgaaatgccatgtctgaactcgtcggctcttccatcatcaagaacaactgtcttctccaaccgctcttcatccctcttgctatgtcccatgtatcatcgtcgttccctagcccaagcattgctactgtatttcctgatgtatgtcccgagtgagttccatcaggatcgtgtatttgacgatttaaatctgcaggatgatgggtctcgtcgacagtaaagtttagagaggctggcagatctttacgggttagactaggaggaggctggttccaaaggtgcaacgtatccattagttgggctgatgactggttcgataggtcgtgcaaggagagacctctaggtctcccgagtggtctggctgaatgagtaggcgatgttgtaagttgattaacagaagggaatgaatgtttggtaggagattgaccgttgagacgaggtgaagctggcggagaggatagctcgtattcttcagcaatcatggtgggagaggaaggtgtggatccagaatagcgtctatagctgggtagtttagaggaggatgcatgggaggatgacattgtgtatgggcgtgtaacgggacgcgcttcgccgtctggtgttcttgttttggtgaaacactggcggaaggttccctggtcagttaggagaggtataaaggctggagtcaagaagcacacataaacatgtgtaagtgtatatgtatcagatgcttaccttattcactatgcacaccaactgaaataaagaggaaggatgtgcaagtagaagaattaaaggacgagagtcgcagttcgggacttttacattttgtcttacattccatttacccttctggctaacaacacagatgcgccatgtcatttatgcccttcgttcttggtatcatgtcaagatgaatgtgcttgtgttatcgagcttgtatttacctagcagatagcgtgtatatttcatgttgcagcctttctgctatcacttgatgtacaaactatgtcaagcttgctcaggttatacacagcacagacacctcttgtgcaaacaacaggaaagcaagcatcgatatacgtgtcttcgtcccttttgacttgggcggatttttttaatctcactttctaagctaatctagggagaatctccaccaggctgcacgtctattggttctgattcttgagctgcgatcttcctgccttcttctaaactcttgacctctcgggcagcaccttgaccctttgcccttgcctcccctacgaaataagagaagaaatgcagcggaaaaatgatgaaagaaggatggaagtgtcaataaaaatcagatagagcagttacaatggatatggtagtgttgaaaacaatagactaacagctgttctcgccgttccagccctcccgggcccaaatcggtacacccgtctcaaactgtccaaaagatgttttgtatctgatcgcatgaagatagatgaacaatctatccggatccggatcgggtgcgagtgggatatagcaatgtttgcagaacccttctggcggaacaaatagctcggcctctccttctctcgattccttaacctcctctaccttctctggctctatggtgggcgagacaggcttctcagaaggcgcttcacgaacggaagatttgggggactttttagatctaggtttgtcggggagctggtcgagagtagccttcgagtcgtgtacgagcgaggtagccaaggatttgataatcgctggtgatttggtggcctcattggtgtacagcacaatatctttccacctggcccaatcttccgcttcatccttcatccttctcagccgacgaatgatttccctagcctcgtcactcaatttgatcggactactgcttccaatatcttcccctgtctctcgaggcatcaatttccgtcctctctccccttctttccgggcttcggcctccttcattctcttgtcaacagccgccttggcttcatcccaatcggctgcctctcctctcggtggggagtaatcgcgtttagcggtcgagcctggatcagccttccagtcggaaggagtcaggtcaatccctcctttggcaaaagtagccgacgccgaccagaccgaggcaagactatatattgggtcgttcggaatcgggtggccgagccattgaagatgaactcggatttgatgagctttttacaaggaaaaccagatacatcagtatgagttgagcctttcgaccagattaggaacgcgacaacaagagacactcacttcgacccgtctgcggtcggcatgccactacactttcattcctctccttgtcgtagaagacacgattgaagattgtcttggcctcttttccttcttttgcaacaactaccaatccgctctgcttgtcgatcgtcaacaacggttggtccactatcatttcgcctctgagggttcgaaaaggaacgatatcaatatcttgggtcgccagcatttccaagaacctcgagacaaaagacgtactctgggaactctccccgaactcgagcgatgtactccttcttgactcgacctttgaggaaatcttcttgaaggacagctgcagccttagcgttaagcgctacgaacatcagtccggatgtcaacctatcgagtctgttaacggctgattatacgagacaacgaatgttataaatgcctcacattagcctcatgaatagctcaagaagaatcgatgcagaatcagctgaacaagaaggatagaaacacatgacttactatagaccttcttgtagccatactctggactctgcagagtttcggtacacgtattcttattgtatcgacctgtcggatgaaccgggtaactgccaggcttgtcgatcactatatagtctcccttgggatcttcatgaatgatttggatcgggtgagccgtcacaggaggctcatgtctatggacgacattcctttagagaatggggaaaaactagtctcagcccacggtctgattgtgaatactcagaggagtaccacagcaagagacgtggtgaatacatactggagggcatctccatttcgtaaaatggttgtagggctggcgacctttccattcaaagtggtcacacctgcctctagcgcatgtcgctatgaggttataaatgtcgaaaaccaagcggtgagtggaatgagcgacagggtcagacgtctgtctcgctaaggaaaaggccgttttagcgaggatgtgtcaagaatatcgtggaaacaagacgaacataatactccaccgatcggtctctaaattctgtactgacaacctcaagcagttctcgcccgtaccagcgctgcttggcaaacgtcttgtacgggtggtagtacggttcgatatatcgaagcccagggttctgaccttgcgggtaagtcgatttgggcgtggtgatatccgatggcgtagaattgacggtggcggcagcggcagcggcagcggcagcactgagagagctctctgatctagacaggttcgacattgttctcctcagcattagatgtccagtagaaagacgctcaacgaaggtgccgagagagaaaggaatgaaggggcaaaggtcgaaagttggagaatgggatttttgtgcattttcatttttcgtcaactgttttcaaatatttcaaccctcaaccttttcaccgctccaatattatcatcaacccgtccctctatatgattgctgtgattgatcctatgtgatgagtatcgtcacagtccgagagatgggcactcgtatactatgcaaaggagtagtctctggtttgatttagagcatgcgcatcaagcgagcgtaggactcatcccatctgctaagccaacaaatcagactaccaatcctcggctcccttccgactggctgattcaacgacaaagtataatcaacaatcatgtcaaagaatcttcctcgggatgtctttctcatcatcagagatttctgcgatttagatatcgagtcccatctcaatttttgccaggcgtcgccttggctggaattacaagttggtatatccctctttggtgtagaagttcacaaggcgatatgatggatgaatgctgaagacgtatcgatgggtatcatcaagatctatcctgaccgattatggaagaagcttattcaaatgtcggggtacagccgatcaaaccacgatctacaagggatccaaagagctcggtcttggaagtctatcgcccaagaactggctgttcatcctggaggtgttggatgtgagatcagtcagatcatcgctgtagagcctggatcggaaggaatgttggcgaagactacttggaggggagtgtgtgaatgtgcgagagactggaatcgttcgtttctcttctggttttgaaggtctatctgacattatcttctctgtactgatcgttatgttcgtgattttatacaggtagacactatgaatattcaactccaatccctccgtccatggtgaacgaatcgatcaccgaactactgatcaaccctcatctacagcctcgaagtctatcagctgaaggcttccagaaattcaacgagcatgctatcagaccggaagaattgatcgactacgcttatgatttatcggcaagagacgaagttgatctagagttgataagaaatcatcccagtgtcgctcattctgtaagtttgcaattttctgagagatcaatatcgttttcaagattcggctgatcttttcgcgcggtctttgacgtcaagtatgcaacatatccaccagtgaccgtacgcaatttctcccttggcaaactaagaaggcacttcatcgctgacgatcagaattcatactgtcttttcatcgtatccgaatgacttgagtgcaggaactgacgatttgggtaggatcaatcaccgtgtcaaaccctgatggagtgacaatatgggatgtcaggcaagccatccttacatctgatcgtcctcgcatgagtgatgttcttccagacaccgatccaacgggtagcgaggaaacattgctagagatgtcgacatcgacaagtagaaaccccttcgattatccatccggagaatggatctcatcactcaggtaagtctccttttgtttcctagatgtctcccacgattcttcgctttgatttgtatatccagccctcaactgacctgagccaaacacacatacacgtaaaaagtcgctcgatcgcagcgggcacagaagatcgtcaggcatggcttcaaagacaaccaggctcagtctatataggtcggccaaaccaggttggatttgagcacggcgtccaggatgtcttgtccatgttctccttctgaacgtccacttgaagatagctaaagtgataataaagatacggtagatgggagaggaattacatatgaattgatagggtgatagagaccaatgggtatatataagacatggcaaagcatgggaacaaagcgaaagtggaaaacaagaaggacacggcccaaaagaatcaatcaatcgaagagaaagaaaactgggacagagctctcggaggcttattcctcctgttcctcatcttcgtcatcgtcatcttcatcgtcatccccctcctctctgaccctcgtccgccgctgcaactccttgaacaaatttcctgcctgactccactcgatcgtgaacggtgcttttgcgagaaacccaagtcgacggaggtatgttttgtctgattccaactccaggtgaagaggcgtgtagaccagaattgtctttctgttcgaagaggatgaaccggatgggtcgagggttgtcgtttgtcgaatcttgaagttgaggcctgtgatcatgtgaatttaaggtcaggctagagaaaataagaagaagaaagaaaagaagggaggacaaactcttttgatcttcgccctgagctgtaaagatacagttccacgtggtgtcccttccaaactctccttcgagggaaacgacattgactacctgcagaccggagatatcttcgtaaaactcaatcgttcgagacttttcttcggagtcatctgttttgaacggtccgttcatgtttttattagcggtgctcgctgagagggaatttgagttggtggacgttgcaaatggtttcgaggattgttcgatcgtcagcgcgagttccttttctcggattttgactgtcagatatccgcgttttcgttagtcagtgatcaggaaagacaaacttgaattcaaaagggacgaaacaaagagactcaactggtctcggcttgatctatcaaaaccttatctttttctttcagcctcttctctaactcgcccagcttcttttccaacttgagttctgcttttgtgggaagtgcgtttggctggccgtccttatctttacctgctctgtcgatcaacgcgtttaagtttgctgtcttctgcctttccagcaggagagctttctcaaggttggcgataatgttgtattggtctgataagaaaagcgcgagggaacaagataaatagagcactatcaatatatagtgcgacagaaagaagaaggacagagatcagatgggacccaccttgggcgcgagattcggcagtgatcttgtattcctccaacagagcttcgaccccagtagttcgtttggaagagagcgcgtcgaattgagtgatgtacgcgtcccgttccttcaaatacgcttccttttcctcggtcacctgaaacatagttcagtcaaagaacgaacaaaggagagaagattgaatacgagaagaatagaggggcaaaggaagaggatgtcaggttgattcgccaaaatgaattgaaagaagaacattgatactcacagtactgagggttctttctagttcttccaactctcgatatagcctgctgacctcatcttctatgctctcctccctttctctctctcgtcttacgactctcgtagagcctgtcggatttcttcctctctttgccccgcctcctgctgttgttgagtaggtcagggaggcgcgtggtgatgatgggtggtgagaatcagtgcgacacgtgttggcatttgcgcttggtttagcacgggatgttgaagttgcaagtgattgcgctggtcgtttccgggaaaaaaacgtgttggatgctaaccaaggagacaatggaacgccagagtcagcaagacactcagatagcaagaaagagaagacagagatagagagcaagtagatatgcagatataccttggttctgaccgtatccatccctatcttcctcatcctgactataattcatggtatcatccagcagagaatcctttgtagtatctctatgctgtccaagttttgctcgtttcacggctgacggttgaagttttgacggaagggcgtagctatctgtcggtggtcttgcctgaagagaatatatgtgtgaaaatgaggagttagtgtgggtgttgaacctctcataagcgggaaaaagaaattgcaaagccaagatgcctacttttgccatgttctgttaaaacaatgctaagcacgaggaagataatatagaattcgagcggataggtgggatgggtgctctgaagtgaaggtataagctagacgagttggatcagttgaagcaaggcaagtagaagataaattcaacgcgcgacaccttcacgcgacgcgtcagggcacgtcttagggttggacgacacgtgccgattgagtcagcaacgaagacactctgtctatcgtcttggggtagactattgattcaaaacacaggctggtatgtatgcatatatagataagggaaaggctatgggatatgtttgtgtttgcaaaggacccagactttctgcactggactttgagctcaacagagccttgccagtagaaaggattcgaccggatggattttgtttctacttcttgtgctacacgaattggagatcgaagtgagagcagactatatggatatgtccttgtacgtttttgtgagtcagagtatgctctaacagggtgaactgctatccgtagggtaagtggtctctattcagagcgatctacatgcacttgtcggtctacacctgtggatctcgagtgcaacgaactagtccaaatccaataggacacactgtagcctgacgtgatggaacactaggaagggttcaatagagagtttaaactgaatgtgtcggtccctttccgagatggaccgtgcatgcatgtatgcgctctagtctctcggccgcccatctcgttagtttctctgttcacttccatcttccatcttcttctttcgacaacccacatcagccccatctctcgattttatcctacttatgacaaccggaactagtgaactacttcctcctggtattcccaggcgaacctctctcgttggtggaacagtcaacaccaaggacattggaacaccggccgctcgacccaagcgaaaccacaaacgttcactcactggttggtttcttcttactccttccctttttgcaatctccatctatccgagggctttccttctacctctagccatctctctcccctgtccttcatctctcttgttaatcactttgtggcatctcttcgtaatcatacgttgctctgtattcctactcttcaggaaactatgttgtaagttccgccgtcgctttgttcccatctcatctctaaagtaccaaaatcgttcctgtccggatcatacgtctgatttaagcatgcttctgcttgttctccttctctctctctctatttagcgtcccggtgagaaagttgacgccagttggccactcggtgatgaaaaggcctggaaagaagctcttgaagccgatggcgatctttgtgagttcttgaatcgcaagtttgtgagaagtccgcgctaacctttcggttaaatacagccatcaagggtcttcagaaatcggcaagttctcttcgctctggtcttagctaaatccgcgcacaatgactgatcgcctcaacttatatacgcttatacagatcgtccacaacctcaccaccggactcgcccgtcaggctttcaatttgcccggtgacaatgtagccgcctaccaggctaccgcgctcagcgtgagagatcagcttattcgacagtggaacgagaccaccgcataccataccaggaaatctcccaaacgtttgtcctcttcatggttgttgtgtactggtgtccttcttggtctctgacgcatcaacccgcgtctttaggaatctactatctatctcttgagtttcttatgggtcgatctcttgacaacacgcttctgaatctcaagctcaagccagaatacaccgaggccgtcaagaaccttggtttcagcatggaagatctcttgaggtgggcctcccatttgtgctcggggatctcactggctatgatcggatcattcattatctacgtctcttatctcttcatctaaccgccggacagctccgagcgagacgccggactcggaaatggtggcctgggccgactcgccgcttgctagtacgtattgttgacaatctctctagatgaacgtttctcgtgttgattagtatccgacaaacagcgtcgatgctatggctaccttgaaccttcctggttggggttacggtcttcgatgtcagtatcacttcgttttcttcgtggtcagtctatcatcaaaacacaaactaatcaatcttcgtgtttgatccgataaaatcacccatcaaacagaccagtacggtatcttcaagcagctcttggatgaggtatgcctatgagtctgtatcttgatcgtgaaccttctttctgctaattatgattctatgctcttgatcacaatctggttcatcatagaatggcggtgcgtagatcttctttggctctcgatcggaattaaacaaatctgaagtactgtttccttttcctatctaccaggtcaactcgaggcacccgacccatggctcaacaacgagaacccttgggagattgtccgactggatgtcaccgttcctgtccgattctatggtcgagccgagcgggttggcggagcgaaaggtaaaggtcaggtcattggtggccaggaagtccttgcgatcgcgtatgatactcctgtccccggattcaacaccaagaatactagcaacattcgattctggagtgtgagtaattgtacaagcttagagctgattaacgactgtcaaactgatatgaatgcaacttgttaattctccttgatcaggccaaacctatctctgggtttgatctacagtccttcaatgctggtaactacgaggcttccgtcaaggctagtcaggaagccgagtcgatcactcgtgtactctatcctaacgataacagcgtgcgttatagttttgttttatgagattaagataatcataatttaatgtattgttcatttgactatataggaagccggaaaggagcttcgactgaagcagcagtacttctgtatgtgtcgttgttctttgcagacgcgccttcggttactaacagtcgggatttctctctatggactcgaatagggacctcggcatctttgttcgacatccttcggcgatttaggaagttagataaaccgtttaccgagctgcccgactatgttgccatccagctcaacgatacccatccgacattggccattcccgagttgatgcgcgtcttgatcgacgaggaagacgtcgaatttgatcaggcctgggctatcaccaccaaggtatgtctcgaaagcttcaaccgcaagatccatggaatgtcgatgtgttgacctttctggctttctcttctccttcatttttgtcattgttcttatatattttcctaaataaaggtctttgcgtacacgaaccatacggtgcttcccgaggcattagagaagtggagtgttcccttgatgcaacaccttctgccaagaattatgcaggtatatcccgtcctcttatttgctcgttccatcgaagagtccctctcttacaatgatatctcatcttacagattatctttgacatcaacttgtgagtttgggccaaaagtaccaattcgaattcttctgactctggaaaatcgtcgttctccttttcctcagtgatttcttacaagctgtggagaagctcttccctggagacgttgcccggtaagtattgcgctctcgattaaacaatccatgaacaaaatgtttctcatctcggtccactcaatgttgaacatttttacagattgggtcgaatgagtttgatccaagaaggataccctcagtacgtcaggatggccaatttggccgtcatcggctctcacagagtcaacggagtggcggagcttcattcagaactcgttcagacccaattgttcccgtcagttcttgctcgattctgtttctgacgctaagccatttagtgtcatgctaaaacaagactgggttatatgatcgtatcgacagtgactttgtcgagatgtttggcaagtacgtgatagactgtcttcctccttgatcgaacaaattgttcatagctcattttttctttctctgaacagggatcacttcacgaacgtcaccaacggagtatctcctcgtcggttcatcgatcagagtaaccctgacctgtctcaactcttgaccaaatccttgggtactgaggagtggaagagcaacatgtatttgctcaagtacgtgcttcaacgctttctgtccgttgtgtggataggggcccttaattttgaactcacaatgtgattctgttaacagaaaactcgacgactttatagatgacgaaagtgagtgatttcagagctctgacttctcgacacttacaaagaaatatgcttgacgaatgtctttgtttcgaactggaaaggtttccgagctcagtggttgcaggttaagaagaagaataaacaacgactcgctcatctgatcgatgaagaactcggtattaaggtttctacagaggcactctttgacgttcagattaagtaggtttagctccttcaccctttgatttctcctcaacatttattcaaagaatacatatctgacattggttaattttcattggcaaaaaggcgtatccatgagtatgtgtcgcgccttccttacagatttggtacacacgttgagatatctttatatcgtattacaggtacaaacgtcagtcgatgaacatcctcggagtcattcatcgatacctccgaatcaagaatatgtcaccagaagagagaaaaagcgtcgctcctcatgtgacgatctttgctggaagtgagtttgatgatcttcaactggtaccatatgtgctattactgccgttctgacgcgaggtttcatatctctcttttgcagaggccgcgcccgggtatgtatacattcaaagatgactcgtcaagacagaaggttgatttttcttgcgactcaacgtgtcctacacagatatcatctcgccaagcagattatccgactcattgtagtcgtgtctaagattatcaacaacgatacagatatcggagatcttctcaaggtacgttcccttatgtttgtaattgtcacccttgtgaaattatccactaacagttgagcgccgttccgatttcgccgaacgatggcagcttgtgttcttgcccgattattcggtatcgctcgcagagattctttgccccgctgcggatatctcacagcagatctccactgccggaaccgaagcgtccggtacgtttcttcgacttagtgctcgtcttgatccttgcgtttgaatgtccggttgataaacatatgctttctccttattataggaacatcctgcatgaagtttgcgatgaacggagctctcatgctcgggactgtcgatggagctaacatcgaggttagtcattggattatctgtctgttagatatatcacctttcgcattggggttggtctcaaaacttctacaaacctggtgccgtatagatcgccgaggaggctggagaggacaacgtgttcttctttggttatctcactcctgaaggtaggtattttgacctttccaagcaagctgagagaaccacattgatctgagtgcgcttcattgacaactcaaatatagttgcggagaggaagtaccaaaaccaatatcatccagtgtcgatcgaggagaagtcgcctgcgctggctgctgtcttccagtggatccgccaggcgtttggggaccagttcaactcgatcatcgagtcgattactgttcatggcgatgtaagtgttgattgaccctgttgtgcataataagagtttgttttgctgactgatggttgtgtgtctcattgatgtgactttacagacatatgtaaattcgttttacgttgattgacatgaagattcaagacacatactgacatagatcatttgcctttcgttgtctgacttagctcgtggcggatgatttcgattcgtaagataccgattacttcatcattcactcttcgtttcgttcatctcatcttccttctctgaatgactgacctgtactgtggtttgtctatgtattctgcaggtacatcgccgcgcaaaaggtacattctagtcaaccaacactattctacaagtctgttgagaggttctgatcctctgacctttttcctaaatgctttcttcggcctgaatagcttgtcgacgatacgttcaaagaccaggaacagtgggtcaagaggtcgatcacgactgtttcgagaatgggcaaattcaactctgacagtcagtttatttcgcttcctctaattgatgagcaggatgtgtgctgatacgttgatacatgttcttttcccctcctttgaaaatattttctgtagggttcgttggatgtgtagttttgttgaaaccttttaccatatgattaactgacgcatacttatttgagttcatttaggagtgtcttggagtacgccgaagcgatctggaacgtaagcccatggttccttttcagtttcatgctgcttgaatcttggctgaccacagatttctctctcatcttatgaatcgtgcatgtttaggtcgagcctttgaaactcaagtagattgactcctctggtacctcttcatcatagagggtttatatttcaatttcgagcaggactgtttttttgttttcttattcccgctgtttcatgtttgtctgtgccacactttttttcctatttttcttctcctttagttgttcattatctgtctttttgtatgtgatggaatttctcctcttatattgttctcgcgctaaggccattggagatgagaaagagcaacaatgcaaaagtcatatgttgcgaaacgagaagaattgaggagatgaatggtcataaatggtgaaagagagcatgaatagacaaagatagagtggaggtgtatcagtagaggtatatcttcaggacgacagtgggatgatccggcagagcttagtcctggttgttcactcggattcttcgtcggattcatcagcttcatcgagccactgtgttcaacaaaaccggcaacgacagcagccaagaaaggaaggatagacatcagtctctcatccattcggatttccagacaatcaaatgggtaggagggaaggaaagtgaaatcgactcaccgtcaagaatggtccagccgcctttcggaccctcttcgaagtctccttgtcggtatacttcttgctgacatgcgttccccagttctttgcaatatcctcatctagaatatcagcctggtagtaaagcatcaagacctttggaacggatggaataagcgatgggtgatgggttccggcgagtctctcaaggcctcccaagagggctttctggtgcttttccgaggagaccatctaaggttatgtagggcgtcgatttgtgtcagttctgaaggtaaaacagaagcgggaggggagtacaaagcgagagacgtacagtttgaaggagtttgatgaaccgaggaacttccttgagcacatcatctccgaaggcccactcagatacaaccaaaacagccttgtactttttctcgatccccaactctttcgccttcttggccaccgccttcgggtccaactctccttccttcttggattccaaaatccaaagcttcagctgaaagtacgggctgtcctcgtcctcttcgtcgtcgtcatctcctccaccagaaggaccatcaacttggccaccgaggatggacattcccttgagctgttttgccaattctttctctcgagcggcaacggcctcaggagacatatcctctgcccaatcatcatcgtcttcgttcactcgatcatatcccgggatgtcactctcgtcaacttccacatttgcctgaccatcagcaccgtcttccgcgtctccctccgccgcagcaacggtctctccctcaggagttacagagacagccttgccctgaatcgcttcagcgttggcagccgtagagttctcggctccagacttgagtcccttaatcttcttctcgacaggcggtgggttcttgacgatgaaagaggtcagcttgtgtcggagatcgacgggagttcgcgctccgcaagccttgcagtctctgatgacgtcctcagatttcgtgatcgtgtagaccgtctctgggtttttgcaacttccacagagaatgaactatggtatggaaatgacaaagagagacagagaagaagagagagggtgtgtgtgtatgcgtgagaaaggaatggtctttactcttttgcaaacacatcggaaagaaaaccaatcgttctgataaggccgtgacaaacggttacggaccttttcaatgaagacatcgagtatatctcggagtcgtcccacgtcgtgagctccgtttacaatgtatcgatcgttcttgtcgtcgactttgcattgagcaccgagttcaattccaaagaacttggtggggtctgatgtgtgggtagaaaggcgcaagatggagagagggtactcatcaaaatcgtgagttctctctgagacagaagagactaccaaaaggggtactcacaagaaggaggtcgagccaatgctcgagcgacatcggacatgttgggaatcactgtcttgattccatttcctctgccttcgatcttggtctgcaagaccggcattctgaatatgattaaggtacaaagaacgcaaaagctggtcagctaagtggaccagagagaatggatatggaaaaagagtaaagaacttgcttgtatcgctgtacatcagaaagtgaacatcgattaaatgataataatcatgatgaccaaagtcagcgatctgacaagtgcacaaccaacacaagaaaacgtcgacgattcctttgccacgatcgaaggaaagtctggcgaaaggaggaaaaaaaaccggcgatggaaaaacttacatagaacttgtcctgaggaagagaaaatgagccagacccagaacaatatcagttccggccacacacagagtcccaccgaataaagcctatactcacatcgacgtctcttcgaatgtttacggaagccatgttgggtaggtagaataaaagatgaagactgggtcttagcgaaagagaatgtcgggagggactttgttggaatgggtcaagtggtgaggattataaatcgacgaaatcttgaggatctttttgaaacggtgttctcaggacgaggtggtagcgaggaggttgtgtgtgtttctgtaacgagagcagaatcaagtaaagatgcggtcgttgaagaggaggatgctctgggtgcaagggtgaagattgctggtctgatgaaggtgatgggaaggagagactggaaaaaataaatataagtgaatgctatatttgaatacttagctaaagtcaattaagtaccggctctagccgacgccgactcccgtcttgtctgtttccccactgaccttctcgacgaccagaccgatcatctagcctgggagcttgcttgctttgtttgctctgctggccaatctaaactcaatcaggatacagggaatacagggatgaatactaggagagcctcttttgataccatcccggtagatgtactgggtcagtcccacagggtgttttacactgcggttcatccgctgacttcaagtctgcatgcattcctttatagagacgatcgcgttcttcacagccacttctgatcctgtaggcccaccatcagatattccatcgctctgtaagttcctacttgagatcactgtcgaaacaaggcgttacccggtttgatcgcttcaagaatgcttctaggtcgcacatgcaaatctttcgcccggcatctctccctgcgatcattgccccatctgtatgctcggatatttagatcccacttcgataccgctgctctcaatcgtcgatttccttcctctaacaggaccgcgctcgttctttctaatgagctcgtccgtcgctggaagacactcaaaagggtccgggccggtaaattcggcgactgggccaagctcgaagattgccttcctggggaggacgaagggtatcacgatctttggacaatctggataatgtgcatggagaacggtaagtcttaaccaatggttcttcaagtcgcaactcgattgctcattctatcttcacaatttccatcacatcattccacagacggcagaaatcttgaacaactcaccaaatacgcaaatatctccacctatctcttattgttccgtcagcgttatctggtccccaccacaccatcctctgctatgttctcctctcggctaatcgcttcatccaaacgaagaaatcttccaacagactcacccacagttgcgctcgcgctttggatccatcactacatattcgatgcctcaatcggtaaagatagccaagatgagactaagccggatgttttatacatgctccgacttttcgcatttgctgctcagctggtccgtgctaaatataatttgtactcttctatttcacttcgaagttgattccttattgggagctaatttgataacaaccctcacaacagttcgacggttatctatccccttggacacaccttaagcttcctatcacacccgacgcacttcccgatgaaccaagccctatctctccatacttagccaatctgacaccacgctcgctgacaaccactatccaatatccggggaatctcaatcttgagatcagcccgcctgtggcagcccacgcgggcctcttgtcgtttttcggtcgtgttcaggaagaaggtggtggggcggacagtgttcaagtgcctggagatcaaggtccggtcttgggcgacagccatgatgaagagctgttcaggagcgtagaagatggtttatccgaaaacaccaagaaaatcgatagcaagtcgtttgatcgagactgggagcgattaattcattgccgtgaacctattgttcctcggcgtcaacccgaacttctgacggccactaggaccggtcccgaaatcgaatcggaggcctcgccctcgtcatccacacggtcttcaccgaaaccgactttaacgtcgagctcatctggcctaggcgcctggcgctgcaggcataccatccaaggcgtttggagcggtagttttgtctttcttgatttcgatgcatacagagatatgctcgatggatcttcccgagcaatctacgaaggtcccttcggccttcaacctcaagtctttagactgtccgagatcctcgtcaagcgatctccacaatctcagaagatagtcgaccagggactgagaccgccaattgtgaggccggccatcaacgctgggttcccattaacatggtcttgggcaggaaacgtcgctacctctggtgcgctcgatcggcttgacttcggaggcaggg

SEQ ID NO: 1068 - DNA, 42231 bp, Xanthophyllomyces dendrorhous
ggcaatgctgatgggcgaacaagggtgggaacatgtggaccaacaggaggaggaagagatgagagagcgtggtgcagatgtcgatggattggagttgatcctgattggaacagtcagtcaccatcttttatcctctcttcatccatccttagcatcgaactatcaggttcaaactgacagacatcgcttatgagcgtgatctcatagggccattctgcttggggaacattcaacatatcaggcagagtccgactgtgggatgggctgatctacttgatgaaagactacactgtatgtcacctgcctttgcctttttccccaacttatcttgtgttcgctactatgtgaatcttacgtctgcctacgaattcaacgtacaaagccggatagcaggggaaagtggctgtacagagggtatgtggtagcaggcggcgcaatggtcggtcgatggcgcgatacattcacaccagtcagtgatgctttcttgctcttctctcgccttggacgttgttcgctgatgaaatatcaatcttcgttccgtcatcgtcttcaaactggttgaacaggaggcatattcgggctatgaaggatgttttcagatgaccaaacgtggttgaggtctgatatgtacaggtataattatgatgaataaacccgaaacggcattcttgcaacacggcactcgatttcgattgacaacaataggagaaaggcattaagggattaaaaagggaaggtgaaagtcatatatttacaatcaacgagccaagtcttcgacccactttcggttcctctccctttcctcctctaccaacctagcttgttctcttgcttgctctgctttctctttccgttttgcttgaacctcggcttctttcgcttgacgttccgcctctttttgtttttcggcttgtaagacatgtcgttttgtcgcttgattaggttcaagatagctagagtgatgaacaaaactcacaatagagatgagcaattgaacgcccaacagaaaagaaggcggaaacaggctgaacgaggagagacttacacccaaccccgattcatgccgacatcaactctatcttccttccatctctctgccacatcccccaaactttttgcaacctcctctaacatggcctccatgacctctttggggggctttggatccttgcctcctctctttttcttcggtccaaattcgatcgtcgtgcgataggcatcggtgatgtatgatctcgcttgagctactttgtgagaaatatcattcggcgaagaaacccacgagacgagtaattctttctcgatcccactgtttcgaagtccagagttcgaaccaatcgagttctgtttgggtttgctcgacgtagaactggagttggcggtcgaagagggagaagatatagattggaatttcacaatggagtaggccttgacatctgcttcttcaccgggtggtggggctccaaacgtcgttccgattctcaccaaaacgaaatcccctccggtcttctctttcttgcttccaacctcctcttcggtaggagtgatcaactctagaacgtcttctctagcacgaacagagctcatctcgatcggttctgtgggtgcattaccaggagggatgatcgcacggacgaacaattcatcggggatctcctcgtttttcagatgtctgtctagctttttctgcaaaacctcgagttcctcgatcgtagaagcttgtctaagcttggttgtctttggacggccttctttatgccctgagaaagaagatgaagagccggaggccgtcaagctggcaggggcaggagcgagaggttgaagttggaacgccggcttaaaaggttgagctgtaggttgaggagccgagaaacgacctgaaagcctggaaggaaactttccggtttggagatcgtctctgttggaaggaaatgcaaaggaagaacgggaagagggagaagagaatcggtttgctggtcggtcaaacgcctctgaccgcggtcgggagtgatgtcctgaagatgactgtcgaggcggcaaagatgaacgagaagaaccaggcgaagagaacggtcctcgaacagaggaaggtggaggaggtgaccggggaggaggtggagagaacccgaatggtccattcgttatgttgggtcggtttggagaaattcgaggcgaatgagcatgagaagatcggccgtgtgagggtacgctttgggatggaggagttctagagtttccgggtctattgaagtcaagtgtagcgaccgaggatgaaaacagcctggctggctcccctcctagtctcagaggtccgacagaaggtttgaatggcattgtgagcagcgatgacctacaatgcttggtgatggctgatgatggttaatgatcagtggattgatgtcgtacaagaagagccgggtttttttttacgttcaccggttagtcaccagatatcaactctgacctctttcgaagacatactatcggtcctaccatccaccttcgtcccaaatacaatcaaactcgctaggatggacttgcaggaagacattcgagagctggaagcaatcaagaatgagatttctcaggaagagcccgagacattggctccccaggatatgctctctcagctccaagatatcaacgttctaggcgagtctcacccaccttcacagcatactctaatcctttgctgatatattcttgctctccttgactgaatgtacctctacagctcccttagtcagacattccaaacttccattcagacatctggtatcccagtatgatgtccatattacccatacgcctatgatccttgcagccgaatttgcccgtacgtcctattgtgcttgctcaagatttcgctccgttgtctgatacgaagcaactcatcaaaacttaccttgctcatcgatcgttacttcttccggtactgaatcccgataggaaatggaacggcgcgagagtctgatttctcgacttctaccgaagaaagaggcacgtttctcctcagcgaacggtctaatcccagcgtctttgtcaacgtgccggaagaggaaagcagctgcttggaagaggaggtccagcggttgaagaagaagcgaaaagtgaaaggcgcagtgattgctcagtttgctgccaatgatgcaaagattttggccgatgcgtgagtgagacattctaaaatttttctattcgtgattatgtgttgggaagggtaattctggctgacagacgacttcaaacgagacttctctagatgtgaattgatcagtgaggctcatcttcgtgtttatcgcccatgcccctaggattgctgactgaccaaggaacctttaatgcacaaagatccctatgtagatggaattgatctcaattgcggtaagaactctttcttcacaaattctcatcagaaaccctccgctgagcgcaaacgcccacctcttattcactcgcaggctgtccccaaaagtgggcatatcaggaaaagattggttcttatcttcttcgacaaccggaaactgtccgagatcttgtccgcgctgccaaagatcgactaggatggggtttcccagtgagcgtaaagattcgagtcgactctgatcttcagtgagccttaatccattcaacttcctttcattttctagatcgttcatttcctatacttaacaccccgctgtaatattctcctccaaaaaccagactcacccataaattgattgaaactgcaatttcctctggtatatctcaccttcaaatccacggtcgaacccgtcttcaaccatcaaccgtgccacctgacctaccggccatcaagtttgcttgtgaggtcgcttcgagacacgggatatcatgtgtgggtaacggtgatatctggacggaggaggatgcaaaaatcatgagaagggagaccggggtgagaggtgtcatgggagcgagaggtttgttggccaatccagtcagtttatatgtttctctcctcctctttttacctttctctgttctttctgcggcttactttaaaactggatttgatcctggttggcttgtgcaggctttgttttcagggtacgataaaacacctcaggaagcagtcgaggtaggtctctgtgtttttatttaatcaagatctttatgattgtaatgacaatactaaaactatcattttgtttaatttatcaatacgaaagtcgttcttaaatatctcgacatcttatgggttcatctaccctcttttgtatgtcttcttggctcctcgtcttctcggcttctttgatgaacgcaattaacccagtcgccgttcaaactttgataaagccaccgacatctatcaatgatgctcgagtcccatttctcgagaccagaacgcgtctacttcaatcaactaggttctcatgctgctgtgtttgatcacttagcttcgagaggagtcggagttgggctggaaccctgttcttcaagagctgaccccgagataggagtagggagaggaatagtgagagggtgggatggagtgatgatatgatcacatatgtaaaggttgttgcgagatgattaagattgtcacatctaagaatctcccatgcattaatcttaactgaaaagtgatgatcgtgttataaaatcgttatataataacagcctctccttcaagctcattctttgtctatcaacttgacccttgctttgtataaagacaagctgccagtcctaaattttaggcatctttaaatcgttcttctgtcggtcatgactcgtacgatggatcccacgcctgccacttccgtcaactatcattgttgaattaacccacccagaattcaatccagtagatcacatatcagctcctcttcatccaagttcatcaactcgaaatctatctcgaaaacaatgaaccgacacaccttttcatgccaagtcaagaaaaccgaagggttgacgtccaaaccttcgatcttttccattccctgatggagatcaaagacaaaacatgaatgagcccgagttcattgcttctgatgttatccgaaaaaccacgcgagacgcgaccgaccttgtagataaatttcataagcccgtcctgctcttcagggtttagggacttgatcgtgcttgtgatatcggtagattttgttgagttcaggataaggacgaacgtctggaggctagtggcctgaaagaagcgaaatgagaagagagcggtaagtaagggggagatcgcagaaaagcatcagccattttagtgatcttgatcatgaagaacatcgggatagacacactttggcgtgatcatgatcgactccaaatggatattcgcttaatagcaattgtaatgcgcccttaatgtcttgtctgtggatacgtaaggcggtagaaacagatggtgatcaacgataacacaacgtagcgagtcactagaatcagcgttttcacaaatgaaacacggcagagggacaaccatggttgtaactgaccttccaagtacctgtctaacctgagtagatacctgagtggcgtatgcggctgcctcttcggctgaccgagtgtcaggatcgaaaagctccgagtcttgtagggtatcctcatcgtactggctgtaaaggatcagtcacagatgggctggtcagatggctgaacgcgtgcagacaagacgagagcacttcaaaacaaaagactaaactcgatgttgattttcctgaatgctgtgtcggacatggctctagattgaataagaatgaacgagaaagagatggtggtcgtcgtcgttgtcgtcgttgtcgagatggtagtagtacgttgaaggcgatggaggagatcatgattcccaagtgtaccccagatgctgccccagatatggcccagatctacccaagtcatgaacaaaatacctgctcttcctctcaacacatttgatagccggaatgaatcaaatgagatcaatcgcaatcagtcactctcaaagataggcaatgcatcgtcggactccatctctgaacttgcagtccttggctgcttcttcgccggtaacggaaagtccacgatcaccggcatatacatcagcatccaagtttcgttcgtcccaacaagagttccctgcgtccaggtccattccatcgattgtgaccaccggggtccaggccgatgtcggattaggtattcatcaagaagaggacgtcggggatgaaattttagatagtaatactgaaaatcagatcactctggaggaaaatcttattcggtatacagtcagatcgtccgtacagtcatcttaatgcatcttctgtttcgatttgagtgcgctgcttgcactgggccgaagctgatatagcagcatgacatatggtttcgtctcatttccgacacacgcaaaaaacaggagtaacgctctggaagaacttagagtgaatgtatctgacgcaagctctgggaggaggtgctacaagaaagttagctcgtccgcttgcttgatatctagtccgagtgatgttgcgtctgtacattatctggcctcagactgattctagtgattcaccgttccttcatcgacctttttgatgggaaaagaacagacagctttattcggacatgattgtcactgacgtcaccgtatgtctcgttctgatgcttatgtccagaacaattccttctcagagctgaccgcgcatttctcgtttgagcgcgcgcgaacgttcatacaactcgccgacacaggacacgcaaaacgctacgatctcgtacgctattaacaggccattggatcgtcatatactctatatcacttctcctttgttccctgctcggtcggcgattcctattcaaactgaaagtgtgagtccgtccctatattccgctcatcgtcgtcgattatctcggcttgcttcaaaagaaattcgaaacgattctgatgaagcctagcctcgaacgatattatgtagttatccgaggataaaatcaagggtctccaattttcaggtaaactacaacaaatgtcatttgtacatctgaacgatactcaaactgatagactaggccgatttgattcttgaacagtatcgatatcttgccgattaaatctagccagcatatctgatcaacttggttcaactcccctccctccaaaaactatcaaattcgagacattcccctctcatgcctcttcttcatatttgccctcctttgataaagctcaaagcccatcaaacttggacctagattgcgatgaagtcataccattaagtccgaatctcgaacgaatggaatccggtggattttctgatgatattcccaacccatcacggtctatacaccgatcgtcctcatctctctcctcgaatccgacagtacgaagatcgtcggagaaacgacagtcctggatcggttggtctcgaggaatgatcccctccgtcccttcttttcctatcctacgttctctatcctcactaccgaccttatcgatgagcacaggtacacgtcaaacggggaatgatcaaccggaaggaatctggggagaatgtttaggatcaagtgggaaatcattcatcatcctgtgccctcctgatctacttcctccacctccggtctctgtttcgacgtcgtcctcaacaccgccaccacgacccagaacaagaccaatcctcctcttcaaagatacgacgcctctctactcggctactacccaaggcgaaatcgtcatcgatgaatcagtcgttaggtgtctgggtgtcgagagagggttttggatagctttggctttaggtgtcttggaatctgaggaggagagggtcggatggctggttgagagttaagattcaagaagtttcttcgcttcgagcatgtatttctcttctttctgacctgagttattgagcatggccagaagagcaagatgaacgcaaaattggaattcatatagatattgcgaggaaaaaagatggaccccgcagatgtacaaacaaatcagaccggcaaatggtagagccaaaacagagttgggaagaagagaggccaagactaatggaaggtataggtgaagaagactacttaataagggcggaaatgactttgacccttagtgttgaaccttgccggccccatcccctgctgttgttgttgttgacccgtttggatctgacctcccacgctgggagatcttccacctgttgtcctacctgctgtcgaaccggcgtttgaaccggcggaacccactcccccagctgctcctccagcttgaggcatcatgaaaggcatcccactcattcccatcccgggtcgaaggcccattcccattcctcccatcccgcccatcatacccatgcccattccattcatacccatacccatcatcccaggcatgcccatcatccctctggctgctcctcctgcagctccgggaatgtttccgccaggactagctccgccgccgttggcaccatttccggacgcgccgccagtaggagagcctgaaaggccgagcataggattgtacattcctgggctggacatcatgcttgggaatccagggttctgcattccggagctatcgagagcagattaacggtaaagaacagggtcaactttcatcggtgtttttgaacggagataaggcgtgaaaggttacggacttcatcatctgaggtcggttcatcatccccatttgaccaggattacccatgcctccactagcaagatccaagaatcccaaacaagtgttccattgtcagttgtgtcatttcgatataagaaaagatattgaaaacaagaactcacgccatcattcgctgatacatctggaccataacattcgggtccattccacctggtccaccagctcccatccccatcattccaggcatcattccacccataccgcccatcatgaactgctgttgttgatgaagccctggctgttggtgttgctgggcttgaagttgctgttgaagttgtatagggttctgaggaagagacgagggtccaccgactcctccgtaagcaacgttgcctccatagggatcagttttggtagattttcgatcggttgttacagcagtgttagcatctcgaccgtttcgaggttgagccctcttaacttcaacctatggaagaaaaagcaccagaacgaagaccagaaggttagtcattgattcggaaactagaaaatccgtaatgacgcaagatatattgaactgacccccttgccatcgatctcaaccattccgaccgccaaacacttttcgcagctttcttcgtcagcaaatgtaatgaacccgaaccctttactcctactcgaatctcgatctaccataacctgagcgtcgagaacggtaccgtactgggcgaagaagtctcgaagaatatccactgtcgttgacgggaggaggccaccaacaaagattttggcagatttacgatgctcggtgtgagggatggctcgtttggggtcgatctgatagtcaaccgatttggaagggaaaaaaaagtgtagttgtctcaaagaaagagttcaagtctaatctcttgaatattcaataaagaagacgtgactgtacctgctttccatcgagttgatgctcctgagcaagcaccttatcaaccgaggaagattgttcaaatgtcaagaacgcgaaaccccgagaccggccggtcggatctctcataattgtgcagtgctcgaccgctccaaactgagaaaagtatgttcgcaaattgtctgacgagtgagaaggtatcggcaaaatttagggaagaagtcgaagattagattgaaagacgtttaaaatccgatggcccactgcacaagagtgcaagaatgaagagagaatgagagatgtaccatcggtagtttcccagttgaggcctcctacaaacatttttctacataaagcaaacaggtcggaaggtagaaaaggggtttgggtgtatataccatccgggcgtacgcagacagttgaggatagaaaataagggggtagaacgacattcacatcgcagtttgttttgtttgacgagttgttttgttgaaagtaacaggcaagagtcaagagcgtggacgcgtaaacgagagtgagcgagggagagaaaaaggagagatataggagattagtcgatgaacagaacatgcagtagagcgacgaattagagaaagaaaaacgggttgtgttgatgttgatgtggaaggtgagtgaaaggcagatgcaaagaaaagacaacggaaactgtgaaataacgagtgatgagaaacctagagacgacgttgttggtttctcatcatgtcaagctccactcaacccggtacgaaatagcaacgatgactatgaggacaacgacaagacaaaacgaggtaggaactcatacaggttcactgtaatcgagagtgggatgcgaagcatattactctcgcttcgggaacaaaaacagatgacaaggggagaacgaatggaacagatcttgtttgaaacagggataaaagatggaatccctacgatggaaacgtgtcgtccatcgacgaatccaacaggccgatcgttcctccttgcaagaacaaggatcagttggtccaatgagagaaagcgagaagccagaaacgcttacccttcatcaggcatatctctcggtcgaatagcgtctccgttggcgtgctgttgctgaggagcacctaagccggcacccaatccacctgacgaatatgctgagcttgacgaggtcgactcagctgccccagtgatctccgcgatctttttagcgagggcatcctcggtgtccaccccagaggcagactgcatgttggtaacgccagaggtagaggcagcgacggaagaaggagtagctttctcgttggcagaagggacagagctcgtctttgaggcatctacgttggttgaggagggaatcatggcgtccacagttgccggctctccgtcttcatcctcattgtcgtcgtctatcgaatttgacgatgaaaagctgtcagtatgtgtaacaaagatcatgaaaaaaaaaagtggaaacactcatcaaacacatacaaaggacatcctcatcatcatcaggtccgtaaaggtcaaggttatctaggatggagcaagaagataaagaaacgacaagagagaaagaaaggaagaaaaaatccaagtaaatcatatcgaacaacattcaagacagaggatcatctgttgactctatgaaatctgcctccaagcaaacacataccttgctcttcgtcgctagccattttgtatgttctatcacggatgttgctgtctagagaccgacgagaaagaagtatttaagcaagagaggagatgagagttgtaggctaacaaagaggaacagagcgtgctggaaggtgtcgggatttgtaaccagagggcgtgatcgttgtaaccatggtaatgaccagccggccaaatttcgaccaacgctctcaaccgagctttaccagtctctctcacactctgaccttcatcctcttttctctttctagcgcacctcaatcatctttctagtagcacgaaagtggtggaaagaaaggaaataagaacatagtcgtagaaatttctcttgaatacagaaaagaaaacccattccgtcatggcttctacgtcaaatttggatgatcctaggcgtcacgtccgtctcgagttagagcgagtgtctggggtacgttgtttctgtgttcttgatgtaattgtcaaatgagcgaaagcatgcttatctccttttcttcttgctcgttgcatcgggctcctgtgctggcccgttctcttcatcttcaaccaaacgctggtgattgatcgtcgaatcaaactagatcgctggctccgactttcctcacaactaccctggagaggatcactcctggaacttacgaaagtttgccgaggtaagttctctttttgctttctcaatcttgcgtcaattcggaagagtcgatgagttctttggatgcgcttcctcagtatggtataattgacctgatctgctgcttacaatccaccctctcttgaaataaaaaaccatgttaatctttccctcctcactttatcaatccctttgtagaacctgcaagtaaagatcgcccatatctccgagacgacgtgcgagttcgacctggttggaatcgactcttctatcgcgaacgctattcgacgagtcctcatctctgaagtccctacagtggccatcgaagacgtgtttgtgtacaacaacacttccatcatccaggatgaggtcctcagtcatcgacttggtctcattcctttacaggttgacccgagaaaaatcaaaatgaaaggaggtacggcagtactcttgatttcctttgatcaaaattaccatagaaacacacacactgatgtacttataacttggcatggtgtagccgactcgccaaacgatcagaacacgattgtcatgggactgcaagtcgcatgtgagcgcaaccgggaagctaagaagggagagaccgacccttcgctactatatatcaacgattgtggtacgtgattttcagaattatcaaagcaacggattgttgctgaatataagttcgttttgttacgccatcagtctacgcctcagaccttgtatggaaacctgcgggtcgacaggaaaccacgttcggaaccaacacgccgaggtctgtagttgatgatgtcttgattgctaagctgcgacctggacaggttcgtcaaacttcttcaaatcctctgttatgctgccataaacgtgatcagcaggcttacctttgtattttcactctgatactatcagtctatcgagcttgacgtccatgccgtcaagggcattggtaaagaccacgccaagttctcccctgtcggttcgtcggctttctcttctcgattccatatctacttatcttcctttttctcgttctctaacctggtctggcgtaattcccgaaaccaacaaaatttaatacagcgactgcctcgtaccgacttctccctcacatcatcatcaaagaacccattccttcctccgacgccgatgagtttgctgcttgtttcaccccaggcgtcgtgtctgtcgagacggattcaaagacgaagcagaagaccgtcaaagtagtggaaccaaggaaagataccgtttcgagggaggtcttgagacatgacaagtttaaggataaggtcgagttgaccaggatcagggatcacttcatttgtacgtcttgtatacactttcccagtgctttactcatgcctcgcgcgcatacgacgagctctatggaatattgactaatctttactttgtttcttgatttggatcgaatcctacgtcaacagtcagcattgagtctgtcggagcttaccaacctgaagatttacttccggaagcgatcaacgtcctccttggaaagatcgatagcgtcgagtcatctctcaaggctctcgatagtcagacctcggaaggtcgatcgtgatcgcccttgcttccatcatttccttctgctcttccaagagaacggtgttttctctcgccgtcatttctttattgcgtacgtggttagagcgagaaatggtttaaaaaactgaaattatacaaaagactggatcaatgttatcaactcttctcaaaacatgtcatttttgtgcgtgtataaagacaagtgaatgagtcaatgggaaaagataaaggatgggaacgtatgaagaatgcgagagtgatgcatatcttcattctgagccggcggcaaatacagtatgaaagaaagtatagggttaattttgaaacgggatgtgaaagacgatacaaagaagacgaatagaaacgagaacgacgggtgcaaatgcgtcgaacattggaaagaaagccctattgaacagacgacactgaaaggagcgcaaaaaaaaccgatgaaacgagataagaatgtcaaaccgaggttacaaacaccctgtcagatgggctagttcggatcgaaaaacgggtttctctcatcctctgcttctaagcttctggcacttttccttcctgtcgattcacctcccggagaccacaccccgcttcctccactgaccgttcctctcctttgcgatggcggcggtggcggcggcacaggcttcttgccgcccaatcgacccaagccaagagaaacgccggatgtcggctgtcggaaagggcttgtgcttgtgtttgtcaatccgactttatcatcgtacgcctcctcctcatcattgaaatccgatctatcggtagatcttgatcgtctatttcgatcaatgctacgaccgtttcgatctcttctaatgttgaactcagattcagattcaggatcagagtccgagtaacccccgcgttgcttggtgctgctgtgagagccataagtggtgtgcttaggtcggcttggctgatgggaatgatcgtcttcatccgagtattggaaggatgaccgttcgtccctggtagatcgatcgtcaagcccgtttcgaagaggaggagagaatctggaggaagcagactgttggatgggctgagtgaacgatcggccagcggacgtagggcgctgggtggaaagaagaggaggtactggaggagcggtctttcgaatcaagggaagcggctgggtgtaggccgaggggaagagtccagacttgccggacgagagggttcctttccaccagtcctcggagacttcctcgataacagtgatgactgtttatcggaagtagaaaatgcacatggcgagaagtattaaggagaaaggcctcatgaaaaggtaaatgagagagcaagaaagttaactgaccatctccaactctgagagtcagctcatccctttctacacctttataatcgaatgtggccctcactatctttccccatccggcgcccgcctcggcaaccgacgaggttgtcaaccgtcttccacctaaagatggtctgtctggcatggtgattgcttctttatggcttacatcttttctcctttcagctatatccccgtcctcctcttcgccgttcagcgggccccaactttttcgtcctcctggaatataaccagccacagaaacgccgttaaatccgtttgagcctcctccaatcgacttcttgcgaagtgatccaaagagggactttttctcattgtctgtctgagactttgtactgttcgatcgagatcgattgatgttcttctcagaagcagacgcaaacactggctcggcaaacatcgcagctctagcagctgcattcgacaccttcttgggcgcggcagacgaatgatagggtgtggacgcagcgtaagatctgtgattcgtccaagatatacagaacaatgtttagcgagtgatgagctgggtagcatggtggctattggaatcaagttgaactcacgatgaccccaagctgtcttgaagctcaactagaacatctctctgctgatccaagaatgagacttgagcctgaagaaacccgttaagatcactgtggaagacaacgcatcagctgatgaacggacaaagatggacaaagacgccgaagacatggtaacggactctaaataggcaccctcgttttggctgatttcttccatgcgcatctcaacgtcttcttgtgtctcatcgaacctcgctctagctactcggacctcctcgtccagagccggactcgattttttagaggttaattgtcgtttttgagcggcgtccatcgccaatctaggagaaactcaaaaggtattttatttcagcagaaagatcggatcttcttgaagatgatgcagaaagagaaaaccgaccttcgagactcaagcttctttcgtgccgcagagtaatccttcatttcttcagtactcctctctaagaacgtttatgaccagtcagaagtgatcagtgatccatttgttctcggctcgagagaactagaaacggaggatgacacgaacccaatccggacaagaatcctgcgatgagttcctctgcgtatctttcttgaacagcggcaatcttgcattgcgctcttcctatctcaagtaggcgctgtccatatgagcttcggaggccaagctcggttccgaagtgaaccatagtgagaccgacgtgctcgattagaagcactttggaaccatcggtttggagctcaggcgcttcgatcttttctcgttttgtgattgatttcaagtacgcggcggacgtctgagacaaacttttgattgtgaaaaggggattgatatattgtaaatcacactgggggagatcatcatgatagataggacagaaccaaccgttcgactgctttccgtttaagctcaacctccgtctcgaggtcttgaaacgcgcgactgaagaaaaaaatggtatttcgtacgtatatgtatgtatgtatgtcagtgccattcgctcgagttatcagactgtgtgactgcttcaaagtagccttcgctgacctatgttgagttttttcctccttgaacagtttctctcctgtccattgagagaacttgtctatctgtgagttttacatcgtcaggacaccacaaacaaatcatagaggtgagcaacgagtagagatcagttatctgaacgagtttcaacttggcacacgcatagaattgaaatgaaacgcaaatgatttatgaaaactaacctgtttgcctgcttttttgaaactcatcttgttctaccttagtccaagcagacgtatgaactgtcagcactcaaactcccgattccaagctcaaagagcactcacacaatcagacacgcactctctagtaatgactgggttgaaggaaacacgagatggcaagcaataaagcaagcgagcgtacaaacgagccatttactgcgtaaagtccgataccacgtggcccgaccttaagatgatattcaaattaaatcatttttaattaagtatgcgtcatgccatcacctggttttagcagagcgcgtccgtctccttttgcatcttgatcaagcacccccatcatgtcgtccgaaaagaatcctcctaagtcaacaacacctcctagtccacatgatccgtacatgttggttcctatactgtctgtcatcgtgctatgcttagttttcattggcttccgccgagctagggcgatgaagtccgctgtaggctaccggttagttttacgcgtccttctctcgtttggaccgtttattgggagattgatcgtggtggtagtgcctcttcaacgtttgtttcttgtgtatcaataatagtctcaccaatcgcacgattcatggtcctggtcgaatccggttggacgatgaagagcgagatatacaggcgtcaagtaatctctcggacgaagaggacgagctttatgacaaccaggtaggtatcaaattctcatcgtcattcttgccttctttctacccgtgctgaccgcggtccactctcgtacgaatcctaagtctcccataccatccctcccatcctcccctgtccttccgcctcgacattcaagtccccaactctttagacttggaaacgaagcaggcgatctgggttcgctagaagtagcagcatcaccggatgatgtggatggagaacttgacgcggatgctgtggaacttccgtccaaagtgaaccttccgatgagcagaacggcaagctcccggtcgaatggctctagtcatcgaaaatgaaaaaacggatggagaaaacccttcgcaaatcaaagccgatttcaacacgcttcatcatatacctcaaagagatttaaagtcggacacgtgccgcggttcgttcctcgatcttgttccagtgcgtttgatgttcacccagtccatccgtccttcgtcaaagagatcgatacgtcttgtctcttgttgtgatatttcgttttctctcaatagaactgcgaaatagatatagtacacagagctacaatgcatcatgtaactagggaggcttaaaatactatgtaacgacgttgatccaaatgatcctatcacgctctaaacttcaagagagaaagaatagttacacaatatattatcccgaccagtgcgttgccggtgacgctctgttctgttgtgaaaggaaaaatgccccaggcgttggtgattctaacactggcacatcctccaactttcctcttcataagaaaaaaacattgaggtcacctttatcagttgatcaaatcttttctctgaaactagaaaaaagcatacaagggattgagaaagcagatgaaaatgctcacccattgaacgtcatcatctcgtctggcccatacaacccccactgctggttcctctgtatatccaaaccttgccccacaccctgcacgcctccaactccaccgcccgaaccgctcggaccaatcccaccgttccccgttccgaacaacgtctgggttgtgtccgttcttgttctttctattggatcgccacctctctgaatagttgattcccaagtatcgccctgatcgtcacgatgagagattaagctcgaatcgtaccgatcctgcgcaagattatgttgaccggatgacattggctggaagggatcttcggcgggaggtcggacgtagtcgtactgcctaccactgagagatccttgggattgatgagatgagcgaacatgttcgtacgatcgagttgtggatgccgaaccaactgcggatctcgtagatgatgaagacgacgtcagaggaaaaatgccgggattggatgtggaagaagaggccgatatgtgatatgatggttgacgaaggggacgatcgatcttgaaagagtcatccgagtcatccgaatagtccagctggtctcttgtttgagagctagaaacctgagagatatgttctactggagcgtattgtcgaggcggaagctgagcataagatatgtgttgttgttgctgttggtgttgctgctgtagagaatggtaagacgcagaggatagcgaagcctggtaggaccctcctggaattgaggtcttttcatcgttatcatcatcatcgtcgtcgtcatctgaatctgaatccgagtcagaggatccaaaagaggcattcgcctgatcgactatctgatgttcaaatgattctccccctgaagccgcgcctttcgagttgtaaatgtgcgtccctgcagtaggcgagtcgaacgatacaagtcccagatttctgtgtggttgtccgtggctttgattcgatatttggttgttggagacttggaaatctctcggtcggtcctgctgagaatcctggaaggttgattttgcgctactgccaaaatcaatctgtccacctgtcctacttatgctcgagtcgatacctgttgatcggcttcgatcttggtcgccgtcactaaagatgggtggcctacccaaattagagggtcgattcgaacttgcttccctccatgacggtctaggaggagtaggcatcccctgaaacgagtttgccgtcatgttccttcctccgtttctctctgaatgtaagagcccgcgaacgacacttcccacggcctgtttcacaggcgacggcaccaacatgcctgttgcccctccgactcctccccaactattaccccggagagtgttcgacatcgtaaagttcatggtcaccggcggactcatacctggcggtagttcatccaatgagtcatccgagtcggaatctaacggcgtcgactgacggtggtaacttggctttttggcggccgagagaggagtcgaccgaaggtccgttagcccgttccatttattggtagcagatggtctacgcggtgtacctgacggaacaaagtcaggttcagatctattcttcgaattggttcctgaggatcgcatagatgctgggatcttcgggacaggttgagtctcggaagcaacagaagagtatcgcgggttgggatgctccttattctgatggaacggatttgagggatgaggggggccatggatggaaagttcagcgaacgaaggtgtaaatgtcgaatcttggccaagtcgagacacattcccaggttcgcggttatctcctctataagcggtagtaaacgacgcatcaggagaatcttgatccgaatcgtacgcatcatcatgtcgagtataggaaggtgcaagagcagcagcagcagaagctgccagtgccgcatttgctcctgcctcttgactcaaatagtttcttcctcccccaactctttgtattcctcttcctggttcagagcttccgcgtcggtcaacgccattctcgacctgaaggctatcgtcatggtcggcctgaatgtctgcttcagcttttcgagttagaacctcatgagggggtggcataattaagtccgacatcatcgagggtgagaggaacgagcctgattcctccggttcctcgctttcagctcgaaggccgaaccctcctcggctcggatgaggatgatgtgacgatgtggatgtaggaccgatattgggagttgatgatccaactgcggcccccaatccagcgagaaaagacgagtctgatgtcatatgagaagatggtgcgctgggcgtcgagacccctactgaagaataagatgatgcatccggatggcgcagagaagagtgatttgctgatgggctggatgtgtgatcggtcgaagctgatggatgagcgtaaggctgatgggcggtaacatcggcagggtcgggttctgtaccatcaggtactcgagcttgagcggccatctcgaagaagtttctccagaactgaagaatcgcaggatagtagatgatcgagttgatgaatgttgggtgcgaggaagtaatgaacaagtaatcagctagtgtatcaaaagattgattccccaagctgccacgatagctcttcgcctaaatcatcaagtgtatcgttgctaccagcaagcgcctcggttcctctaacaattcaacaacagggaaagcgcataactcacctttgcatactctctcgtaggttcgctcacttcattgaactttttgacagcaggaatgaccctagtagtgatgatttgatgaaagtctgaaaagttcttatctatgtcttgaaggaggaagatgttgagctgctcatgttgctcgatctggctcatttgaaaagtattttgtatttgtcagtttcttttgtcggaacgacggtcatgtcgaatggaaaggtgaatacagagatatgtaagagaaagatatataacagacctggacgctgattggggccgtctggtcgatttccggaatagatagacggtcggataccatgtttaggatgaccttgggtgtaaactgctatgtattcctcgttgccaatgatgatgacgatggaaaaaatgtaagttgtcggtcaagcagtcgagggatctgtgagcgaaatgagtttgatgacagttaaagaaaaaacacgagaggtcactctctttgacgcgtcgagaaaatgcagacgcgtaatgaatatatcacgtgattctgatttccgttctgtccagatgttatggccggggtgtctcaatacttctcgaagaggtaaattgagtatgtacattgcatgaaatcatacatccactaaggtacgtgtagagaagagagtagactaaattatgaatgagaggatatacgcttccattgaagttttaaacagcgtcctgtggatgatgattatcgaaaacccaaagacagcaagttagtatgatgcagtaaaaatgatagtatccttcaaaaagaggatacgagagaaaaggaaaaagtgaaaagctgaaagctctctacgaacctcgaattgaagacgaggaacaatgttcatagccagcagctgttccgttaaattataagaagaaaaatgtcagaaagcttatcctgtgcaagaattatcggcaagaaggaatgaaagtatagtgtacctcttggaataggagcttggcagcatatggcagcgttaccttgacgacgtgtttggatgatttgcagtaagagcaccatctgtcgtcgataccattccgacaaggaaattgcatgtcagaatgttgccattgcatttgaaagtagctgagataatgaagtaagacgaacccgttgtaacccattagaccgcatttctcacacgcatccgtgtcgaacgagtctgaagagatcatcagtcgctcaagcatcaattgagttgcaccataaccaaccaagctataatacagccaaatgacaataaaagtcggtaagtgctcgcccaaggaagatatcgatgagataggaagagatagatcttaccaatctcgctccatctctcctaatcgaagacctccttctcggctacgtccttctgtcggctgccgagtcagcgttgcacgaggaccccggggtcgagcgtgcatcttgtccatgaccatatgcttgagcttttggtagtagattggtccaaagaagacatatgcctctaagggctgtccggtgatgccactagtgagcatatcctttccagcatagctgaatccgctctcgatcaagatttgttgcatgtcctcgaccttggaaccaccaaaagcagttccatactggagcttgccggaaagtacaccagctttacccgccagtaattcgatcatctttcctaccgtcattcgactggggaaaccgtgagggttcatgatgatatcggctatgatcccaattacagaagtttggatcaggcatatgctgtggaaagtagctcactaaagatagaatagagaactcacggcaaatgccctggtcattgaaaggcatatcttcttgcgggacaatcaatccacacactcctttctgcccgtgcctagacgaaaacttatctcccaattccggccgtcgagtttgtcgaataaggaccttgatcaaaagctgatcgttctcgctatcagtcaacatgactttgtcgatgtatcccgctatcggactcttgtatgataaaggtgcgtttttgaacgtatcggtcgccacggccgtaccggctgtgtacgagttgtcattcgcgttcgtcggtgtttgtttgttgatgtagacatctccaggatcgactcgttctcctgctccagcaattccgtcggattgcaagatgtcgtactttttgagaggaacgttggttcccggtgctaaaggagtgtcggcgatacggtcgaagctgttcaatgaacaatgataatcaacaagaaatgaaagtgtcgttcagcgaattatgcgagacgataatgtccattgatggacaagactactaacgttccattggggtattttcgaatcatggtcacattttttctcaaaacctgacaacgcccataacctcgatccacagaagcctgaataagatagacatatcagcatcggttggttgatctatactattcactggcatttgcacctcccagaatatgccaaactaaccttgttcaaaatcagcgcatcctcgatatcgtatcccgagaaactcatgaccgcgactgttgcattttgtccggctggtaacttgtcgtaaccaatcaactcgatcgtcttggtcttcaccatgggttgttgtgggtagaccattaggtagagcagggtatcgatcctttcgagctggttgtaggctatggctccaatcgcttgttttcccattgcacattgataggtatttcggggagactggttatgatgaggataaggaatgaggccagctacggcccctaaaatagtgaacggctcaatctcgagatgggtggtaccaggaacgatcatgtgctcatacagagctattaacgagtcgttttcttcattacagtcgaggtactcgatgagtccgtctaccaggaagtcgtcgaatgattttttgccggctttgaggagctacatttccaacacgggacagatcagattgtttcatagtattacggtctgagtgaacccaaagcagaaatgtgaaaacttacagcgatgtgagattcttttactcgaggcacgccgtcatcgacaatgatcatcggtcgacagattcgacctccgtcactagcaatgtagacagttcgatgatgatgattgatatagattccaacaaactcggacatctttcctgctcgacgaagttttcggaaattggtcacaaaatgaactggggttgaggtcaggccgacggtgtttccgttgacattgaccatatatgttccttttcggtaaagctcgtttccagtcaccaaggagcaatctttcaaagaaaaagatgagacagaagatcagatgttctgatcataagaatgttgagcagtatatgagtatgcgcaccttctacgccaagcaagtaagcaatctgagtgacagcggcgtctggtacatcagtcgtaatatgcgtcatcagagccaggtttttcaccaacccacaggcctctccttcaggtgtatcactaggacaaagcattccccattgggatggttgtaatgctctcggtccagacacctttctcgtcttttcaaactgagaactgatcctagtcatcattccaagtgcagagatgaatgacagtcgactgagtacatgggttactccggcacgctccatcttgaatcgtttgatagaccagtttccggtggagatagctcggacaaaaccagaggtgatgaaatcagagtgcattcggaaggctttgagcgcgtcaaactcggtagctctattaggcttctttagcaccttgtcgatgttaagcttgagatcagagttaaactttttgaatagatcctcgaacaggagagaaaggagttgaccagccctgtatagacgcgtgaagtattgcagcaacgaatgagatagactgtctagtcattccatgattaaaggccatgttgaggaacgctactcacaattctaatctcttgttaccaacgtaatctctatcgtccacattcttgtcgtttttcattgccatgataactcttctagccatcgtagccacatagattgccttcggtctgaagttgccttgctcgacaggaacgtgggcaacgatgatggtcgagaaggcatcgatggcttcttctgcaatagtccggcgggaagtcatgatctttcggttaattttgacacgagatccaatgtagtcgagcgcttgacggatagtgaacactttagacctttgtgtggtgaatccggagtattttgtataacaaagaacattaagcctttcgtcagctttatgtcgatatgatagtgttcagagaaacgtacatagcagcatcctctaagttgaccgcaaaatcgttgtgaaaactttcatcatttccacagatcaattggaggatttccttgtctgactggcatcccagcgccttcatagcgatcgcaattggaatctagaagagagcgcgcgtaagtcatgttaagttgactttcgcctcaaccttaagttgacgcttgaaaaagatcgaaaaaagattcttacatcttcatggagggagttgtgtcgtagatataatttgccgttcttggtgactacatacgtcttcgattttcgttcgtgcgtcgacctaaacagaattggacaggtatatcagacagatgcgaaaagacaagcttgagaatagattgcataaggaacttacgactgcacggaggccatgaccaaacctttccgaggatctgtctcaacgatgattctgttcttagacagctgctcttgaaccaagatgacctatatccagaataaatccacgtcgaaacttagctatacgttcactctgtgttctcggcttcctcgtttctatttgtattacgctcaccttctctgtacccttgacaacaaagtaacctcctggatctaacgggcattctgtcattgccgccaactgagcttcatctttccccttcaaaacacatttgttactcctcagcatgattggcaaacgaccgattggctcgcctcgacgacggatgatttgctttccacgcatgtattccaggtcaacataaatttgagcggagtatgttgtgtcacgaagtcgacactcatggggcgtgattgttcggtcgattgcttcagcgtccgttcgttcgggtgcgccaactctgatatcggtatatctgagccagaaccgggggtcgatatccgaggtgaccttattattagctttgaggatttccttaatctccacctcaacgaactgatagatccaagaagcccaaaggttatgttagtggagtttgatatcaactttggtgaaagaaatttggcacagagctacgaactaagccagagaaggagagaaaaggagagtcagtcagcattaactatagacgaatggacgggctgaatttagaaagtggttcgcgccgcaccatgatcgaacgattccagatgctgcttgacaagacctttgaccttcagaaaggccgggagaaggagccatttatcctttttgaggttgaatcgtgatatcataaacaaagttagaatggttggctcaatagccagagtatacgatctgatatccgaggaaagcgtaaaggatggaacaaacctcaaccgacttgatctcatctgacaagcctttgcccttccacatcttcttctccgtagatgcccaagccatttcatcttcatctacaccgtatccattcgcttttgagtaatcgatatccttttctggcgagggcaatgaagggtcagtatttgcggcggtggcccctgctattgacgctgatcctgcctctgccttggagcgttttcgagcctgcatggctttttggtatacactgaaaagatcgaaaggtgtccgagtacaagaaggatgtgttcgtacgttcccagaggatgggaggacgggagaatggcctaactcgtcgatgaatgatgatggtgcaagcaagtcaaaagaaccaaaagaataatttagctagggcgagaaagcagagtagtaaccggatacttagttgacttacctgttaatttttgaattgtatgtattctgataactctataaccctaacttcattagtcacttgtcgtcaatgatatcatacatacctaaatcgtgttgatcaatactattgaggatacctaccctcatattgcacattatgacctggctgttctctctccgttctcctcaatctccacctccatctccaccgttagactctacgttctcctctgagaatttgctatctgttccctcccaaatttctcatgttgtcggtcggctttcacctcttcaacaggcctcgctttcagcctgcctcgcgtgcggcgcgacaattggcgcattctacagctaccggttcggatggaaacgcatcaaaacagctgacttcgttactccagagatgctgaatggcaagaaatggatcagaggaagagttactaggtttatagaatctcgttctctcttccccttcaccgcgttaaagaaaggctgaccgtgatattgtctttcagtgtaggggacgcggataactttcgaatatatcatacccctggccctttctggtcgtaccctttcaaattgagacagattcccaaagactctaaaggtatcacttcttccctttcgcattatccgagctttagtaaagatatacatatatgtaattaagcgcgtgcctacgcctacacatacccgcacgagcgttcagttgatccttgtctatgttttgtccaacatgtctggagccctcagaggagagaccattcatatcagaataggtttgttctatgcttatgcttcatcggttgactgcagctgaatgatttcgttttgtcttcgttctatatagctggcgtggacgctccagaagtacgcgacttttagccttcttccgacgatcgcgctttcatgaatcaacggctcactgacacctaactcaggcagctcactttggtcgaccagcccaacctctctcagcagaggcgctcgcatttctgaaatctgaaatcgaaggtcaagatgtcgactgcttgctcttcagtagagatcaatatggccgcattgtatgtttcattttgttttgttttcgatactctctcccgcaatctgatgattagaattttttttggttcctactttatctctcaaaaaatgtcatgaaggtcgccctacctctcatccctcgctcaaattttccatttctcccctggaaagttcttccgttaaggatgcttcgagcaggctggggtgcagtatatacagctggtggagcgcagtatgggtatattggtttggaatcttttcaggccgcagaagcctatgctaagttcgttttcccttcgtttcttaccatctggtcgtattcagggatcttatatcatgttctttctctatgacccttacaacaggagacgtaaattagggatttggtctctgggtaacaaacttgaaaaaccagacgcctacaaacgtcggattgctcttctcgaggccgcttctaattcaacatctacgacttcattgtcttctccagaatctcgaggaggtatgtttgagctcaaggtgttcagcaagggaggttggaggcggacgttatggagagggttgagaaaaacttttggatcattataaatgtcctatatatttgcgaacacaatacatacacatccgccgaatgaggttgcactgaccttttgaaagacattttgcagagatccatgcaaaaaggagagagtggtcatgctatagcgagtttcaacatgaagcggtggtgaattatgggagaaacaacagacaaggataaatgaccgtagagggatgaccagagatgtatggaagaacggaataggtatatatgttaaaggccttagcctgaatgaacgtaatgtaacaaaaatagtcataagaggaagtgagggaaagaagtaaatttataaaaatgcctcagggtgggggctttgtggattctaggttggtcgtgaagatatacataaactggtagacagtagagtaataatttgtacatagacttgtgaattgaaagaacaaacagtaaaaacgtgtttgctgaataagaaaaacatgaacatgagagaaagatgatgtatgatggtgaagtaaaagagaacagtgtacgcatatcatcttgaagtgttgtatcaacgtcggcaatgtgagtggagggtctgacctcccttgtcagtttctgcgaattagaaatgcaaacaagtttgtgttagatgacgatgtgagaggaacaactcacctggagaacagaatgaagctggctagacaccaaatgtccttactatgtgttgcttgaagccagataagtttctatcttctgagccgaatatctactcctctgtgctagatccacctagccacccttctccgctctccaaagcgcgtgctgtcattgaactttaccccataatcacgagtggagaagaacgagtcaagaacaacagatcgaggaagcctctcattagatcagcttcacgaggagacagttttatggatagtagaccgattattcacagtgtcgcatgtaacctcggtcctaatagtccagctaccaacctagcttgttccaattccttgtgactcggaacgtccgacttcatgtcttcatcaatgacttcaatctctccttgcttgcctactggatattcactcgaatgaccagagtttgtacgatgatccgttgttggtttgatggcgtttcggccgactggattgttaggctgaatggatgctagtcgtctacgttcttcgacgaatccagactcagcctcgtccttcattttattgtcgagcacaagaggtcttttccagaaataacaaatagcgaggtgttatcggataaatcaacatacaagattcgccattcttgggattggtcaggccgaactcacattgaaatgacaaccctagtcagttgaagtcctaatcgaagtctacctctgagatccaaccagcgcagacttcttagactagactgaatctcatacagcctgatcagctcaaaccggacgacccgagtataaccactctgacgaatcataatttctcggatgcgacgaaacactccttccaggtggtctaccgcatctgggctgatggtcaaaccgggagccgtctcattgataaatgcttttgtacaacggaacacaaggagacgtaagtatcggtgacatccaaagcgtttcctttgagaaaactatagatcatagaaaaaagacaagaggacggaccgaagaagctcctgagggttcgaaagtccccgtcgagaaactctgaaaatacggcaaacagtacgttatgaagcgtctcgtctggctgaatttctccgagtccaccgttgggggtccagaaattggagtcgtacattgtcgaaggatgggacgaaggcaccgacgcggacgtcaagtcatatcgtttccgaggctcgggggaggacaacacggtatgagcgaaagatagtttttggaaagcagcggtggcctcagggttgaacgtaggaaatttactgcgagatcaacatccgaccaccccaaattgagcagtcaagaagaatgatgttgagctccctaccgaatcatgtccgtggcatcatgaatgttgaagcgagcaaacaaacttactctggatggacatgtctacagcgagccagatatgctcgcctgatctcctgttgatcagcccgcttgtggcaaccgaggacttcatagagggtcgaagaagtgttgatctgatcgatcaaattcttcttaaccgatgactctatacagaatcgaatatttcggaaaacaaggtttggacgtcgatgagcttgccatcaaaggaatgagccatgaacctcccgcctctccttccaactatcttcccttttgctctgtctcttgactttgcttgttatcccccagcccagaagataagaaacagggcactaacccttttgaacacgtccagacatcgttcgcctctttcaggccaccagactggcagaaaggtaccgaatacaggctcgtaaatatgaggttgacctctggacgtatatgctctgaacgtcctctcttctcagaaaactatctacacgagagggagaagacaagacctgggtgagaattatagagcgcactgtatctcgttgagcaacagaaacagtcgagtgttgagtcgtctaaagcgagaaagaggtaagcatggatgggcttgtgttccccagccaaatgaatgatgcgcgggtaatcgatcacatgcttttgttgttcgctgactaagcgagcataatcggaatcctagtaactaactacagctgataagaagattgttttgatatttaagctcttgcttaactccaacattcttcacacaaccttccttcttcctccatttgttccatgtaccgtttgccttcatcctccgtcatctttccaatctccatcaagcagaatagtagggcagccctaacagctcgaggcatagcgtttgacgatctgtttgtgtagatgaaaacccagatgattgtcaaaggccattcatccagatgagaagatcgatgaaagactcacccggagatataaacatgcgcgttctcttcagtcagtttggtataaagtatgtgagcatcttgttttattaggtgttggacatatattttatcctcctaaaagataacagagagcaaatatacattttcagtccctctgctcgtagtgaaaggggaaggtgaaagacgaacctgatctcgagaagcagcgaccctcagtcggagaccgcctgctttctccatacgcatccaatcagactcatacaggtaatctttggatagagatcgacatccaaaatacaacgtgttgtctatttgcgtcccaaacacataatcagctttgaaagtggtgatagagtttcaagcaaataaaggaggagacacataccgtacgctttttctaaaagacggtgctcgaggaaagccctaagaggtgcaacacctgtgcctggtccaactagaatgataggtactttgggattctgaggcacggtcatcgtgccagagacgactcttatcggacacgaggagcctacacgcgacaggtttgatgcagagttcgtcagctggaatcaagatgaagagtgtcaaagttctgtctctcgacataccaagcggaagagagcgaagccagcttgtgagtagaccggctctaggaaccttgagagacgtcttgtaattcaccatagcaatacaaagctggatctttcccggatgagtctattgatcaaagagagatacatcaaaccaagcgaactgagtatggatgattacacagatcaacactgatagagaagagaaacgattcacagttgaacttccggcgatcgagaattctcttcgtctaatccttccgagtacttcagggagataatccaaaggaattttgattcctttgaagtcagacagaacctcgagcagcatccggcgaggtttggtcgaatagtcgtaaatgtcgtcctatgatagaaagaaataagacatacgttgtctaagtctggcttgtctggaaatcactatgaccgcttatgagaatgaagaaaaaaacttacgcctccttcgttcacatctaagaactcatcaagccgttcgacttcccttggatcagtggcaaatagtctgagccataggaagaagcttcttctcggtacagccgtcaagtctaaatgatctctcaagagtgcatagagagtgaatgtgaggtccttcaaatgactcgacggactattgaccgactgtagatcagccgatccactgtttggtgtcggttcagcttggtaggtcaaaagagtcgatggtgagggaagatgtggctggagggcgaggaatcggtcaacagaacttggtggattggagggtacgagctgaacaatggatcctggagagtaactgtagttgccctcatgatcaacctttgtccctgatctagaccaaatcgaaagtgcacaagtacaaagaagcataaacttacatcaaaccaggttcggtatcgatctcaacctggcgtacgtcctgaggccaatcttcgtctgtcattcgatcgaaccgaacaagtttccctggcatccacccctcaccatcgtccggcagattcgtttgcccataagcgtctcgcccgggccagtcattggaaaggtcgatagattgtgtacgagatgataaatcggaaaggggccctagacttgcgcgcatagttggagggaaaagatgtgttggaggaagaggatcaggcggaagggatgaagggtaaaactctggggtgagtatctgcgtgatattgtccaggaagggaaagagagtggcttcaagactgcatgggaccagaacagaaacaaataaagagggaacgattaaaaaagaaacattattgattattgaggccaaaccattggacaagatgttaaatgtactcgcccgccagatgacctttcgtcaccccaccattctttgtctctgatcagctcttccgctcctagcgcaagtaaccttctcctcagaatttttccagcccagttgaacctctcatagccggaatctcctaggccgaagacagaaaatctgacttcatccagcacgtcttctggaagatcttttctcatgagcatactccatagcgaccgtatatcccgtgttggctccccgttgcctgtggtggaaacgatgaacagaacgggcccggagagtaagggcaaagagaccggatcgaattcggagaaggacagaggagttacagaaggaagatgatgaagtctgaggtggcgatacaccgagaatgcaatatcctgagaagttcccgtttcggttgcgtagaagatctgaatgggatccgattcgtccgtgtcttgatgatcgactggtaacgtgagaaccattctgagactttctatctatctatcggaggcctgtatgaaccaggcttgatatttcctgttctctctctctctatcttctctcggagaagtccttgaaagaaagcgggaatatatatgcgtatgtgagtgcgatcgtatggtgtgtaagtgtgcgtaaggagacgaaaggaacgaaaaataatcttgatcagataaagactcggctacgcagtcctaccgattcccttcgcttgagcaaagcagatagcgccgctctttcttcagagcaagcctgtatcctgatactgtttgatatctaccattccgtacaagttatagtccaaccctatcatatattttaatgaggtctagaagaattgaaacagaggatgaacaggatgaacctatctcctgctctatctgagcgtaggctgaaggcttagggtcggtctgggggacttgggtttgagcggcagatgtttatccgatcaaatcaatcctgagatcgtttcctcgtcacatcaagctctttctactttattcctttcatcttccatacctacgtgtattctccgctctcaaatccccatcaaatcttagccaagatctatgtcgtccaacccgagctcaagaaaaggaactccagcatcatccgctaatgctagtattatcctcaggagacagctcatgggtcagttgtctatgtgatgatcttcatcctgttatacatttgccctttcgaatctttcccttcaggccaatcgagttcgttcagatagatggaagaagctatagtatcgccttctatggacgtgtcatctagtaaaaccgatctgagcatcagtctttggacaggaaatcatcgacccttgccaccacatgtcgtcctcatcaatctcttgcctgatatctcttctaccttgtctcttactgacacactttctttctcttttctttgtctatttcgtttggattcttctttcctcgaacagagctccgcaaacgacctgtcgatgggttctcagcaggcttagtagatgatgataacttgcttgagtgggagattttaatcatcgggtaagtccatgtgcctgcagtggtttatttatgcccaggaggtatccaatggagaacacaagagtgggggtttcgagtgtgttcaatattctagcacaattaagcaacactgattgcagacagaacgggtcaatttgataatcgaatccatgactggactgtcctcccttggtgaaggatctgagctgaccatcaaactgtgtatcttggttttggttatgaattgtcgatgcaatctacagaccagcagatactatatagtgagcctcaaattgttgattcttaatatgctttctagtgcatttactaattctacactgttcgatgctttccgtcaaaccaattgaccttgccatcttcagtgagggaggattactcaaggcccgaatgtcatttcctcccgaatttcctcttctacctccgaccatgactttcacgaccgcaatgtggcatcccaacagtgagaccaaagaattatgtccctctttctctcatttttcctcagataaactcatcatgttcttgtgtgattacagtttatcctgatggcaaagtgtgcatctctatcttagtacgtttcggcgcgcgctccttacacttgtctggcccggattatgtatacccgctggctaacaaatagctcctaatatcattgtcacacgacctacatgcaattcagcatgcgcctggagaggaccagtggggatatgaggatgcaaacgaacgttggcttcctgtacacactgtagaatctatcgtaagccatcgcttcataatcccgcctgtctagatcgagtgctgttttgcgaagaattcttatattgagccaatctcatgatcttcacctaccttcagcttgttagtgttatcagcctgttgtcgcaggatattccaagtttagattctccagccaacgtggacgcagccgtgcgttcttttttgttctgcacacttcattcgcgccttttctttgccgaagaaactcctcttgctttcatttagaactaactagttgggttctcttatacttgcacaaccatccggcgggtttgtggcgttcatagaaagaggtccgggaagatccagcaggtcagtcttttcttccactctcatcaactctcaagataccctacttaccaatctcgctgttttggcctctaatctaattggaacacaaaggttacaagaagaaagttcgacggctcgtacgacgcagtgctgaagaagcttacgactgaatgttctctgcttttcttccatgtttctactgtttttgagttctctctttgttgattcacggtcgcgtctccgctcttgactgttcccgatctataccagctatacatttcgtacaaccaatcttccttccatcgcgacttccctacttttcatcctgcacttcgcttttcttcttttgttttacagtgccctcttctgccgtactttcacatctattaaacgaatgctagctatctcaatctcatggcacagggtatttcctgaccaagccttccttgcatcgtatctaatagggctcatgatcaacgggtaatgtagtcgttagccatcaaaaacagtgatatcaaataatcggtatcaactaaccacagaccttatcgctaattgctcaaagtgaaaggcaggtctggtccaattcagatgcagaaacagaaacgcgttggaaaaaggagatgtaacgttgagttgaaacacaaaataggaagagagctacactcatcattcctcctcctctcaacgtatcctgtttcttctcataactttgatcagtatcttcaagggcgaaggggtccaacccactatgcatctcgtcacccagcagacagctcatgcgttctcccccggagctttcgcgtttgctcaagatgctgctttccgaccaagctctcatcaaggctcttccctcacaactgaggagcctccttcagctctccgcttgaaactcaggtctatctttgcatcctcactatcttcctgtgacgatccttctgctcccactccaaccacaccaacatttcaaacctacatatcttcacctttcagcgtctcttcagctgacctagatgttccagccgaggaggagctgacctggttagggaataaggtcatctggagtaaaggaattcatattcatcggacatatacttttccggacaaggccgtcgtcaagcatgctttctttgcctggttcgatcaacaagacgagtcgatccgtccatcaacatctcgaaaagaaacccttggagaacccgttcctttctcttccttttccttatcaccatcatcatcggcattcatctcggagggcacacgcgtcgctgctaaatcttcaggatcaaattcgtcttcttccccgaagaactcttcattgcattcatcgaagtctgtcgtacgcgccatctgctttctattctccggaacagtcgaggtataccttccgtctggctctgcattcaccgttccattccctggtgtcggtgtcaaagcatgggcgctggacttaggaatcatgatcgagactgaaccaaaagcgtctttggacataccaaacgaagtaagacgatctagagaagagggaatatggaagaacgatcttcgattttacgtgctggaggatcctctcagaggtattcgaccggtttggatccaaattcctccttctgctggccagctatctctgacaagtagcggtcttaatccaaatgatcttgtcaactttcttcatgtctttccttacggcgcatccttgcaagcttcttcatggccttccattgccatagctcaacacggttctagctctcgcctctctgtctaccgaacggtctctccttcggccatacccctaaataaagatttatcgatacccgtcttatcagcttcttccattatattccctccgaaaccaccgacagttcaccctccatcacccaatacatcgctttcgttctcctggcgtcgaggcacaccatctaaacttttttctcctaaaccatcggcgcgctctccataccaaacagctcttccaagatcaacatctgctccaacttctctcggacaaagcctgcataaatcggtcatgggcgttgagtttacggcgcctggtgaaagagcggatctgaatatgagcatggacaggctggtcttgattcaacctggaaaggaggaggaggttgatagggcaggtatagctgaaggcgcagctggtctaggtccagatgaaggcgaaggtcgaatggataatgtggtttgctgggagatcgtcggcagttgggaagaggacagtttggcgtgagtttcgattctgaattcgtttgtttgctcgaaatccgactgataaagccttgaaccggatgattagtattcaccctagctcaactctaggatttgtgttggtcgcagaaggtaaacacgatgcctcattgcgtatcagtcacccatcatctcgtctagcaaggtctttccggctttctgtccgggaaggacgaatcaatatggaacttcagagtaaagatgaagctctagatgatctagaggaggacgcgaccaaagagctagacgaccagaaaattacgtcgtcgtgctggagagcactaaagaatgtgcttccccgagcagatgccagaatgataagacgacaagtgatgatctcttcagaaggaaaagacgtcgtccattctggatggtcaacattctcctcggtgcttcttggccatcttggcttgggtccaatcaagaccactacaaatggcccattatcacaaccatcatccgcatgggaaaatgttctagcaagcacgtccaacacccaggaccctgctctccaagctcttcgacctcccttcatcagccctccatcgccgatccaattgggcatccaaacaaaggatcccgccctgacagctagcgtgctacaggcgctgcatcttgtagccgaggaatgcaagttggatttaggaagatactactggttgaatttacttggtgaagttttgataaggttggccgcaggtttaggcaggagagactgggtcgattactggggaaggttgatcccaagagcaacacacggtctgacaggtatgtgtctttgtctacacttgataagagatggcatcgactgatgcttgcttattattggtcaattatgtaggcttgagtatgagcgcatatatggatatgccttctccaagagatgtttatgttcatctctcatctctgatgctggattccaagactccccctccttggccttccttctccacagcatctctctcttgtatctctgcgcctcactctaattttcgaatagatcccactccacatacaactgctctgctcgcaatctatgcctcgctgtctccgataacctcacctggcctgacttacgcagaacggtgtgctcgaacagtttctaccatggtctctcgaggtttcggcgtgccagagttactgcgcttgcctttgggtgttgcgacgcctttgttcgaggcgttgaggacttgccaggcgatgccccctcccgggttgagtgagcatgaatacgatctgattggacgagaagatttaggaagtagagataaaaaagcttggaaggaaaggcgtgggagaccacggagagtgcgtcctcccttgttgtttctctgtcgattataagtgcaggagcagatctaagcttggaggctaactcgtgtgttttatctagaataagttggctaaacagtctatcaatcaattggcagagctgtcttctacgtcaaaagtacagccgatagaccttgttccgtctactaatggagcccttcggctaggctccgatcgacggttggaagaggttgagaggatgttgtctacgacacgagtggttgggctgacagtcaagtgcacattgaaagacgagtaagttgccgttatctatctaatttcttatttggttttccgtttcaatcttgaacgctgacgaaagagatgtttccagtgaccccgagttaccaagctttcagaagacgactgctctcaacgcagcacgaaggacgtccgccttgccgattggacaaggaatgttcaagttctcatcttgcgttgcctcctctacgcgcccctggccgatacagcccattgaatatacagttcgtctatttccggacaaaaccgttgtaccccaagatcgactcattttggacaatcgggattggccagattttcataacggcgtggctgccggtcttcggattgaatctggtggaagtgacatcaactcgtcttggattgtgttcaataagccggtcgagcacaatgccactcatgctggtttcttgttcggtctcggtttgaacggacatttaagagatttcatgccatggcatacgctcccctatctagactctcggcacgagtttacagtcattggcttgctcctaggactagcttcgtctaacgttggaaaccaagatgagctactcacaaaaattctctcgctacacatacaagcgctcttacctcacggagcgccagagcttcatgcttcgcctctgacccaagcttcggcgcttgtcggaattggcatgctctacatgggctctcggaatcgacggatggcagagatggcgctgtcagagatctctcgtcgatcttctccttcctgggcatcgttccgagatcatcaagaagcctacgcgttctctgctgcgatctcgtttgggatgatcatggtcggccggggaggggatgtcgagacacaaggagatgttgatttggtgtctcgattgaagatgctgatgtttgggataacctcggttgcgagcgtaccggaggataggacgatcgacatcaatgtgacggcctgtgggtcgactttggcgttgggattgatgtatctcaagtctggccgttcggacattgccaagttgcttgagatcccaacttccgttcatgaactccagcttgtcaggccggacatcatcctggttcgaacgctgtcgagaaatttggtgctttgggacgagatcggaccatcggatgaatggatccggtcgctcgtgccagacttcttgaaaggaatggttggagatgagaagtcgatcaggcaggcaaagaaccagaacgaggagctggcctactttaatattcttgccggcgcctgtttcacgattggtttgaagtatgcaggcacagccaggagttcagttcattcgcttttgcttcggtactatgactttttctggtctctttcccatgttcccggttagttatgtgtttctttctcttgcaaggggctggcgagtttctcaaaggaaaacaagtagattactaatttataagaaccgtccttcttcacctttttttttctttccatcctctcatcctagccacatcattcaaacaacgaatcagactggcgaccgctcgttcttgcttaggactcatcgcgatctctctcgccgctgtcatgtccggcacgggcgagctcagcgttctttctcgcctccgactcgcccacggaagtcttgaccgagagtccaactacgggtttcactctgccatccatatggcgctcggcctgctgttcctcggtggagggaaacacaccctcggttcgtccaaccaggctatcgcctccatggtctgtgcgttcttcccgacgttcaacatcaccgagaacgagaatcgatcgtacccgcaaccgttccgacatctctgggcgctcgccgtggaggccagatgtttcgccgcgagggacatcgacacggacgacacggtctacctgccggtcaaggtgaggatcagggaggacgggaagatcgggtgtcatcagttgatctcgccgacgttgctcccaccgatcgaccggcttgtgtccgtcagggttgagagtccaaggtactggccgatcgacctcgatctcgggggcggccagctgggggatcactcgatgatccctgtgaaacggcgggccggcttccagagttacgccaaggacccgaaagggaaccactcgatctttgtcgtcggtgggctgacgaccgggttggccgatctgggtcctatccagagttgtctgagtgaccggaccgggttcgaccaggtcggggccaacgcggacgtgtttgtgaacgatctgtttctccgttcgttcgtccgattgttctgcgcgggcccgacggccggtgcgaccgggccgacggagggactggtcaagttgtgtcgagcgtcgtttgtggagacgttgatcaaggatcatccccagctggtgtttgtgaacgtccaactggaccgactcgccagggcaaggccgggtctggactttttgccgttgttcattcaggatctgcatgtgttgaagaagcatgtggatgcacttcagtcggaattcaaccttgtctcatccgggac

SEQ ID NO: 1069 - DNA, 956 bp, Xanthophyllomyces dendrorhous
gtagagatggacctcggtccagaagcaggcatagaaggaagacagacattgatcagagcatcggccgtccatgctacgctcttgacgatccgggagagctcgctcggaatcttttcgtcatcgtccgatccgagggactacgtccagtccgttcgagcctctgcgttggcgaaccagagagggaacggagaatggagggtctcgcccggtctggcgatgtacatcgcctcgctccgacttcctcctctgaccgagctctcggtgctttctgcttccttcgcccggtccttccaggccgtgcgggcgggtcggaccggagtgctcgcaccgagcgaccccggacacgcacccggacccgacggaagcgacacgcacaccgacatcgacagagagatcaaacacatcctcaacgtggtcgtccagaagaccatccgttcgcatccccggttacgagagtgggacgagttttcccggaatgatctcttggggccgttactttcttgacgacgtatgtgtgtgtgtattttaggagatcagaaggagattggacaaaactctatctgatgctccctcttttgcttagaaagaaaaagagaaagacaagacagtacagtaaaaacaaagatgaacacaacacaaagataaacttcttgcttcttccctggataacaagagttagggttatcggtgaatgttgacaagacatcattttattacaatacggatgaaaaggtgccaaatagatgagggatgagaataaaaagaggagggggggggaaggaactttcgaagggatgcagacgatacacagtataccatacacaccctctcgatgttgttttgttgttgtgactactcaagaaccaggatgcgaaagtgaacaagcagaatgatgataattttgtgtgaagaaaaaaaagaagaaaaaggaaagaaagaaaaggaagatatgaaac

SEQ ID NO: 1070 - DNA, 3327 bp, Xanthophyllomyces dendrorhous
aattacaagaacgcagtgggtggaagcgcaggctttctcttccttttctttcagagctttcttctgacgggcgcgcgccctttttcttttcttcacgttcaagccacagtcttcgtctttgactgagtgagagccgctcgggcgagcgaagcctggattcaaagggagaaaaagaaaaccaggaggaggaggggggaagccacgtcaggttttttctcttcactttcacatgccaagacaagaagaaaaagggacaaaggaacgaacctcgttgagctggttaagcatatcaacactatatcccgttccgatacgaggtgaagaagaaaaaagacaatgatccatccatccatcgtcagccggtggacattggaaagagagaaaaagaaaggggaaaaaaaaacacgggacgactcacgtggtctcccagttgacacaggcatccgtaacagagataccgtaggccggctggccgtttttggggatatcctgtcttccttcgttcaagttggactcgaacatgacacctgtgatcgagtcgtctccgtttcggagttgttggcagatatcggcgacgacctgggttgattggtgggtgttgagaggtgagggacgaagggagagaagcgcaaagtgagcgagaggatagcggaggaacaaagagagagggggagggggaatgaaagagaaaagaagaagagaagaaaagaagaaaagaaacactcaccacgggctgcctcttgtaatcctttgaagagtttccgtgggaggcatcgatcatcaccgaagccttcacatccggccgggctttcgacatgaacgccgctgctttctgaacgtgctctgtggcgtagttcggtccggaagttcctcctcgaaggatcacgtgaacgtcctgtgtgtgggtatgtaggagagaggagaggaaggtaaacatcagagaaaaagggaatcagtctggttgaactgcacgggaaggagatcattcaactgtacgggtttaccttgtttccagatgttcgaacgatggcagccagacctagaaagaggatgcgaacaaggaaagacggagagagtagacagaaagagagagagagagagagaagagaaaaaatgaatagaaatgagctgcagactctttgaaaaggaaaaccaggaaaggttgatcactcatgagaactcaccctgagagttgataccgaggaaggcgtggggagcggaagacgagcgcatggcgtctactgcgacgctgacacttccgtctgttccgtttttgaaacctatcaagggagcgcagagcgatagattgagttgagttgagaacgtcgagacgagcaagatggatggagagatgaaggttagtgaggggttccaagaaagagaagaaaaagaaaggaaaataagaaaaacgaaccaatggggaaggaaactccactagcgagctctctacaaggcggatgtcccggaagagtcatacgaaataagcaaagatgccatgaatggatgtgagtaaggggaagcgttcaaatgattttttatttttattttttgaaaaaaccacaagacataccggtggagctgagattcggtcgttcgggcaccgatcgcgccccacgagacgaggtcggcaatgtactgaggtctagttttgaaaaggggggaaagagagaatttcgtcaaaaaaaaggacgcacatacacatgaagagagagtgagagaacgagggactgacgagatggtatctagaagctcgcaaccgacggcgacgttgagggagagaatgtcgatgaggagctgtctggctatgcgaagacctttgttgatctatgtgtgtgtgggtgtgtgggtgagttgggggtgagtgaatgagagaatgatcatgcatgggaagggagagaaagagagaggagttagaggtaagtgagatagattcgtagagggcggggcgggaagaacgagcagaaagcaaattagagaacaactaggacacaccttgtaagagttgtcaagatcagggtcactgaacgtgatgggatgaaggtagagacgagagaaggttagacatgaagaaaagggatcagatccagcttccaggcaagagcgagtggagaagagtgaatgtttttacttgatgagtccctatgagagagaagggcaagaaaaagaaaagaaaaggaaaacgaggcaggacgggtgagcgaatgccaattgcaagagaggaaacaactaaactcaccttccaaccgacggtcgttcgaggtttctggagagtgagtaggagagtgggagaagcagtgacgattagaaaagaagcgcgcgcaagcatgatagaaagagaaaagaacgaacctcgctaagaaggttagggaaaagaggacggaaagacatcaagacaagaaaagggatcagacgcaatacgacacatgatgccaagagcaaaccaccaaacgggacatacaagtacgctcgcatgatgatgaccagaccgggaagtctgtccatctgttctctgagcctccttgcgtactcgagagcttcttccgggttgtggatcgagcatgggcctacgatgacgaggactttgttgagtattctgtcgacgacggccgcaccctgttctctggcgagcctgacggtttcttgggcggcctcggagacctgggaggtggattggaatggggaagacgaggcgaggcgaggcgaggcaaggaagggaggattaggatggacagatcagtgaatgacatgacgtacgggatgaggccacggccggcacggacttaccgggaagtcatgcttgaggagtgcaggcgagacgagagggtcgtagccgagaattcgagaatcgtccaatctggtgtgaacggacggacggacgggtgtgtgtttgtgggtgaacgaagatgaggggcaacgaggggccaaaagagagagagagaaagaaagaagatgtgagagaaggcgacagaaggaaaagaagaagatcgaatcagtgggattgcatttgatgaatcgagtgagtgagtgggttgatgagagaggagagagagagagtgtgtgtgtgtgaaggtatgtatgtatgtgagatgaagagctgcgctcaaacgaaaacgaggcaaaaggaatgagaaaccgactggatagtagcttgagtcatgtctgtgtgagagtgtgagtgtgtgagcgagagtgagagagtgagggagtgagggagtgagtatgggattgaagaaggatgagacgatggaagaattggagagttgcccggaaaaaaaaaaaaagttgattcgtttcaaatgtcgtccgggaaatgaactgactcgaacg

SEQ ID NO: 1071 - DNA, 2828 bp, Xanthophyllomyces dendrorhous
gcacaggcacaggcacaggccaaggggacgcgcagcaggttcaaacgagggaattttcccagtcttggttcatgatcgagacgatcgctctcatcggccctgacggtctggcggcctgccgcccacgttcgatcggccgtccgcagtgagttggccgttggggccggcaagtcgagggaacccgagagaacgcggtggaaaaggaggcaaggcacaagtgggcgaaccagatcaggcacgccagggccacgcacggcaaatagagtttatccagcccgagagcccgtgggtggatgggttgtatttgtgtgtatgtgtgtgtgtgggtgcgtgcgtgcgtgcgtgcgtgctagagagtgtgtgtgtatacgcagtgggagacaagcaatcaagcatgcttactaatcacacacacatgcaacacacacacacacacattctctccaccctcccacagatgactcgaccaccatctgaaagaaccagccagaaggacggtggtgggtgcatgtatgtacgtgagtgagtgcggggaaggcgagtacgtgtgtgtacgcgcaaggaagaacaacgaagcgcacgctatgagcaagcacaactgggcaccgaacgagaacagtaactgtcggtatcttcccaccgaccgaggcgtctcccggcggcaaccgccggtgcccccctccgcttacgtcagccacccagttttcttccatctctttctctctccttccaaaagtctttcagttttaaacggcccccaaaaaaagaagaggcgactttttctttccttctctcccatcatccacaaagatctctcttcttcaacaacaactactactactaccactaccaccactacttctctaacactcttaccatcatggctgtcaaggttggaatcaacggtttcggtatgtgtttgtttttctcttgagctccccatcggttctttcgcttgtccatgtttctttttcctttcctttccttttcttttttctccccactgccttttttttttctattcttttttttttcctttcctctcgccttcatgcatcgcactaacaccatctcatctcatctcactctgcctcgtcttacctcctacaggacgaatcggacgaatcgtccttcgaaacgctatcatccacggtgatagtcagtatttttttaatttctttttttccccatcaatttccctctgctcctttactcatctctttccatctctctcccactctcctacagtcgatgtcgtcgccatcaacgagtgcgtctagatcgaccatctcgtcgtccgcccaaacaccgtctgacaccatcctgttaacttttctctcctccaaagccctttcatcgatcttgagtacatggtctacatgttcagtaagtctccctccccctcaaaaagccgaaacaaagccgaacagaacccgatctaaccattcgttcttcttccctttcctcttccgtctctccctcacagagtacgactccacccacggttcgtccatccctctctctgtcccgaacatctccgaccgggccttttccatctcctgatccgttcgcgtactaacccataccgtacccttcgtcccatcccttcaggtgtcttcaagggatccgtcgagatcaaggacggcaagctcgtgatcgagggcaagcccatcgtcgtctacggtgagcgagaccccgccaacatccagtggggagctgccggtgccgactacgtcgtcgagtccaccggtgtcttcaccacccaggagaaggccgagctccacctcaagggaggagccaagaaggtcgtcatctctgccccttcggccgatgcccccatgttcgtctgcggtgttaacctcgacaagtacgaccccaagtacaccgtcgtctccaacgcttcgtgcaccaccaactgcttggctcccctcgccaaggtcatccacgacaactacaccagtcagtccttttctttgcacttgtctggccttttctttgttggttcttttccttttgtcaaaccatccatactcaccctgcttttcaccttctttttcttcattcacgtattccccctcccgtccaccagttgtcgagggtctcatgaccaccgtccacgccaccaccgccacccagaagaccgtcgacggtccttccaacaaggactggcgaggaggtcgaggagctggtgccaacatcattccctcctccaccggagccgccaaggccgtcggtaaggttatcccctccctcaacggaaagctcaccggaatggccttccgagtgcccacccccgatgtctccgtcgtcgatcttgtcgtccgaatcgagaaggccgcctcttacgaggagatcaaggagaccatcaagaaggcctcccagacccctgagctcaagggtatcctgaactacaccgacgaccaggtcgtctccaccgatttcaccggtgactctgcctcctccaccttcgacgcccaggccggtatctcccttaacggaaacttcgtcaagcttgtctcctggtacgacaacgagtggggatactctgcccgagtctgcgaccttgtttcttacatcgccgcccaggacgccaaggcctaaacggttctctccaaaccctctccccttttgccctgcccattgaattgattccctaaatagaatatcccactttcttttatgctctacctatgatcagtttatctgtctttttctttgtgcgtgtcggttgtgcgactgtacccacctcttgagggacaaggcaagaagtgagcaagatatgaacaagaacaacaaagaaaaagagacaaagaaaaaaaaaaggaaag

SEQ ID NO: 1072 - DNA, 57127 bp, Xanthophyllomyces dendrorhous
agattatattgcatcttttgaatttcctatcgccttcatcctcgccagagaaaaaagtttcaatcacatctgttgaccatcaccatcatctccgtcatctctcatgactcccttgcctgtgaatcgaccagtccatcagcagcccttccagtctttctttctttccatctcatcttgattcccgttttccagatcaccagacttacaaaacacgcctctttctagatcgcccaagacccggaccgagaatcaactctccactcccacgccgcaccgtatgtcctccgagtcgagtcaccagcattccaaacccgacaccaacaacgccgatgccggttccaatggtctccatccggatgccggcatctacaccaacgccgagtttctatgcgagatcgtcaacgacatcatcctggcggacatcactctggcggataaagcagctcggtttaataatctaacgctgggaaggtctggttcccacactctccgctcgggcaagagtcagccaggcatcagcagcagcagcagcagcagcaataacgacgagaccacgagccagcgacttccaagaggtctgtttgggctagctctagattgggtctggcccatcgctcagagtgaccgaccggttggtctttctcttcttttttcttttcttttctttttttctttctttctttctctctcacgtccatccactttttactcaccatggaccatgaatcttgtgaacgatgaatgaacgaataaaacccccttccttctttccttccctctctcctccggaaatgccacgaaacagacagcggaaagattatcagcgctctacatgctcgcgagcatgtacactcaggccgtcgcactcgatccattcagaggggtctacaacgatgtctgggtttcaggacgtttggtaattattcagtttgctttcttcacttggtcgcagcctttgtctattttttatttttatatttattttccaaatggcaagagaagaaagaacattccccccccaagtcgttgacccccttttttcaattattattattattattatttaatctaatttacttcatgcttcgatcggactcgtcttggttggagattattcaggcatcggacatcatcccggcttttacatcagcatctccttcagatccggctttgttgtccactgtgggactcgtcttgctgctcgggaagtctcatctggtgcgttccgctttttccttgttccctttccctccctcagttgcgtttctatccatggtctttcgaaccaaatccatctctgtccacggactgaacgttacttgaactccaacgctcaaccgacggatggcgaaaacgaatagatcgaatacttcacaccatccgagattatccgtcaatgtccgcttgttagagacatcgtccgtccgagcggcacgcatggaccgttcgttcttcccttcctcctctctgatgtcttgaagagggatgtaagaaaagtgtgttgacgctagacagtttccttttcgatcgatcgctgttggcctggcaactgcagcgacagcggtggcgttggcgtggatgggaaggacgggcgattggccactgtggaggattttgaatccacagtctgtctctcgttggatgctctcaccagatcgttagggatcaaagaacgaaaggtgcgcgcggccgtctctttcttcctcttccttttgttcttgttctcctccataggctcacaacggatcgtctccgcccactcgctctactatccgcgcgcgcgcagaccctctctagatcgctctcccagatgccacccagctcgatccccgggctgttcgtgccatcagaaatcccgccgctcgttctttcgaacccatcgatcggaatacaagtcgtccgatccatcctctccctcgatcaacccctcgatgtttcagacgataggaccgagtggccagatcacagcgcacgcacaacaatcacgacggcagagaacgaccaggggagagaacagtacgcgatggtgctcggaaccttgccaccttctctttcgtccctggatgtcttctcgaatctgtttcgcccgaacccgaacccgaatcctctaatgacaaagacggcggtggtggcggcggcggcggcggcggcggcggcggtaggggtcacaaccggaggatcgcgcacttcaccagattctcacgtgcgttcctacgccgaccccgacggcaaccaactagaaaaacgaaggaaggaaggaaacaccgtgcgggatctgctaaaggcccacgcgttaggacggttcgtctcgaactttatcaacgagctcgatcggttggattgtgtgcgaggcgaggatgaacaggtcgggaggttggtccggattgtatgtattcctttctttctttctttccttctttttttttgtctttggcctgctcctcgcctcgccctttctcatctttcttttcctttcttttattcgttggttctttcgtcgtcccctcttggaattcgcgtgtttgttgaaacggacctgacggctcttgtctttccacccacgcctccctccctgccaactcggataacctccacttgaacctttgggcaacgaacgaacgaacgaaaacaaaaacacagttatccctcttcctgtcaaacctccttcagacgaccgacttggtcctcccagaaacgatcctcatcgagtcgacttcttttgcccttcggttttcccggttcgaggacgctcagcgactctatgtcttgctttcttctgcttctgcttctgcttctgcttctgcttctgcttctgcttctgcttctgcttctgcttctgcttctgcctcgtctgcttcttcgattccctctccttcttaggagaacgtgaaggttgggattctttgtaaaggggatgaagtgtatgtatagatctttcctcttgcttgcgtctaggtcgatgtagccttcgtttgagatggaaaccaaaaagggaaagaagatcgagaaaaggagaaagaaaataagaagaaaaagaaaaaagaaagaaaaaaaagaagaaaagaacagaaaagaaaagagagaaaagaaagagaaagaggggaagacgaacgaatggagaataacgtcatcagatccagtcacagtagacaaaaccccgttctactctgattgaaggccctctttaggaaaaaaataataaagcaaagccagaagaaggaaaaaaaaaagaaggacgaaaagagagagagagggagagagatgaaaagagaaacacacttataagaacttggagagaaaaggaaagaaaaagcaaaggatgagcgacagacgaggtcaagaaaacatgaaaacgaaaaaagaaaaaacgagtttatacagaagtcatcacgggagaaagaagggaggaaaagcaaatgtagagatatgggaacagaaggaaccaacaacaagatttgccagggatagtaagctggggtgatttaatgtaagaccggatgcgaaaagcaagcttatataatgaaaggattgagagatgtgaaccgagtgcctacgcccgcggaagtggcgaggatgtggaaagaaaacccaagaacagtggtcggagagagagatttagatagaatcgagctcgtaaaggtattcggtcatcagggtcgttcctttttgaaatgaagtaatggtgcgaggctggagatctggcaagctttgcgcataaagtcgtgctgtaggaccccaaaaggaaaataatcagcccggcacttcgacaactcgaaggaaacagcaagaaagagaacctacatcgagcaactcggtcgcattcgcccttgactttacgtccacacacagacatacagccaaaaaatctttgagctccagactgagcgattcaggcgatttaagtgaaggcgtgccgttcgtggcaatcaggtagagcgctttgagaggttcttcatccaggtaaggcggctccgactcgatcatctcgatagccatgataccaagcgaccagacgtccacttttgccccatactgcttttgcttcaccacctcgggtgccatccagtagggcgtaccgaccatggtggcccgcttcgacttctcctcagagagctttgcacagaacccgaaatcagctgtgtgaataggtcagagtcttgattagtccaaacatttcaagaaaccacatccaaagaaataaaatgaagaaggaggagagaaaaaaagggagagagagggaaaaaaaatcagatacgaactgatcttcacttcaccagcgctgttcagaagaacattatccgacttgatgtcacggtggatgatacttctctgatgaaggtgattcaatcctttgcatgtcttacatatatatatcacaaatgcataatatgtcagttccagtcttggatgttcataatacgtatagagaagatgatagaacagacctcatagcagatactcgcgatctggtcttcctctagcttgttattttcaatcacatccgtcagcgcaccaccctccatatattccatcactacccatagctcgttgcctttgacaaggaaggagtccaagtagttgaccacgttcgcgtgttttgattctttcatcaccacaatctcgttcacaatcagttcctttcgaggctgctgagcaagatccatctgcttgattgctactttagacccatcaaccaaggacttagcaacaaagaccataccagatgctctggagggatgaaaactcagtctttggtcagatacataatcgtgaaagtcgtcatcgagagtatacagcctacttacccttgcccgacctttttgatcttggcgtaaagtgtgttcggttcctccttgctgacaacgagtcgaagccgatccatgatctgggcctcgctgagagtactgatccgacgttccgtcactgtcgcagatgccagcttctcagttgtctcagctatcgggtccttcggcttggacgacgaggtcggaacctttacagctgagcttgtacgtgcgttcgaaggagtagggttgaaagaagtgacagttggaggaggaggtggtggtcgggtagttggcagggaaggcttgcgagtgatctgtaagtattttgtacccaggtcgcattcagccaacgatcgaggtacagagcatatcgccaaaaaaaaagaaaaaagaaaaaaccaaactcacatcacgaggcgtatacaagtccatttgtgccttggtgggaccgaggaccttctcgttgaatgtcgaatctcgagtgaccaagggttgtctatttacttgcacttccggctgccttggtctgtttggaccgttcgcatgcgaattcaaactggtgcttgatccgttgggttggcttgcgcctgctaaaccagttcctccaaacctgggcgcggtcggttgtgctgaggtatggttatatgcagttggagtagttgagagcaagccctgctgtcggtgggccgggctaggcaaacttggtttggagagatggtagtcgtccaactcgcctcctcgtttctgaatatcggtatagaattcgagtacgtccaaaactgcctgaggatttcgagcgtagtcttctttggtgatggccgaggaagtaagaagccgagtccattgctctggcaagccctattagcaaaacacgtcaaggtcgagagacaagcgagcgagtaatcagatctctttgttcttatcatcgaccgtaagacagactggacagaggaaatggaaagtactaacagtgaatgctccgctgacagggtcaaaaccgacatggacctgatgaatgaagttggttgggatgctgacgccaaggggacttcgattgtagatatcatccatccagccataaagctcttcgtcgcccttgacagcgatgtaatgtgctttatctctggtctggacttcgatacagtacggtcgaagatctgttcgctggacaccttgaacatgctgtaggcttatcgatagcgaggctgaactggttgtctgcatgaagacaaagggaacaaaaacaaaaagacaaagcggtcagatatgttacttacgaccgttcgaatgaaagacgttataggaaagaaagagacagcaccgacctcgttctttctgaagcttaagttctgattatctagaaccatccatttcttactccaaagcaaaaacgagtccttgatgttgacgtaacctgaccgagggggaaggatcgagcgagcgccttggtgagggctgttgacgatagggtacgacgccggggtttgttgcctcgtcggtttattcaaaggctgatagtttacaggcggagctggcctcgacggaggagcaggagcagcccgggtaggcgtcaaggaaggaccctggtaatgagccataacgagcaaggagacaaacaacaggtcgagggcagcaagggtggaaacgtgatggtttggtcaaaggccaaacaacgagatcaagcgggcgatgttttcctttttctccacaactctcctcttcttgtcacggacgtcgccgttttaacgatcattctgttgtctttcttcaccatcaaccatcttactatctgacctatgtatctccagttcttttgtccttatatcctagctcgaccagatgacctaaaatagctttggcttgactcgttatcaaaccgctgttgatagctcatctaaaaggagaagaatacaactttaatccaattctaatcaaaaattctgattctcagtcttctttcagtctcatgtgtgggcattccgactctcaacgatcatcgtgatcaccatttttgagatggatagagtcaagtaacgagccattccgtgtgttttgtcttaataaatcgatatctgaaaagaacaagattaaatttttatataataacagatttgctatcccatgtatttatactacaacattaccgaaggtatcaaggtatcagggtatcaggagattgtcttctgtatcctcactgtgactgagatcttcgaatcaactcctttatcggagtccgacttatctgagccaatcatattttcgtaagcaaagtatgcctcttcgtctttgcttgatttgcaaaaccgatttaaatcggacacagaggcaacagtagttccaagttcggttaaatgagaagaatcatagctcgggggtctgagagggcagatagaaggcattaaagagaagaaaatagagtttcattattagcatgttcgataccagggtaaaaaggagaagaaacaaaaccatacgtactctgatgtgccaaaagccctcatccagatgtagctgaaagctgcagtaatcttgttccaggtcgaggcgtgaaaagacaaagcatcctcgtgcattccaaagaaagcaaagtatatgaaagcagccaatgtggtcgtccatcgactgagattgattgaggcccaagaaccaggttgagcgttcaaaattgattgatcagtctcttgcacaagatcaaagctgtggtgaaggtccgcccacgaataggtaggctgcaaattataagagttgtgtatgatctcgtaaatcccgaaaggaagggagagcaccatgtcgactgcagcaacaccaataagacggaggaaacgactgctgttgagagaagaagagtgttgctgaagaacggcttgaaaccgtcgacgttgagctaagaagttatagatggcgaaacctggcgaacgatttgaacaggagatcagtaatggattcaaaattaacatagcgattataacgtacctccacaaatgaaggaaccagccgcacatagtataggcgggacaaatagaccaaggatagcatatagctccaaccaggtcgctggaaaacatccaaagttttcaacgatgttgtatcgatgagcttgaacacagtagctgacgatgagaactaaggtcgtgggaagcaaacagatcgcaacatcggaccagaatgcccattgacgagatgtctcggtttgtctagattgtgtaggcgacgaaatagttgccagacgccggttgatgcataaacaagatgcggctagaccagtttgaactgcgcattgtatcttgacaactaacacaaaacaaacgagctagttaacctctggaactgtataaaagaaaagagcaatactacccaccgacgtcacaccatattggggttaggtcttcagctgtattctgatagaccaaagcattgatgaagtaggtgatgtttgcaagcatgcaccaggtcatgagagagatcgctccaacatttctagcccgaacatggggcccacatgccatcaagaggaggaggatggcgagaccagagtagataggaaagagtgcgtctctcatgatcagaggagtacgatcgaaagagaagattatatatcgaatacggtgatgagacgtgctgcaacttttatatgatatcagccaagacagagataatccatggtttgataggattggggtatgatgaggatcaggaaatggccaaaagacagcacagagtggtaacagaacgaatacgttactatatgtggtcaatatcagtaggtctaaagacagctagaatgaagcaaaagaggagcgaaagatgaacaatgggggtgcgtgcggccaaaaatgaagtgggacaagaatgaagaacatcgctcttatcatttgtaagaatgaaggaacgagtagcatagcagactgcatgattgaacaagatgatgaagcctgaagaaagagctttacgcaatagagcacagacatccaaggtacagacaaaagaagtttgaacgagataaaaaagtttggacaaaacatctggattgaacaaaaagtctggacaaggcgaaaaagtttggactacacatttgaataggacatctgaacaggacaaaaaattttggacagaacaaaggatttggacaagacggtttgtcaggacaaaagaaaagcaaatgagaggtttgggcaagacaaagagagtggtcgccaaagctgacgcatttgattggtctattgtctcggttgaagcgatattgtttgtgactccattgatctgttttgtctgaggatctagacgttgtcttcgttgtctccctgttgattattttcattgttcatattgtttccgtttcctcaaatatctgtcacctctattgtccctattgtccctgttgtcttccgtggcttctttttctctcttttctccatcatctccattatctctgttgtctgcgtgagttttctctttgtcttcttcatcttgtcagacagccaacaatgggaaagactgtacagcgggtgcagacgatgccctcctcctatttgcataaaacgctacctgaagatcccatccagaacatgttttttcatcatcttcaaaaccccttctcaccactgcctccctcctccactgcctacactgcctacctccctcacttcccccaaatctccccttgtttttctctttttgccctgacaatggacgtcttcacaaccatcttcactcctttcgttgcctccaccgaaaccgagctcacttccgaggccgtcggagagcgaccagagagcaagcaaatgttcactaatttctgtgtaatcgcttagagaattttttttctcgacggctttagctgtaagttttcgacctcgtctgtctctctcctttgcctctgactgcgccgcagctgtggcttatccatttttccattttggtcgatattctgcctaacactagacatacccagtgcatgtcttataccctccattcccatctcccttcttgccctttcttttttttccttataccctcaatagctctggaagcgaccacaatatagatcgtctagtgggtcgagagatgatatatgtgatgacctcattctgaccaccgtcaaaccagactgtctgtcactcttctaccttttgccttcatagcaaaggacaaggccaaaggggcagagagaggagaggagaggaatagcgccggcaggtctcatgtgatgttgtgggattgttggctctgaccgatacgcggatggtgtctggaagctattttctgagttctgggtgatggatgaagttcggagctgggtctcgaggtcgggattgaaggttgttggttagggttaaaagcttggggtaggtgatatcgaaggtttttgggtgaattgtcgtggttttggaagattgactgaagggataggtctggacaggaaggttgtggtctagaggggagctcctggtcttggtgatgaaaggttgtgaggaggatagacttggggtatgggccaaaactgttgggggtaggatttgtcattttgagtcatgggtcgattctgaacagacggattgagaaaggaaggaaatggaccattctagttctatgtagagatagtgtataaaacgggagaatgtggtgacttggtgaaatatcagaatttggagctgaaaagggaggttgggagaaaacttctggttttggctcgaaggttgatcattgaagaagaagaagaagaaggaaatacagggtacgtgtcactatatgatgctttcaatagatattctttcatctagtcggtgccactgtagattatacttgtgtatcccgctttagacgagacagagtgttctggaagtcaaaaacgaggttctgcacttgtgaacaacagagcgtgctcttaaaaaacgattcactggatacaagtacttataaaatcagggagcacttcgtggtggttttctagagtagtcacacagacgacaatgttatcctagtttccgaatgccttaatgatgtttctctcgttgcgctagagatgatttccttaatagagacacctgatcccctcaaactgatcccccaaacaaatatttacacacaaagtgagagtaagttgattgagagaaccagaaagaagaaggaaaaagaaaataaattagctactgtatatacgagatcaccaagatggaaacaaaatagaagcaagatggaaataaacaaaaatggaaataaaactagatggaagtgaaatagaacgagagagaagtgagataaaatgttgaaggagaaaccgaagaaatagaaaagtgaaccaactcgcaacactcggtggttgatgtctagactgctatatccaataaggcttaggtgcatagatgataagcagaaaccaatgtaccatattcaagtattctcaacactggcggtacccaggggattgttcatgaacccagcccctgatgaacagtcacgaaggtgaccgttatgtgagacccattattgagagctggcacatgaccttatcaaccgacaaagtatatcatctcctcagatgcgttagagcatggagaaccgctctagcaagaggctaatcgtagccattatcaggaacctcgaggtcgtgtgttggcaagatcgaatgaatgatagcctcaatgcagctgtactatcgtaagagcagaaaatggttttgagtatgtcctcgccgtaagcagcggacctggtcgagagaaaatatagctatagtgacagatgtcctaaatggttcaggcaacccgaagtgtacttcgatatctggcccaattgcgctctcgtctgagcaagacagaactctatctatttctggatataagaggtgcttatataagagccgcaccatactgcctggtaccgaaaacgcggtgttgccattgacgtagtggccgtgagaacattggtgaatgaaccgtattcagaagttagtctttttctagagcttgactgaatagatgtcggattcctatccagtgatggcatcagttcgcatcgacgggtggaagacgacccagagatttatacttcgttctgagctactgattggtctccggctcaagaaaaaggatgcgaaggggttgacgcgatttatgatgctgtcgtctagccatcgaccgcactgatggacgctctttccagtcgttctggctgcagaatgagagaagttgttggagacatggatttcaggatggacaacgattgtaagccgacaaataatagccatgatgatcatgacgatcatgatgatgccatgaaaattttgagttcgggatgtcaacaacacgaccgggcgccactgtcaatcggactgatgtgaaagaaacagggctataaggtttgaaaaatattggggaggcgatttcgggtgtcaattaggacttgtagtctgaacataacccttgagattcgatctgtgttcgtcggtggcagttgctgaaacgtgttttagcatcttgagacacccgaacaggcaggcagcatagtatttgaaagatttgattgcgatgtcgtccttgataacgctagttttcgataccaataccagatttgggcaaagaaggcagtccatctgcattgaagaggtgcttgccaagggataattgttggaaattggaatccacacgtcatcattgaaggttgtagctcagtggcaagagcggctctatgtagttcacgagacgcgggttcgatccccgccaactccagtttcaacaaggaataacaacgtttctgaagtatacgggtaggcgtcgaaagaggccgcttgctagaattacgaggttctgatgtcggtttgaggatactcgaatgaatctcttgatcggtcatgttaggggttgtatcgtttggttctaagttcggtggctttggcggtgaccttgaattctttcaccaatgctgagcagctatgttcttcaattgaatcgtgagaacgcacaagaagatctattctggtattggttaggccagaccggaccttcgattgtggttttctgggtctaatcgtcaatgaatgggcgaaaaggatgttgaaaggtatagagcagatatgaaagagtcagaaacaagaccatggtggagaatttgaaaagggacgcagggacgcttggtaaaccgttgagagtacttgaatatggtgcgtcggtttctgcttatcatctatgtacctaagcatgagctagcgcactctgctagctggtcgacttcttttcttccccttccttgtctattttttttctccttcctccgcttctaccagaacgcttctttgatgctgaggttctaaaacccgaaattaaaataataataaaagttaagatcagtgattgaaactcagacagaagggggatctggaagagcactatgatatgcccctgagatagttaggactaatgttcaggattcaatgaatggaagagcaaggtcttagcacaaccagaagtaaccttcgagattggtgagggaaggagaacaggacagaatataacagatgaaaagtcgtgccatcgggagttgtcccgaagctcgtgctcttgacatatcataagagcgccaagcctaaaaacatcagcatagacataactgaatatagaacgaaaggatgtttcggacggagatgatagaacccaacatgggaaaaaagaaaaaagagaaaaggaaccacacaaaaaggagtgcgacgaagtacttttatctctgcgtcactcgaacatgcatacaagatagaaaggatgcatactgatatcaagagcgcgaaaaaaaaacgtattgtcaagatgatatgcatttgcatactaggtacatcactcggtcagatccctgaaagccatctagttagatccctaatagtctttcactcggttgcatgaaacatgaagcaggataatatcgaccagcatctcgtcgaattgacggagaaccagatggaccgacatcgaacaacaatagttgtaaggagaaaggtatgaatatgacctcaactccaagctcagtactctcacaaccacgcgtactactcaccctgaccactcacccaccttcacttgcgcgcttgcattcatacatacctcagctgatcattggaaacgcagctgatttttttttaaatcaattcttgtcattttctgacttcgcgttatcgaagctgccatctccggtttttcttcttcttcatcattccatttgtcacctccttctttgcctatccatcattcattcgttgtttgtttgtttgtttgtttgtttggtttcaatatctatttatccaaccttttaatgttacattcgtctgttcatcttgtatctcattctgtttgctcttcgttctccattacgatcttcgtgcacgaggtagacgactcttgacctcaaatatctactgctgatgttctctgctctcacgttgaatgaccccttgcgaccgctaaccttttgctcttcacgagttcgccttcgttctcttctccttctcaagcttcattctcttattttatttattttattcgtctctcacgcccttctgcaacatctttcacaacactattttacactgtatactttgcttcccttcgaatgcttaagctgactgagcgagcaactgcccgcaccctgtgccccttgcatatgctatcatatataggaataggatttgagccatcgcacagcgaccctatcataaacgaaaaggcaacagcttggttttggttgaaacgaaaaggcgctatgagcaacggctagtttgatcaatctaatgtttctttttgtgtctctttgtcttgtttctaacttgttttgattaaatggtaattccagtctcggtgtatcgaaacaatgcgctgaagtcaaggtatttataagaagaatagcattcataaggttcacatatattcaacccacggcccagccaacactccgcttgcgaagtgagtacctctgctgaactcgcaaaagtgtaaagaagtctcggcctgcaaacggaagggatcgatttatttagaagaataacgacgcgtctaaatcagttaatagttcgaaggaactaagcgctgacaaagaacaggcagacttaccacttaagcaatgacacaggtcgatgtgggcattccaggcgtccactccttggtctctcctttagcggaggaagcggccggactctcgttggtagaggcaacgaagggggtgaagatagcagtgaaagcgtccatgttgttgttattggtggtgttgttggtggcggtggtggtaagggaggtaagaaatgtaggagagtagtagtagtgaagtgaggcaatcagttgaggatggagagaaatggagaagcttctggcttaaattgctgtcttttaagttcttcagtttttcattcaatccgaacggtttctgaagaataaaagattaggagatagagtgaaacaaagaacggcgaaacaaaggatagcagacaaaaagaaaaaaggagtgagagacaaaacaaaacaaaacaaaacaaaacaaaacaaaacaaaattaaatggaacaaagaggggcagaacagatcacaacaaagcgggaaaaacgagagcagagcaaaggaaaggaaaggaagggaactcaaggctgaatctgactgaattgaacaggacggagctgaatcaagcaaagtgaaacaaattaaagcaagacggagcaaagcagagcaaattgagacagacctaaagagggcagagcgcgacggggcaggacaggacagagcaagatagaccaaagctgagcaagggtcagctgagcaaagaactaaggagcgtcaagctacaccacagaagtccgggtgggaagagggagttatcgacgaaacaaaagacgcgtacagagtttccgagattgatggtcgtcgcgagtgaacaaaagaatgcttcgacctgaagacaaaagaccggcgcgcttttcggttccctccgacgcgaaattgtctttgtctttagttttaatcttctcttttgttaacttctttcacgcgtcactcatcctttcctgcaagatgatctctctattcgattcgtgtccaattgatgtctgctttcatcttgttaaatattcgctcgttttaccatactcatagcttcgctgtcccgtccacacgaacaaatatcttcacctgttctctctcattccatcatgaaagacgcgattttcccagtctttgcttcaatcgccctcttgcttctagttttatcatgctatccccatttccgaacaggaaatatcggcgctattgctctcgtcgcatggtgttttgcttcaaattttgtctacctcgtcgactgccttatctactgggatactgttgagaacttaacgcccgtatggtgtgatatcagtaggtgaaactagatttgatctatacgtgatggatgattgctaacgatcatgggtctgtctttctctgatatcctttcttgggtgtgtaaagtggtaaaaattcaagccaccacccaaaccggtctggctgctgcatgcctatgtatcaaccggaggctcgccatcatatcctgttccaaacaaaccagcgccacctctaagtcgcgtcggtgggcgttctggtcggacataatgatctgtgtgctagcgcctgtcatcgtcgccgtggtcagctattgtgtgcaatcacaccgttacaatattgttgagaacttcggttgttctggatctccatggatggacgtctatgctatcctaggacttcatggctctcctgtgcttttgggggcgatttcttttgtttacggaggcaagtaaactgcttttcttcaaacatatatgccaatcatgtgtgcttattctcatctgtttctcatgcagccatcgcgatctataatttcattgctcaacgaagacggtttcaagtagtccttcagcaaaactcttccctcaataccagtcgttttgtccgcttaatcggtgttgctggtgtcaacatagtgatttccctgcttttcgctatccgtgaaactgtcttaacggcccattcggtgtatcctaccgtctcatgggactatattcattatgatttcgacctcgtttttacctacgactccttcttcctcctaggagacccacaagcttgggtcgaactcaacctttctcgatggcttccatgtgtggcctcgtttatctattttgctttcttcggcatgcatgaggacatgctatcatattacacgtatgtctgggcgagattgtctcaggcgctgttgcgaaccaaagaacgaatctttggacaacctctgtaagcgccatgtctttcttaccctcgtttgatgtctgcattggaaactgacatcttactattcacctcgtcagaactgtacacgatccttcgcaatatcctaagctcggtacggccgttgcttcgccatcagagtgtggatggtctcaagataaaatttccgatgaagagcaggtgttccctcatagccgtacggagatcagtgagaagagcaatatagacgaaggctctttgccccgtgttggtgtaacgattgaagtagagaaagtgatttcataaatgatgcgcgcgacgtctgtatatatagatatatatgtgtgtacttctagttcgaaaagatatgcctctaatcgtcatttcctattcacgattcgtgaacaacatgactccattcttgatatttaaaatcttaagatcaaccactgaggttcatacatgagtctttgcacctgaaatcttttgactgcctagcacttggcgtatcccgtctgccttgacatttttgacttaaaattatgctccttataattaatctcggtcgagaaacagtattcatattgatggcaagacttgagatacatcaaattcaagattacaactcaacccctagccgtgattccaactccacgttcgctaacatactgtttgatagttttagagacaaaaaaaggcgtacaagatatgttattacaacggatcgggcaaaaataaattcgtggcatccgactatatgcagaaacgtatacatacctgtccaacattgcctactttggcacaccaatcgttaaatctcgcgctgagcgcctcaagctgacccctgtcaagcacacgaggctgtacccaagtgatggtagcggtctgggcaattgcatcgagcgagcctcgaataagttttaatctaaagaaatatcgattgttgtgtcgccagaatccaagaattgaatgacgatcatctcagactcgttagtaatcgaatgtagattggagagcgcgcgacgcattggaaaagttggacgaacgagagtgctttcatgacgagatactcaacttcccgcactggaaccttagtttcttcggcgatgctttggaaggagaacactcggtcgtcaactgaccgtcggaaaactgactcaatcaacgccattaaacaaatcttctgtcgaaggaaagcggtattctcttgaagaatagcctaggtatggaagaccagaatatgaaccgttaatcatcgcttgtttggaactaacagagccacagaaggacgaacctcggtctgtagctggctgacgagagactcaaactttccgatctctccgccattaaaagcaacaagtagcgtcttgatccacgagtgctccgtgttgtccagcgcagctaagattggatgttgcaactgaagacatagcaagaaccgaagacttaaatcagctcgatacttacacacatacaaaaaaacagaatcgaaatgacagacgtacaagctctccgaagttatagattgagtcgccaagaagagcagcgataccaaggtcgtgtgctcgagcggtcaattcctccggtgatagatccgatagatttacacatgccaaatagagaagagaatgcttgtagtagagaccatattcagcattgacctgagcaaggataattttccaagagaaaagatcagcaagttgcgtaggagaacagcctcgatcaactgatacactttgctgcgtctgattggagacagatgaactcgccttgtagtaatcacctgcgaccccataaaatcctgcccaaaccacaccgtcaacagtaggtagtgcgtctagtattttctcgctctggtccatcgcctctttcgttcctttaagatctccgagtaagagtttgccataggcgatagaggcaagcgagagcgcgtaagcctcagccgccggagcggcaggaggaggtgtcggctcgcccgtacttgatggcggaggattaggatgcggaattcgagaatgaagagaggtgaggaattctaaagatgctgtggggtctgcacatggcagaatatgatgagaggcaaagtttagcaatcgaccgggtggtgcgaaggccacgtagaagaggaaaggtaccttcaatatgacgagagacatagcgggcgatctcaactagacgaagcacattaagcttcttctcaaagccccgaatgaagctgagggacataacaagaaaccgcgaagttgcatatcagatggctgtatgcggagaacagaatgaggatacgaggcatacgagaaagcagggctcacttgttgaatagagaaacttgtagaggaccggtctctggtgtcctaacaaagctgaggagcaggacagtgaggttgtgccataacctgtggagaaaggagatttttaaaatccaaataaacgaaatcgatgtaaaacacgatcaacaccgaactcgaagagaaacgaaaggaagaaggtaagaaggaacggaatgttcaaaggctcgggttgacgtactttcgattccatgctttctcaatctggctaaccagctggttcacggcaggagaaacattggcctcagaagcagaggcgagccattgttcgggagaagggtcaacgtccattgttcgtatctgaataagagtaaagtagcgagagatgttggatataactggacaaaggaagaacgatgtgtacgctggaggagatgggagaaggtaacttccagccagccggttcgtcaaaaacgaaccggctagacagagggttcgtgggggttcatttctgatgactaatcataaccctaatccacttatgtcacctgtgtgtgatgatcgcaaaggaaagaaaaactcgctggccgacttttcttcacaatttccttcaaacatctcgttctcccatcgcgtcctatcactttctcagagtaagcaccctttattggtggttcatctcgtgtctggatcaagtgctagtagctaattgcttgaattttgtagatgtcacaccttctccccaagtctcttgacgaagtcattgatttctctcagccttccctttggttgtctgttggaaggtatgtctgcctgctttttgtttatcctcagtctattccttttttttcctgcctcttcttgcaagagagcaagcacccagagaaaattccactttcagctatcgctgctgacgcaagtaataatctcttggcaacttcagcattgttttcaaccctctcatttggaatatcgtcgctaggaatggtgcgttcttcttttgtacttacatatctcttcgttctctattgctgagctctgaccccggctgtctttatcggcatgtaatattctcacaattcatagagcaccgaaagcgaacattgaccaagacgcttggcagtccttactcggcctgctacctcatggctgtctgtatctttgctgctggaatcttccgagacagcctgtacgcatctttttcaacacgcctccttttactttcaaatatcgcgtactcacaccgagatttctgcttcatccctattgacaggttcgagaaggctctccgagctcaacctcagaccatccccgagtcaatggagctcaagatcgccgctgctgctcttttcatcatcggacagatcctggtgattacttccacatgggcgctcggagtgactggttcgtcccgtttggggtctctggaagctgtctacttcgcgtatactcagtagtttttacatcacatatggtacaggaacatatttgggagactactgtggcctcttacaggacaagatgggtaggtttcactctctatacactcaccatagacgaccatcgggtatccttacacatctggctcccgtctttccttaaacagtaactggattcccgttcaacgttcaaactgatccgatgtacaacggggcaaccatgtgcttcctcgccaccgcactctggtgagtctgttatcgtactgatagcttaaatgggttatttacatgctgaacttactaaatccaattgacgatattcaggtaccgacgacctgctggtattctgatcactggagtagtttacatcgtctaccagatcgctcttaaatatgaggggtaagtctccagattatctttgctaggaaaagagctgttgacaacaaggacgctcatatcgcggtcttgactcttcttccagaccgttcactagccagatttacgccgacagagaggccaagcgggctcagaagtctaacacgaggtgcgttcttgaccgctaccaatattgcaaaactttttgcccgtacataaattagaaggccttgactgatatctttgttctcttatctccttcaaaagcaaatcgacctcgacggccaccgcgtccgccgcctctccttcgaccccttcgtacgccgccatgacctcccgaggaaagtccaaccggaccgaactctaaggacatagtccaactttactctgagggttctatcctcagagtggtttttttcaactaaaaacggaatgttgctagggtgacggtaatgcattaccgttcggtggaattcatcgacctctctcctttctttatcgactggtctcttctttgtaccttcgttcttttatttgaagaacaagggagggccggcagagacagaaggggtgttagagagtcatgagggcattcaacagcctagagttttgttttgcaagtgttgtcgtctaaaaaatacaagtgaaggttgattcgttcccagtggtagtgatagagcatggagagaatataataactatttatttttcttgagtagattgaagttagatttatacaagattcattatattatcaggtcacattaaacaaggtagaacaagagaacaacaatccttattagaccaagagaaatgagaaatcgagaagggaagcagagagaaaagattgttctcattcatccacctctgtactcctcgtcaaagatcaaggggccggccaaaccaggtaggaagcgagtcgggtacgagtcattcctcaactctccatccggtcgtcatccagcggattcctgacgggcgggatcgctccagtcgtcatcacttgttgcaagtgttgtccagccataggatcgactttctcaacgacaggtgtttcaatggaagaggagcggaacgccgggttctgaagactattgtcagaagaggagaacgtagagcctggtctgttttcttcagtgacaagtcgcttcgttgggggttgaccttcttcagtgaaattgtagtatccgtttgatgctgtatcgccaccttcagcaacatgatcgtcgtcatggttgtcgtcatcatcatcatcgtcatcgtcgttgtcgtccggctcgtcaaacggatttgcgttctcagctgccatctcggcgcctatcgcttgcgccaataaagcttcctcctctccagtcgtcaacgacagttccgttccaaccatcgtacccgtcgtcgttgcggtagtagtggtcgaagaggaagtcgaagacgatccggctcgacgggcttctttcaatcgacgaagaaccttgtgggtgaattctttggtgaacgccttcatctttgcttgtttgtcctctgagagcgcgagagggacaggatttgatatgaacgttcttgatttcttctctttgttgaggatcagttgagagcactggatgagaacagatatagagatagggacaagaaatttttagccatgcgcctcaaagtaaagacgtgcgatggaagcttaaggaaaggaaaatggaaaggaaggaggagaggaaacgaacctcttttgcgtatcttttaaacttgtcgtgatccatctcgttcttgtacttcgacatagacctaacaacaacctggccgatcaaccctagatacttcttctccttgtgctcctgagacggacccgctttggccgccgctgccgctgccgttgattgcatcttggcagcccgttttcgcttctttcgctcttctctcgctttcaatctctcggctaatgcttctgccttttccctctcagccttctcagccttttcggccgctgcatgctcagccgctcgctcggctgcttcgctatccaatttagcctgagcaatgattgcttcaagtcttgctctattcgctgcgcttgtcactgatgacgggacgaccggctgggagaccggcatcggtggtggcggagtatacactcgagaagtagcctggaaggaagacgatcgagtggcatccggacgttggaacggagtcacgtcagcaccagtcttgtagaatgttccgacagagaccacaggagtatatggtacgggcggttgaggagtaggatcaacagtcggggcttgcgttcgatcctcgtcttctccattcagcggtaactaatcggaaacaagcgcgaccaattattgaagtgtcgtcaatgtacaggtcggtatgataagagagattaggaaggaaagaacgcttactatacgcttggcaattcggtatcccaccggtaacgacgaccagccttccaaaagctacgtcaaagatgatcaagcgcgaaatgttcaatcaatacttcgactctctcgttctatcggaaggtgattaccaggtcagcttactttctttgctatcgaagtaaattcttcatcgtcggagaatcgaacgatcatcgcgttcaccggctcttctatcttagaatcctcgaccttattccggtttaataacggccaggcactcatactctccagcgtctaagattcatcgtcgtaggagaccataccatgtccagttttagaagtcaagaactcatgtgaggtgaagatgaaacagacagacggaccagcttgacgacctctttgtcttctggaaactctttcagtagggtgttcatcaaattaaatccgtgcattcgtagcagttgacgttgaacaacctgatcatcggtcatctgttggaatacaggacattcgttttattctatcagtcgattgagcttcgggagtgagactaagagatagcgataagactaaccttgattctgctaagtaacttgcacagtaccgatcggttagctgtcgactgtcgaacagccgctacgaccttggggacctcgggtgtagatatcggcctaagcaccggctatagggcggtcaaggacagaagaaattagctagagacgtgaattcaccgttgccagatagaaaacacaacaagaattaacgtaccatgaagtcttcgtcaagttttctactcttcttctttcttgatcccttcattccatactgctcgacctcgtccatgatgcccagagctggcataccgagcggaaacaaataatgagctcaaatatgttttgttcacagataccactctgcgacaaggggtagagaaccagagtactgaccatccaggtaaagatcgtccatgcctccgacgtctgtttgagttttccctcctagagttcctacacagttgggctcgttacagtaacatggctgtgcgtcgtgtctggtgtgtacagacggagggtagatgtgtgttttttttagacacaattcagttcgaaaaaggaaggggctggaaacgaacccgtatcgatcgacattataattgaacgtaagctcttcaccggccaggatgtcccgctttgcgaagattcccatccgcatgtgttttccgacgacccactttgcgacgaagcaatttgggttgcaactgtggttgataaaccgaccaatccctccatttttcgttgcgtccaagtactaagtgaaggccgcaagaagagatgacagaagagcgttagacaagagggatgtcggatatgtaatgccccagttgagttttactaacctcatctttttgaagttccataaagtagaaatgacgaattccctcagcgccataggcctgcatccgcttgagaaagtttgcctttggaacaacttctccaaggtattcatagataaaatcctctctaaagaggtgagaagaccatgttagatgagcatgtcagcataagccagcgacagacaaggtgaaagaaagaagaggaaggaaagaacaaagaactcaacgtactgagaaatgtttgatgccgcacggagaccaaatcctttcttttccgtcatgacgacttccacatccgcatactgtctacgcgtgaatctgatgttttcacaagaaacggatgtaagacgatccgattaatcacgacgaaagagagaaagggtagaaagataaaaaaaaggtccgcgccaccaactatgccgaggttaaaagagatctgctcatcaacaagacctaacgtacctctggttattacagtactttccacatcgacactcgtgctccaaacattctacctgggtcagcctattgatacagtccgatccatcgccacaagccatataaggatcgtcatgacctgatgacaccgggtaacgatcaatgagacacgtcggatcagacacagaagcacataacaagagaaccagagaagagacacggatttagaaacagtcccagagcgagagtcaagaaagaatgaggaaacagacagcagtcataggaataagagacagtgaagaagggagaaaaggaggaaggaacaaaaagagaagaaaagaggaccgcaggcaaaaacatggaacacgatagctggaaacaccgatcagcacaaagagagaacaagagggaatatggcgctcacctggtcgaaagttgcaatcacagatcatcgaatcatcatcctggtgacttctgcccagactagcagtctgatgatgatttgtctgaagagcgacgaatgttttgctagcttcctcgaatgcaactggaaggtgagagatcagctgggtcggataattctctgccgccttcttcttattttttgttcctttggtggtagtggtagctgtcggtaagagcaaaggggacgcttcaccagaagaattataaggcgaagcagaaccggaaagtgtgggcttgacatcctcagatttcacatgcgcttgatcgtttgcaggtgaggactgagaatgtgaggtggaaggagggaagaaggacgcggtcacatcggtcttgatgataggcgaaaagtcttttgctctaacagggctattagaacgaggaggagaaggaggaaaaagaatgaaagcaagcggagccatggactggtcttcagtcttggccgttacgatgttcgatgatggtcgagaggaactcgacacgtcggctgaagattcgtgcacatcaggatgatcaccggccgaagtgacggttggatccgaagtaagcccgtcaaccgcgtcaaatgtggttgatgttggtagcaacggcatacgagaagcaaaaatgagagagcagaggagaacagaggatataggaggtgactatattcagaaccaaagttacgccgtccgtctgtgacaaaggaagatgatgttttggtgaaaggtgtcgtcgtcgtcgaggaggaaacgcgtacacggaagttgacgaacaaacaaggaagaactctgtgtatgatcaaatgacacacataggatcagcttgagtacaccatcaagaggccgaggatctctaatttgaaagccaggaaggaatgaagggatgaaggagagagaagaagttcgtacccttcttctgatgtaatttgggtacacctttgatggagttttgagttaagcttgaaataagcggagaggccaaacaacagcctgcactcttctgtaatggataccccagttttctagccgagtataggaagcgtttgtattgttttgggtttggccatctgaatacacacgttttgtaatcttcattagaaattatttcgtagtctttttgccaaaaaaaatctgattctcgttcttccttctcgtccgacgtacaacgaaacctcacactccatcctccatcccgttgttcttcgagaacacacacgcataaacacacacgtacctcaatggcttccaaccagccgtatcaaacggctccggccagcacacagaaaaggaagaagacctcggactcttccgtctccgcttccagcccggccagcaagaaacttcaaatttccttcaatgaggcatcccagctcggacctgtttttggtgaggatcaacttctctcttgtgaattcttgcccactcagctaactgtcatctctttctggatacgtaaaacgctctatgtctttttacttggtctatttcttttcttcatcagccaatttcccttctattgtgccgccgacaactacgccattcaagctgtaccgacacaaggattcggacaccaagaagccgttggaggaacagctaactatcctcgctggagagaccgctggagtcgagctctatagtaccaaccgggatgtacctgtaaaaggaaatccggatggacaaggtggatacccctgcaagtaagtattatccttgcagatgctttgtcccaagacagcccacttaccagttcttgatcgtttaaactacaacttcgtttcctccacgatagataccttattggaattcatgatccatcgacatccacactcacccttgctcctacgccgacgtacctgctggctcactctgttaagcgactcaaacaactcgactcttccgagtcgacctcggctaacttcaaagatcagcgaaacaagctcggagaggcgttcggaacaaagaaggcgaagtccagaatcaaggcggtcgaacgaaacttgatcgatacctcccagatggaagacgtccgagtgcttctacaggacagtatccaacaatctggagcggccctgcctactcaaggtaggttttctagctgattggtattgcggtctagtgcagaagaacgacagtttaacaatcttttcctctttcgcgttgttgtctttatcaaccgacagagaccatcaaggctgtggccgatcaagctcggccgattcctcctccgaacatggaagctaccaccccggaagaggttcgttctcatgttatagggttctgtcaacgcatccgatcactcacttgtcatttggctttaatatatctaggcctacaaactggaagatatcatccctgcttcatgctctgtggcccttcggccgctcatcaaagaaatcatcggcgcggagaacgaccagacacgaatgactctgctccctttccgtcattcgagctgggtcaaccgacgaatgagggacacattgctcaaggaaaagcccagcaaggagaagctgtgcgtcacatgccgatgttctgttcttccgtctttccgcagacatgatgctgacagatacgatgcaacgcgttccctccttaaacttggattgtttccttagaaaaattctactatacatcctgttgatgagaaaattgatgataaccaggcgagacgatttgaccgacatcggtacgcttaccaagaagtttgcgcctgtgcctagggtggtggtgatgaacctgaaagacacgttcaccgaaactcctcgaggagccaaggcgtaagcttatttcctgtttgtagaatatctggacacgcgcgcgtacggaacactaacccctggcatgccttcttgtttccaagggcgacgatcacgccggggatggaggcaaagctccattcatggatgctctgcttgtgtctgatgtatgataacttcatctgcgatgccccggagctcgccaaggatctcaacatggcaccgacaaagtaagtctcttgctgctttgttctcttcttcataattatcacacggaatttcaagatgttgtgtactgacattcaaaactgatactttcccacgaagggtcaacgcgttgttgggtggtttgggatgcaagattgagatcccgaatgcggttgagcgagagcgattgggaatcagctacgctgacgcaaaggcgaccaagaaggcaatcctcaaggtgcctcttgtcttcaaagagcctagccggtatgtcatcatccttttttctttttagtgatttactagatggaaagaagagagaaactgacggtgttgtcctgatggttcatatatcagtggaggaaagaaaaagtagagaatctgaaaatcttgatagaatgcaacattccaacttgatttgtgtgaacgcaaaatgaacgtatggaagaaatcggcagagacgatcagagcttgggtagggattgttagagaaaaagcaagaagaataaggagagaggaaaaagaaagtctccaagcaacgtctccacgatgtcgagctctgccaacgggcgacctgtctgccttgggagtagagggacccatccttccgatgaagcgttgccgctctccggacgagaccaagcctgatggcctggaggatgaagatttgactggggccgagggccatcctgtgaaggacgactcggcacgccagccctcgcgtctaggcagagtcgcccgccagagtaaacgggcggagaactcaactgtaatgaagacaagagttatttgcttggattcctaatgacccgtcgcaggttgtctactatcaatcccttccgcctacaaaccctgcaacttttgtcacacccccggcaacgcctttttcttggtcgtcttctttaatatatctatcacttacttctctgctaccaattccattcctacacctacacattcttacatcatcgacatgccaccagcacctatgaatcttcccgccggagctggtcagccctccacgttcgataagagtacgtctaaatccgggtccgatccgttctctgattcttctgagaccatcgtttcgagaaacttcgacagactgaacccattgtttttgatcatctgttgatcacagtgaaaatgggtgccaccatgggtgtaagccttcttgtctctatcctatctctatcagcttctagatgaaatgcttttcagaaggaaactctgataaattcagtctaaggctcacgcgatgcatcgtcccggtttggggtgtggtggttgatgccatagaccgtcgttgggctcagtatgggtttcatctttggggggttcaccgtcctgcggtgcgtcgatctacccatcttgattcgtctccctcgactcgttccggtttgattgaaagttcttatcgaccctgatttgcattctcctttcttccctgtctgacgaccggctatatggcagaggcggagccggacctaagggaccgcttcacaccatgtctcagtatatgctcagctctgctggtatgtcacttttccttcaataaatctcgttctttgacgaggaggatgaaccagatcggatcagattccagttagattcaagactgattcttcgaatactttatcgaatcgcatccattgtttgggataattaggaacctttggattcttcatgttcgtttctatcctcgtcttttctctggttgttgaagtcttctcactaaatgccacatgctgcttctttgtccatccgtggttcttttttcccgaacagggccatcggttctgttgtccgaaacgactcgcccgaatcaatgttggtcagagatgatttggcccgtatgcgaatcgccagcaagatagaaggtgcggcttggctcaagactcagaatgctcgagctcagtcgagtgaaggaaggatatgaaaatggaagaagtgaagtttcacgatttacagtttcatttgacatcgaaagaggacttgcacataaaagcccatatatttgggtacgtctttgtatgcattctatccaactagagtcgaacaaacatgtatcgacttgtgcaaggacgaaagtgaaaggattgaagatgaaaagagagagacgacacagatatagcaacacattattccccttaatcctacacgcacaaacacacagggagaaaggtctcggtaactcaagttcttcagttcaaaggagctacaaaatctatagaggaaagctcgtcaacttcgatgaagctgactcgaacctagttgacaagacaagaataagtagatcagtttcaacgccacttacgcccatgctcaagaaagacgtaccgaatgaacgctctgctcagccattacacgctccttgatcatccgctcaacctgctgagcttccttcaaactgatcgcgtccgatttggaaaatccaagctcgagttcgatcctcgcgcccgctccggatccgatccctttcaatgaacgaacgtcccacctgatgtcctttttttgtcgacctgatggcgtgccggtctcctgattgtttagttgttcttcccgaagatcttggagaattgttcgaacatcgtccaagacttcttcatcacatgaagagtccagaagtgttagtgtcgatcgatacgtcaggatggatgattgatacagaagcatcgtagagacgagaatcccaccgagaggatcaaggatgggaacacctgcggtggacccaaggatagagagtagggcgatgaacgatgtcagcgcgtccgatcgatgatgtagcgccttttaagaggaagcgagcgcaaattcagatcagcagacaaacaagagcacaacacgggttcgaaagaaagtgttggcgtacgttggcagctaagactgaagagttttcttcctcgccgactttcttcgtgatcctatacatccattcttttactaccacactcaacaaggccgtccaggccgcgtttggatcgagtaacccgccagactcatccaaagcaatctcatgagtgtgagaatgatgaccagcgagcgcgtgaggaagatgaggtaggtagtggaggatatttgattcagagaatggaatgttggtaagaagctggcaggcccgtgaaaggaagaagaatcgatagtcgatgtttagaaacaacttctcaagacgagatttagcaaggaagacagaacgacgcgtacagaataactatgtatcccaatgcctatcgagccaacgacaagaatggcggatacagtaagcatgcccagcgtgtcgaactttgagaatccgacaggaaacatctttgaaggcggctgtcgagacatgttgctaaagtcggccagtgaaacgaatacagaagaggagagatcaacacgaaaacgttgtgcaatatactgattgaagacgctttcactgactagcaaaacaaagtgacaaagtctccaagcaagtctgaagcagaatggccggcctctgccaacaaactagccgagttgtatctcctgattgggttggaccagtcaaataacgatgtacgagagtcagtctcactatctggtattatcatgtcgtttggtggtctactcctatgacgagatgatagacaaaagggccagaaagaaggaagaacagagagataaaaccgaattatctactgaccaaccagagaacaatttgagtccggtcaacccgacattactagccagccccaagagtgtgactctgcttccccggtcaccttttcccatcaaagcggctcgaagcgagtctggagaaggagttgcatgcgaatgcgaatgaccaccagaatgagagtgaaaagggttgaaggaagaatgggagtgatcgtgactatgcgaatgggagtgcgctttcgcgggcttcttaggctcggtggacgaagtatcacgaggagatgaagatggatcagaaggatccgaatgagattgtctcaaggctgacgtggtggacattgttctgaatgataccagtggtgataaacttcttgatgatggtgatgatgatcggagatataaaggtaaatgaaacggacaagaatttgaacgggcgagtggggaaactggcgcgggagctgcggtccgtcgggatttagtgacagagaaggaagataccgagcggaattgttgggtcagtagagtacgttgagaatgaacgataggatcatagaggtgggagtttaatttgacggagttcgcaaacagcatcgaatggaggaacggtggggagttgtgtcgacgactaattgaatggatctctctgtcggggcccaaaaggccaaaggagatggagaaaaggagaagaaaacaagaaaggaagagacagaacagaagactctttctgtgaaaagagacagattcttcttagtgacggaccgttcagtggaaggatgagaaccaagattcacgatggataagaacaaacagagatggaaacagaatgagacaagagcagatagaaatcctaaacagtcgcgtgagggaacgctgactgtactggctggatactaaccgtgtaatgcatagtaagccattttccctactgtcttgtcctctcttaccgatgacgtacttgttgtttctacagtgttcaaatcaacaaacaggttttttttattcttcttgagcataccaggggtatagaagacatgtgtatagagtcagaatgagaggaaagagatgtaacatgcgtgaaggagagaaggtgatgcgcgtagaggatgatgaacggcttgataaagggaagtgtccgatagatgtaaaaaatgaatgtgatataaaagcgtgaaaggtcgtgaagaacgagatatatcgtcagacaaaaaagaaaagaaaaaaagacgatagccagaggcgaaatggaagatggaatgagaagaaggacagagcattgggaaagaaatccatcagaataagaaagaggttacaacgggcagatcaactacctatcgttctgatctcttgggctgctcccgtcgtcttccgaagaatgcacaagaagagtttgtcgtgcactgtcttgattcgaagacttgtgcagggagaaaagcgagtcccgagtttgggaaagatggaagagagactgtcggtaggcgacctgagtatggttggaccaacttgattagcgacttgcacgcacatagataagaacacaagcaaagatgatgatatacctgttcggtatagtactgttccaacatgatctgatgctctgctctggactttttatgaaagtaccaaagtgtaccgaatgtcccggcgatgactgatacaatgacgaatttacgagcgagaaggataaactctgaacggtcaggtctgttgactagacacgacacgacggatagatacacaacagcccaacttacgaagaactatgcagagggccacaatcacgtacacccaggtggccggggtaaccttagaatgagcttgcacagcgcattttttgtcggcattgcagttgtaagaggagcatctagtaagaaaagagagaataacgacgttcaattgctcgagccttgacaacactccttgagaaagtaaggaagcgaaagcatcatactctttgtctgctgtgcagctctctcctatgttcaatgtacgaagacaggtcaaactcgttccatcacagtaaccaccgcgtcgacagctggcgagagaaagagtgattgaaacatgaactccatcagccttgttttcttcttctcaaacaaagagattagaaaacagtttcttacttgtccctgctccggatgtcagagacaggattaccatcggttgtgtactcgatgaacactagattctcgatttgacacgtggagttaagtgtcacattttgatactggcacgcttggttaagacaaattgatccgttgacgttcctcgaactcgagagatcggaccagtcgtcggccttcgagcattcatctgtagggcggaaaaggtgtagacgggcacggtgataagtaaagcaatcacctttgtctgcaaaacagaacaagaagacaacgaaagaaagccacagactgaccatctctatccacctggcaggtctcacccggcccaacctgggccacacagccggatccctcatcgggacaaacatatccctcttcgcaccgtggtggcagcactgcatcctcggcgtatccgtaagggaactttgtttcaaaagaaggaaagaggccaatgagagtcagatctttatctctctatttgagaaaggagtgatcttaggacggagcggaaatcgaatggactgtgtgggaggaagaacaatgaagaatttgagttgagctgacctcatctcttctacaggttctggccacgcagatgttgtcagatgagcagtacgctgagggtacacatccggtgacgagcgcataagtcgtgacgtccagatgaacagcagcatacctagtccggagagacgaaaaaaggaggtgagtattggctcgggttatcaaacaggtcactctgtttggaaacagataagtgaaccaagagaatagagagaagaaagaggaggacagaaagaaagaagaaagaagcccaaaggagaagcacgtactcgcaagctgcaccgatttctgccttgtccgctcggacgggagtaaacaagttgcaggccaaggggagcaacgcgagaacaaatggaaaggtcaacatctctcttttctcttccttatgatttctattcctggttttctttcgccttcttctgaagaccggtattgattctcgactgggctagcctatgcagagaagaagatagaaggcaggaggggaaagaacacgagaagcaaaagaatatgaaaagcaaaagaaggcaagtaagcaaacgaaagcgacttatgcgcagttcaacacgaaagactacataatcggtgtagtaaattgtaatcgagggttgtagttcataatagtaaatgaatcgtatcaacatcactacagcttcctgatgaatactctagtgcggtgtctattgatttctaatacgctattcgatacacattcattagattcctggatttattttcctaatacatccctctattccagcaatgttcttaaacttcggtcggttctcatcttgaaacaggaacagaacagaactcactccacccacttggcgtctacaatctctcagtctactactactactacctaaacctttctcctcttccttctttgctctctcgatgagctcggccatcaggattacagccccttcctcgccggcatctggcccagctactctgacagttccttcgtcggatgcttccatcctacctaatagaggaggtctgttcgtcatcttgtcctcagtttgatgtttcacccacgctcaactgtcgtccctacttgatttattcttctcgttcaacactaccaacgtcgatagcaacagccaaattgtgcagaaacacattgatctatgggtatgtttacccatcgtctgtctttgttgttccgtctagagtctttctttgccagaacctactaaccacgagaacttgaaattcgcattgaacccatcagctactgtaaacatgagaacgatggggtgagtgccatctcgactcttttatcctcacgctacttctcttcctcccattattcaaggtttcatcctgctttcactcggtacagccacgctgacagctatcttcaactctactgctcagtgtcttttctaccatcctccagtatgccttcctggttcttatcgctctacggtttccaacagactgaacgaacactctcctatcgctcttcaaacagtctacacctcaacccccaacccatccccaaagttccccgaagcgagtttttcttgctttcttccaagtttttgcctcctcgacgaacgctgatcacattttgcttcttacccgtcatagctctcctacgcttgcccatgcagagcctaatcggacgcttccatcaacagctttgtctcttctagcggccaagaatgtgtcggcgtttgttccaaagaccgcttcctcggccgccaccgttatcaaagcgcccaattcagaagagaaggaaacgtatgtctgcaacgcaactatccatcttctcgtctttctctgatatcaattgttctttcaccaacgactttgttgtacaacatgtcagttcatccccggctctgaaggcatcaacacccgcatttcatatgtctcccaagaagtctcaagctgttccatctctgatcggacagaacaactcaacgccggacatgggtcttggcgaagtatattctcagttatctttggtacgtctctatggtttaagaatacttgccggctgaactggttattaacagttcagatatctatcagaacgcgcctccttttgatcctccgttcggttcaagggcgcctgatttctctactcttcaacaacccattcagatggatgatggcctcgtcccttcgctcgctggagcgctctacgaggatcagttttaccaacatccagtggttagacagccagtctgtatctcttcatacttttgtttcttcgtgttgtgttgctatttatgtcggctgacgtgagtcgtggtttaattacatctccgatttgtatcagttggattacaatttatacactactccattgccttacattcattcccttcatcacccatcatccctgaaccaaaccccgaccgcacaagacgcgaaccttcacacgttcttcctttcgcctacactctctaaagaccttcatcagcgctccgctgccatcatggagtcatcgccgatccctatccctggtctgccagaaactttgcacgtctaccacagcctacacccattggaacctggaaccgtgggtgtaccggtaccaggcacgcttccaggagaatcttctgccaaaaaagccaatggtgtcctcggactcgggagtgaggtctacaaagctgttagcgaacgagatggaaaggtttattgtctccgtaggattgagggcttcaagatcatgcacgataaggcttttggtccagttgagagttggcgcagagtccaccatcccgcaatcgtctctgttcaggaagcttttactacccgggcgtttggagacaactgtacgatttattcaaaccttctatctgcagtcatgctccggttttatttctaaatctgattgtttctctccttcacaacaattgctacagcggtcatatttgtgtcgaactatcatccggccgccagaacgctttatagtgagcacttcgtcccgcggccgccgacggtaggtagaaatggccgactacagcctcaagatatgcacatcccagaacggaccttgtggagctacattattcaaatcgtcggcgctctcagggcggttcatcgggaaggtctggcatgtagactaatcgagagcagcaagattttggtcactggtaaaaacaggttcgtttgatcaactgcctttggacccacaagcaggatgatgtgctttgcttgactaactgtgtttctgatgctttgtgtaggatacggatcaactgttgtggtatcctggacgtgatcgcgtacgacggtggacagaatatggctcagcaccaggtgagtcccatcatacctgtcccagtaaagtgaaggtaccgatcgacatgaaaaccaactcatctttcgacggtcttccttccacagcaagaagatttgatttccctgggaaagctcattctctccttgacgaatctatcgacgtcggccacgcaaaatctgccgaaagcgctcgacatcctttctaggtcatactcgtctgatatccagaacttggtgatgtacctgctgggtaatcctgggcaaaacggaaaaactgtggaagaactgtcaggattgattgaagggagggtatggaccgagatggaggcagccgaagagtgagttctatattttctggatgtatgccctagcttggttgacgcaaaaccccccttgttcttccttagctacaacgacctgttagagggtgatatgactcgagagttggaaaatggacgactggtccgattgttgtgcaagtttggttttataaacgagcgtcccgagtaggtgttttctcctctttctccttgaactgtcgggttcggagcctatagcaacggtacaagcgctgtgtcgtactgaagcccagaaaactaatcccctttttgttgagtatacagatttgatcatgaccctagatggtcagagtccggtgaccggtacatcatcaagcttttccgggatatggtctttcaccaagtcgatgaattcaacaaaccggtgcttgatttgagccacgtactaacttgtctcaacaaggtctgtcgctttctttctttcttttcctctgtcgcagcttgtcgggaatactttcctaaagacttgctcttgcgccctctctttctcctttgattctccccctcggtcttctcgaacggatggaacaattggtgaacaaattgaacggagcagctcgacgccggatcagatgagaaggtaatgttaatgtcaagagacgagcagagttgtctggtggtgagctatcgagaaatcaaagaatgcatcgaagcagccttcaagtcagtcaacctcttgttctctaccattctcttctatctccttcgcatgggacttcacaatcttgtgaacttgaggttcttatgtcgattaggtttcgtcatgttctgatgaaaccgtcgtttgtttgaactggcagtgatctatcccgtggatcgatataactttgcctttcatcgtacatccaatattttccaattactctctccatctcttctttgccatttcatctcatcggctcggctcagctcagctcgaatcagggttctcgaacaacgctggccccgtttcccttcatcttctcttttttctgctaggtccccactttctgcttcctacatttttgttttctgcttttttgtgtaaactttataacccgagatctcgggctccaaaaacacttgaaaatggcgatttcacacacaattgatctgatcggaattgatctaagatactcgggaaggatagcctatagaagcgaggacggacaagagaggaacacggatgataaacagaagagatagataagacaaacggtataaacgaagtaagcacgagcggcatcgtgctattctataaacccgggaaggcaagtataagcgaaaaaggagaaacaaaacggagctgaacgcaaacaaaccagaacaaaacaatgaagcaaagaaaactgttacacgaagaaaagacggagaaacaacagatgcctgaagagaaaaagaaagcgaaaaggacgagcggaaagcgacgtgttgagataaggatacacagacaaaggagaagataggaaaggataagaagagaaaatcagggagaataaataagttgataagggaatcaaggaaaacacctttcctacagcgtactctcagcgcacgccttcatcttgatcaagccgagacaatcactcgtgagacagtttggcagagcgcggaagtcaagggttaggcacatgggcaaataccaaccgctcatcatcaccatcatctaccgtcgggggcacgatcatgcattcgaaggcgaagtctcgcgattggggtcttaacggagaggttgcaaccgaggatgatactggcttgtaaccgatgggcgcagggcgagtgtgctcggttttgttcgcaagcggaaacggttgtgaagcttctgaggccgaccattttggtcgttggaacagccggaagagaggggtcttcttggtgggagatgacatgacgggttttgtcggggaaacaggagcagacagaggtgatgaaggctcacccaacggtagttgtgagagcatcgggtccatcgagggtgacggtactaaagatgaaagctttcccaagctcgatcgattcgtcaacgagttcaacagaaatttcttttttggctgttcagaccgtttgatgaattctggttgctccagttcatcaagatcatcgaatccggtccactcatcatcaaacacgactcgaacgccgactaggtgatgaatggtagacgctttcagcaggagtagttcctggtggttggtgatggcaggatatgtgattgaatcgcgcgagatggtacgcccgatcgagagggccgaaggagaaccgaaatcgtctatgagagaaggacaggtctcatccgatggtgtgtttaccagttgagggtttctcgaatctgcttgtggatgtcgttctgggtacaatttaagggaaaaattccatgtttatgtcagcacattaaggcgttacacaaagggagagcaccaacatcagggcgatctcggatcatacctggcgaacagcttgaggagaatcgggggagtggaaattctgcagagtccgccagttctagggcggactcagagtccatgaagaaatcctcgttggaagcctctgaggacggttcctcgttctgagtagtcagcagaccgggtgctgttggttctgggctgaccgtcagatctgaacgttgcccatacgaggaggacgaggttgaggacgaggatgaagaccaggacgtgtagtgttctggtgatgatcgagtcgttcgattctgaggatgtttcgtccagaataacatcacaaggtagatatagctaagaaagaggtggcggttcgagaaggatcgacagataggccaaaagaggtaagactcttttcttttgtttttctcgaacaaaagagatcaacacgacaagcggtgataaagtgtagaaggtaacagagtcggggaagaggaaaattaaaaggagccatgaatttggaaaaagaaaaaagatagtatccgctttttatacaacatctatccggcatgtctctttcggctgatctcaaaaggagataggtatgtatgagtgagtggacgggtagatgggtgtgacggagcggtttgggggacgggccaagagatgatgatggcacagaacccagaggatgaatgacgcagatctggcaggacggctcagcagacacgcgcgacgcccgtccggccttctgtatttgtttatttatctcgtcctttcattttacccttttattatccccggaacgcgttttgacatcactcaatgaaacgtcgggagaaatcgtaaagagggaagggaagagagaaaaaaagacatatataataaaaaaagaaagagaaaaaagaagaaaaaaggtaatggcaaaaagcagtatcaagaaaaactccgaaacgagtctctgtctgcaaaggtgcatacagaaattagaggtgagaaagcttgagcacaattcatatagattgtttatccccagaccagatccgttccatccatgaggaatatatgagttccgatcgatcaagagcgctttgtgcgggtctgaatgtatggcctcccgatttcaaaccctcatttcttttatattctttttaaatgctatcctactcggttatcatgtatatactctctttttttttcctatttcgtgtattctcattcctcaagcaatccactaattaacaatatcccttcactgacaatccactcggcctcgactgacgatgcattgactcgacacaatcgccctatggaatcatccagccgaccgacttctttcatcacgttaagtgttacaccacatgtggcgtgtacggtgaaagagaactgatcgggcgccaaaaactcaagtgtcgtccgaggcgcaggctccgtcggtgtcggtcggagagtggaaggtagatagatccgaaaagtaaacgaccgagtcgtatcggtcatcccagcagacctgtcgctaggcttggaaagttcaaagctcgttctcaagcgtggtagacctagattggatgagctttctgatgagttgggagtagccaaggttcttttctcagtcaaaggtggtgccaaggttaccctcggcgcggccaaccgaggagcgggcaaaatgaccgatcgagccaccagcgggcctttgctctgcagtgtttttggggtcgaataatctatgatccggaaagaattgacgagattgaaagagacatgttgaccgatcaagagagaagatgtattcaatccggcgattacatcagataacgcacacgcatgtatgctctgtcgtgatatattattttcaacatgaactcttacctcgggctagttttatagaaaactttttctcaaccctttctaaagcaaactggatcacgatctgtttgtacgcttggtcgctcttcaaccgccggtgaaccgtcgacgccattatcacatccaccaagagtgaaggcgcgcccgcttataacagagagaagacagggaagagggaaggagggaaaggaaacaagagtagaacagatactaagtcccaaatactgaacgtgaaaccaaatgtttcttaggataggaaagggggaggaaaagaggcgtttctctcaccccggtctaacgtgacggccatgtcgctcgctacgcctggaatccatgcctcatccgacatatcttgcttagcagatacctcccccttcgttgactttgacgttgacgatgaaggctcaggaacggcttcgtgatgacagacattaatgaatatcttttgagaggctccgaacgtcgtctacgttgccgttaacgatgtagaaagacagaacacagacagatttgtcaagcaccgcccatacgttgatggccgtatcccattaaaaacaagatcgactgtgccgaatggcgatagattgtgctgcttaccgatgcgttttcagatgcaatatagatagaagctggctcggcaagcacagacttgagcacaaatgaagcctgtgtagtttcaaacgtcagagggccagtcaaacatcagtcggtgtgttctatttttcttattggaacccaaggcaatgagaagaaacattgttcccaccgagggagtcagagtttgtgtatttaacctatatgccaaccagacagaaacgactggggtcactaaaccactcatgttatctctgaaggatagccggcaatggtccgacactagaagggatgacaacaatcagaaacaaacatacatactttgagccaccttgtcccgggaaggagatcggcgggcagagaacgtcttcgtccagcttcggtcggccagcagccaatttgtttccatcaagcaacaagcttgacgaggaagaattggaggaggggacatccaagaaaggcatgttcaatcccaattagcggtgatcgtcagggagcaaacatcatggagagatcgcggcgatttcaatagtttgattcctttgccaaacatcggtctacaactctcaacgtcggctttctcggtctctcaactcgccagtgtataacgaggtatgtttgactcaagcctaactctcaagactatatcaacaaagcaggacactacctatggggaaaggacatgaatacatcggtagctaggtttgcttgttcgatcgattttttcttagactagatagcattggaagttaggcgaagaaagacaggattgtacacagaaatgaggcgtttacaggccgaaatctatattctgggcgggttgatttagttggcagcaggggtctcttcctggacagcaggctcggcctgctcttccttagagcctcctcccaactgagcgatcttgtcggatactccgttcaaggcggcctagtagtgtcacagagaaaggggcggacagaaaagagttcactgattcagtttagtccgaatacaagacaaagaaaatgatgtgaagaactgacggtcaatttggggggcgcagcaccagaaacggtatcgatcttggttcccttgtagaagatctggaaggtgggcatggccttgataccactaaaacagagaagcaagatggtagaagtcggatgcaggatgtgagttaccaaacataaagtctaacatcggtccaggagagcaagaaagaactcgtcagaaaagaatgaacgaaccactcggaagcaatctcctcctggtcctcgatgtcaaccttgtagaagtcaatgtcggtgaacttctcggaagacttcttgaagtgaggcgcaatcatcttgcagggtccacacctgaacagtttcatcatcaaggtaacataacatcagtattgaatagcttgcagctgaatcaagagagaacaacgtaccaggtagcccctggtatgagagagaggttaacaagatgaagaatatatgaaagtcagaaagtgtctttcttgtgagaggatggcctgttctttctgatcaatctcccctgtcctatatatctccttctctgtatgagataagaaacattttcaacatctacttacagaagtcaatgatgacaggtcgatcaccgttgatctaaagttcattgggattcaaaaagttctcagtaaaccaatcttgtgacggagtccaaggtgactttttcctcctccggtctagtcggacttgattttcaaccaaggaagaggaattttactcaaaaagatagggataaacttacgatgttcttgaactcctcaaaagactggatatccttaggcatgtttgttgggaaatataggtttgtttatgaaggaagaaaggtggttcgagtttgagagaactgttgttgttgtggtgatggttgttgaaagagaagtgactgacaaagatcgatgtgagttgttgggtctttttattcgattacgcccaccgtgtcatgaacgcgtaatatttatcagcatcattttcttacaaagcagaggcgcaatcttatacttgtcagctctttcagaactcattctttcaagcacctcagacaatcgcttagaactctttctcaggcccttgaatggctacaggacttgaaataaaagccattctatcaaacgtttcatctctttatctatctatgccgacttagagtacttctgaacacactccaaataccagcgcatgtcttccgggtcgaccgcgggctgaacaaacgaatgaacggatgagaggacattagcatactgcacgttctgatgtatatgtagaataaagatggttggagacatagactaactgtcactccgtgcccaaggttagaaatgtaacccttcaactttccacccttgtccttgaagccttcacacactctcttgacctcctgttcaattccgtcccgaccaccatagaggcacatcgggtctgcatttccctgcaaagcgaccttgccctcagtgattcgaatggcctcccccggggtcacacaccaatcaagtgccagaacctcgaacgcgtctgtctgagcgagggaggccagagaagagttggctcccttagcaaatagaatgagcggaggaggaataattccgtccgccgtaagcttctctcggaaaagcttggagatcttgacaagcgaaggaagggcgaatgtcttgaagtgatacggagtaagttctccggcccaggagtcaaagatttggacaagctgacaaacagacagaaatcacaatctaagatgttaagttctcgtctggttcaaacagcaaggtcgaaaaggaacacaaacatacctgagctccggccttgacctggccgactaaaaagtcggcgcatacaactgcgattcgatcgaggagctcatgtgcagcttctgggtacttgaacagccatgtcttgcacttttggaacgtcttagttcctcccccttcaatcatgtagctcattaatgtccatggagcaccgacgaatccgatcaacggaacttccccgttaagcttctctcgagtcattgtgatcgcctcgtacacatagccgagctccttatcgacatcgacattctttgagagtcgctccatatcggcaggaacgcttatcggctcggggagggaagggccagggatcatctctacagtgagacccattgcctgaggaataacaagaactatatggccaagcgaaatataaacatcaggtcagtcagccggtacacggagcatcagatgtacgcagtttatggaaactgcttactatcacagaagataatggcagcgtccagtagtccagagtatcttcggatgggttgaagagtgagctcagaagcaagctctggggtttgacagcattcaaagaaggagtggctcttgcgaacctccatgaattctacggaaacgcgaacatagataaactcatgatcaggaaacatatactgtgtaccacatcttcctttacaaggcctgcaggatttcttaccaggaaggtatcggccggcttgcctcatgacccaagccggagctcgctcagtgtattgacctatccgaatggaagtgtgtgaatttgcagcataaattagttccagtcagaggatatgcatcaaggcaaaaaatgagataacgggacaagcctttggcggcccgaatgatcaagtcattcttaagaggaggaaaatcagcgtcggtcttgattgcaggcatagtgttaatgatctaaatgctgcttgtcaaagatgatggtttctgctctttcccggtcgagatgaaagtgaagagaaaggtgaagaggaacgatcggtcgtgtttacgtaattcgtaaccagattcgctcatgggtgatgtaaccattcaaggcaactcccacctgtgccttgtgtctttgccttctcccatctctgtcctgttaacactaacgtacacacacataccatcacctttctttatcttcttcgattccgaaccatggaagcccttttctttaatgtgagctcatagtatttcgctagggatctgcagttcctgtctttgtgttgttagggtagagcacacacatgcacagaaccaacgggcggccatggctgtagaggagatcatggctcaatcatcgccataaccgaaagctatgtgtggttatgaaccagctctgtagactagcgattcaaactcattcttgcggttttgtattcgaaaagatcaagtatggaccaaaactgaccttgtctcatttctttgttcgctcaatatcaggccgatggaggatttttggagggagttgtcagaggatacaagaacggactcctcacccaagcaaactacaacaacttgacgcagtgcgagactttagaaggtcagccaactgtttctacatatctatgctcccatcggcttgaagccttcaagcattctcagtatcgatatcagcggagactggatcgagtgtggtggagattgccattaattgatgctgtctctcctcttttcatgtatcccagatttccgattgcaactttcttcgaccgactatggaaacttcttggccaatgagcccttgccaataagtacagctactattgctgataaggttcgtcatcagatgttctgaaatcagaagagccgtgttgcagtgagcaagtctgctcatatgaaccctccattttgtctgaacgtcgagataggctaccgagaagctagtctccgaattcaactacatccgaagtaatgcagtagaacccctgtccaaatttttggactatatgacgtgagtcttgcctaaatgtctttgttaatgtgtgtcgaagccatcaccaacggacttgctgtttccgatccgcgtctttctctagttacgcatatatgatcgacaatgttatccttctcacgctaggtacgcttcacgagagagatactagggaacttctcgatcgatgtcatccgctgggagttttcgatacaatgccagcgctttgtgtagctaccaacgttgaagagctctatcagagtgtgttggtggagactcctttaggtataatagttttctcctttcacggtgtgatcatcatcgacctgatcatcctgagctgaccctttgaacaacgttcttgtctacgaatcggtctctagcgccttacttccgagattgcttgtccgctcaggatttggatgatttgaacatcgaaattatccggaacacactctacaaatcctatcttgaggatttccactcgttcgttcaaacgctcccctccccaacaaatgagattatgtctcgagtgctcgcattcgaagccgaccgaagatcgatcaatatcactcttaattcattcaacacggatatcaccaaagaacagcgtgccaagctcttcccctcctttggccgactcttcccagaaggaaacaacgcgcttgctcgagcggatgaccctgatcaagtcaaagctgtagtagacaacgtgatggagtaccgaccgttcttcgaatctgggccggcgggtggtgccggtgccagagaggagggagggtcaagcttggaggacaggttctttaggtatgatgttgagctgaacaagcaaacattcttgcagcaattccaatatggtgtgttctacagctttgtcaaactcaaggagcaagagatccgaagtttgacttggattgcagagtaggtttcaatctttgccttctttctcctctctttcaaagtggctgtctcgaatctacgacggcttcgcagaaactaatagcgcgtacttctttgcctttccttgtctgtttgctcggtatcgatcgcagatgtatcgcccaagacgccaagtttgttcattttttgtaaatgatgtctcgatggcgctgcatgactaactgtcctcttttgatttgacacacttcagggatcgcatccaagacttcgttcctatcttctagattaatttccagtccttatccagactcttcttcgtgctgttgctcatctaggcttttagtgacgtttatcatgaattttacccttcctcttctttcttacgttttctctccatgtcagatcagctcaactgacactcgcaacgaccaaagacaaacaactatatagattgggaagagatcacgacgttacatgggcgaatgaccctggaaacggctagcggagacctatatgatacatatcgttttatggcttatcttttgaaaagcgatcgtaagaatccagtcttcggcttggaggatggtgatgaaacccccttagggtccgcagtctgattccgcggctcatcagactctagccgaacacgtttgacccgaccaccttcacccgaatctacctcatcctccggaacttccccggcagcagcggtggccgtggtttcggcctctttggcgttgtcagtctcatctccggtgaatcctaaggaccgctttctcttagcttggacgaaagacgtttccaggggtgcatcatcagctatcgaatcctcgcccgacttttcgttctcatcggcttcttcagccgaggccaatcgaccttctaaaccttcgtcgtcttccttgtgtttgccatctccttcgtcctcggagatcagcttttcctgcaaagattcggtacctgattcctcggatacaggttgctccgacttgttggtgaaattggaactcataggatttgctgaaacattggctggagattttctttgacttgacagagggtgatccaccacctgttcatcgaccggggattcctctatgcggcttgatccagagtcagatatcgcaaccgcctcagtctgttcatcaagagagctcgctcgatccgtcgaagctgaggaatcagtggctgaggctacccccgatgcctcatcatcttgctgagagatcgtatcaaggaaaaagacatggccttccttgacgagatcaattcctacgattctcgtcagagattgctcaatctcttccgacacagtcggcttgccctctccaatgagaggctgacgtcgctgattctcttctattgtagcctccccagtaattcgagcatgctcctttgccatgtcttgggcgttcgacatactgcaagagggaacgataaaacgagataccctatcagactctggactggggatggtcaacacatgatctattgagaacaaattccaaaatcgacacagttttagctgtagccaacaataatagggccagctatcagaaattatttgaacaatacctacacttgcactgagagcgtgtgacgggactactgaatttaggctgaacctgttggcttcgggaaggtgtagtcgtatccgaaacaatctttggaacgggtccggcaggcgttggacgactttgttggcgagtggacgaatgctgatgaaacgataactgacgagcttgagccgtcggcgtggagtttgaagtggaagggagggaatgtcgaggtggcgaagctatggatggactgaaagcatcactttgttccaatcccataggctcatcattgagaatgttcgattcttcaagaagaatccgttcatctgtcgtcgagttggaaggttgaggtgaagagatagattgttcatcggcatcggattcaagggttggtgtcattggtgttgagggttcaacataagccggaatggttgttttctcaggggaatgcggtggggatgatggcggagacagtgtaggttgctaggcaagacatgataaattaggtcaacaagatacatgatagtgttggatcacttgttgttgtttttttttcgctgctcacaattttggaagaagtcgcatcttcagtacgatcctgtaaacgcccgctctttgacaaagttttatccgcttggtcttggcttgaaacaaaccgaagtgggatagaatcactataagatccatagatgtagcgttagtcagtttgaagctccccattcgtattcgaatgaagcagatttctgtgtatttacttccaaagtccaggacgagtgacaccagacaatcggataggagttgctttggaattatcgtcatcgtgttctactcctgatataggagctgtaacttgccgtgccgattgtggggaggatggtgggaaagaatcggtcggaggattaatttgaacgagcttagtcaaaggtcgatctctgatttgtggagaagacatgacgaaagcttcgggtgattcgttgatttctggatgtagagttctagattcttcatcggtctcgatactgataaagtctgcctcgccacttgagcctacaacacatgtgaaggatgagaaatcagtcgtgtcctatgagaatgaaaagaggaggaatatataccagttgccatagctgattccgtatccgaacgagaattgtcaacggcattttcttctgttgtaaagatagaagatttggttggttcagcgccaaacacatagtcatctggaatcggatcctcgtccagttcatcctcctccatatcgaatgcaacgtgagtcgtatgcgggtcaatcggaagaaacgaagaatcattggtagaaaaggattgagattctggagaagacggagcctctccttttgatgaaatttcagtgcaatataagcggacgcgtcagcaatatctgaaagctaaacagctatgaattcaggcagtctcaccttttcccatgtcgtcgtctgcatgttgaatctgctctaaagaagatgtgctagacatagagttcaagttcgtatcgaccaagttcatcacagcatcatctttggcctctgatctagtcgcatccgctgaaccctcagtcgccattgtatcctcactatctgcacctttctcagccattgcctctgcctcaacctcgcgggaaaccttttctgtgggagttaaatcgactgcgctactcaatgtttcgtcgtttagaggggatgtgggcagactggttgactcttgctcggcaggtgattgaatttctggccgtgggtgtggatgcgtgtgaggttgcatagcggcttggtgttcctcttcaaattcatcaaattgaggctccgcctcggacaataactcgggagaagtggcttcagatccagcagatgatattgactcagcgagaagagaagtatggggatggggttgaacagcctgctcatgctccctctcaaactcatcgacaggatcaatgtctgctgaagccggttccacggtaggtgtcgagacgaaaattgctgaaaggtcgccagagctatgattcgagggagtcttcatagactttgtttgaggttgaacagtgtcatgccgcgtttcaagatcatcaactccttctccgtctaaaccacgctcttcttcgatattttttgacgataaatctgattcctcgacgtctttgtccgctttggtcttatctgtagaagagaaggactcgggttcctcgacctgccgctgttcttggttgatctcttcagcctcaatcgattctgcgaagcagtgatcagttgagtcggcggagtgagacactacaggacgaggttgaatggctagttcatgctccctctcaaactcgtcctcctttggcacaggtgagcgaataggcgatggcttttccgaatggttggtattctcgttcgcagaaaattcctccttcgatagagtgaattgttccagtatgttggcagtagaaggcatttgttcggcatatgatgaagtcgatgcgaaatcaacttgaccaaagaagaatttgaaagcattgtttcatttgaggttagtagatgatatcagtgtcggtacatctacattttgttcagaagaatcaggagaaatcacatacaggcttcagcaagtccttcagtctttggtagatatacagaagtagcatctcttatctccttcactggtagaagtatcttctctttttcgtcctcggcatcatgctcaatctctctgatgtcaactcccaattcctcctctgatgacttgtcctgctttctgctctcgtcctcctctccgtcgctatcaatgtcgtcgaacgcgtcatgaacaacactcatttctacctcattgaggtcaccctcgtcttcgttctccttatcggtatcgactgacccgtgatcatccggatcttcccgttcgagcatatacgtgtctcggttccccggatgccattccaccaggtcaccatctcgatcaatgacctcgatcccatctggttcgagtccataacgcaatggtcgtgataactgatcggtatccagatctacgcctggtccttgaatatctactccattgttcacggaacctttaggcagacttgtagaagaaagtcctggagaggaagccgatgagagaagaggagtgacttctttcgaattcgaggtaaaaaaattgaagtggtttacagatgaaggggacgatgcagttgacgcgaacgccaatttgtagctgggatcggacgacagacgaagaggttctgtcgtcatcagatccattggaagtccaagaggaacaaagcttgataggtccggatcaataaagatctcttcttgagaggttccttggccattttcgttctcgttctcgttctcgttctcgtcttcatctactaccgactctccttcgatcaattcatccgattcgtcctcaaaggtttctatattgatagcttggttggcgtcattatcgtccttgctacaaaacacgtcgtgatctccaagctcatcagtatcttcgctgtcttcctcctcatattcctcgacatcctctatcggatcctgaggtaaagagggaggagctgatgtggacacaacctgggagactgaaccaagctcgtctcgagaaatatcagagggaaccgaagcggctggttcgggtaaacttccagggggtgagagcctacgaggacggtaagtggagtgcgtttgaagtgctgatggttcttcaatatcagacccttcgctactctcatggtcaccctcttcttcttcctcctcttcctcttcttcctcttcctcttcttcctcttcttcctcctcctcctcctcctcctcatcgtcatcctcttcactgtcctctaagctctcctcctcttgctccctatcttcgctattctcttcatcgtcttcatcttcgtcttcttcatcatcttctcgagatagttcatcatcttcctctgatcctcggttgaggtttgacaggccacctatcttcaccattccgccctttgcgtaccaggttgcttgctcaccttctggttcgctctctagatgggcgtcctcatccgaatcctctagttcgatcacatcctctccgtcctcattttgatcaactgtaaatgaaggtactattggagtgtcctgactacgaaagaacacatctcgggcagagttgaactttggagtacttcggacggaagagggcgcttggaggtgtgtgggaaagggagggaatgcttgatcgtcgtgttcaaagtcagaatcttcgccttcggactccgactcgttttcatcagagtaagtttgcttagaagcttccgagtcttgatcattttcgtcgctctcgtcttgatctgatgcgtgcttttccaaactagactctacagaagggggttgccggcatgagagtacgcgtcagtcgttgtcctcgatactcaaatatcgccctaaactataaagagaacctacccgacacatctatctgttcaaatttcgacccaacagctaaatcctccttgtctctttccttctcaccgatcatcacctgaagatcatccacctgaagattctcttccatattcacatcaccgtcttcgcattctgaggaatctctaggaacaagaggcgcgattttgggcgtcagaatagagattgtcggttcaggatttgggtagagaggctttctgataggattgagggctctcgtgatggttgattgaagatcggatatctgatgtaagcgcataggaagaatcagatcagtatgaccaacctcaaggaacaaagagaagggagttgtgcccaagatagttcgtggctaggtacacatacccaatgatcaaactcctcctctggttcatcgtatgggtttagatcccagcgagacatgctcgctattttttttaaaaaaacgtatttcaaagtcgtagaggtgtaagtagatggagaaaggtgagcggttctgaattcaacatgcagaccatcacgtccgtttgacgaccggtacgagttgtgtgagttagggttagttgtagccacgaagtttgcatatgacacggtgtctaaaagctgtgcagatcgatgcaaatttccttatgacgcattttcgatcgtgagcgacgcgtgccttccaacacacgcgtcgccgccggagatgaacgatcttttccgcttacgtgattggaaatcgatctcgatcatcgatttcagctaccttccacttccgcttcttactgccatggcttgtttcctttcgttgtcacgaccagttgctgttccttctctttctttccgacctccattctgttaatttgttccccataggctcttttcttgtaatatacggaatcctcagtccttttcaaaaatctaccggtcttgcggcgtaccctttgctcttgaggaagaagaagaagaagaagaagaagaagaagaagaaaaaacctatttcagcccaacagatatacccgcttttctaccgttatgactaccaccgccttttctgagctttcgatctctcaactttatacccggttgtcatccatcgtaatcgattccagagattcccggagcacattttctaactgggccaagacgtttagctgtcgacctctcactggttggtctgtcttggcttctttcgatcttgcggcatgttttctctgcttactaccttccgacgcttcgcactttggctttgattgacatccatcccgccccctatagtcttccttccaaacactgaggatgactgtcaggctattgtagagcttgccaggcgagagcaaaagtccgtccgatgtgtaggcgcgggccattcgccttccgatctagcatgtactaccggattcatgattcgaacggataatctgaccaaagtgtttgaggtgagtgttctcacggttagctgccttcaccttctctgccgatcgatgcttacgactccatccacccgttcctattgaccgggaatatcaaggtggacattgagaaaaacgttgtcgaggttcagagtggaatctctcttcatgcgtttcataggctccttgcctctcacggcttggcaatgtccaatttaggctcaatatcggatcaatccatcggtggcatcttgaccactgcgacgcatggctctggagtcgactacccggtgatatccgctggagtaacctcacttacgatgttgctggcggacaatacgattgtagagtgctctcgagagtcattcgaggatctcttcctcgccacgctctgcggcttgggcaccactgggatgattctccgggtacggatcgcggttgagcgcgcatttaggctagatgagacgattgagccggtcgaattcgatcagtttgttgagccagataacttcgagcgcatcgcgggaagcagtcaacacactagagtgt

SEQ ID NO: 1073 - DNA, 18961 bp, Xanthophyllomyces dendrorhous
cactagagtgtggtggttcccccaggtgggtaaagtgagcgtaggatgcgcgaacagaacttctgctgtgagtctttttgtctgatcaccttttgaggagtcctgcatctctttgagtactgaccacgatcggtgtttccattgcgctgtcaaacagcctccggatccggcacccggatggggagcctatttccgaaatgtcatatttggcttccacatcgttcagttcttgctgtttgtgtcgaggtttatcccctcgctgacaccaccggtatgcaggttggtatggaagcatctgaacggtcggactcagagacacatcggggatagctacaaggtgttcaacttcgactgcctggtatgttcaggggtttcatctttgacgttgcaccctcgtgttatgtttttctcggctaacgactggagctaattgatacatgctagttcccccaatatactaccgagtgggcgatccctgcagagagtgcgccagaatgtctaaaggagcttcgaacgtggctggaccaggaggcggctaaggctgatggtgtccggatacatttcccgatcgagatccgctggacaaaggaggacgacatctggctgagtcccagttatggccgaaagacggtctatatcgggattgtccaattccggtgggtgccctttcttctctttttcttaacaatcatgcgtctttgtactcaatcaaattaacgatgaatgcgcgtatgttgcttgttcagaccgtacgggctgccagtgtcgtaccgtcgatactttgcaaactttgtgcgaatcgtcaaatcgtatgaaggtcgaccccactgggcaaaggcgcataacctgacgccgggtaaccttcgcgcgctttacccaaagtttgatgcatttgtcgaactgatgggtaggtatgatccggacgggttgtttgaaaacgagtatgtaaagaggcacctgttgggtatgcctattggggacggcgtcttcagatcgagtgggcgagtgggcgagtagacgctctttccttacatgtttttatttatttttggaagaaaccatatgttctcttggttcgtctttggcggctctctgttgttcatcttgcttgttccacttgttattatgttcttgcagtactctctcaacacatttgaatatttattggagtgtttctctttctctttttcttacgcaaaaccattttcccctctaatttcttcactcggattattacttgtgccctttctttttctcggattttttttagatgcgatagatgcaatgaatgcaatgcatcgggtttgtgacacaaagactagacagactggctctttcaatcgtatccctttatctttcgtcgatgaagatagacaactagtcaatcaactgtacaagtaaagggttcatgttgggtgagaagaaaggaaggaaggacgaaatagactcggtaagagattccggatgatgtcacagtacagctgtcacttctctggggaaacaatgaatgatcgagagagatgttcttctggggttcctctgatttggtgagcggaatgaatcctccgggagtgagaggaagaacgacgaaaacaagaaacccacgtcagttgtgtgtgaaaaagaacgaaatcgaatatcatctgccgctgccgctgcggctttcaatttctgttgggcttgtataggcttttttgttctcgcgttaagccttttctcttactatctttctagaagatattctcttttgggcttgggctcgggttcggtggtcaaacctgggtcacaaatacatagagccgatggggaaacgtggcttagccgacacgagcgcgaggtacgttctgatacgcgtgcggacccccgattaaattgatgacgcaagcggggtaaaacgacgtcaggcttggattctagagccgtaccttttttcttttcttttcttttctttgatctagtcccgcctcgaagccaagcagacagcagatcatcatctaggaacacatatataaatctctctgggggtcgcttcatcctcttgtccattctcaccttctcaccacccatctcactttctccttcactctcactttctccttcactctcactttctccttcactctcacttctcgatcccacttcccttctcaaacccaacactcatcttctaacaatcatcacaatggctgagactatgcgagccctcaggtactgttcgtaccctcttttcttctaatcctatcgccattcattttcttcaatcgagttttttctaacaccttgcatcttccacagctgctgccaagaccttcgaggtcatttccgatgcccccaagcccgttccttctgacgacgaggtccttcttaaggtcaccctttgcggtatgtgcggaaccgacggacacattcacgacggagagttcatggcccagttccctttgatccctggtcacgagggttcgttcatttcctcgcttatctctcttttccatcgccctttttacatctatatactaatcttctctgttcatcacacattcaacctatgtacagccgtcggagtcgttgagtctatgggtaagaacgtcaagggattctctgtcggagaccgatgcgctgccgatgtcggaatcacctgtggaacctgcttctactgtcgacgaggacagaccctcctttgcgaagacttcaaggccaagggtgtaagtagatatcgtccatcgattctcgaactagtctgcaatagcctaatcttttcttgatttcttcatctgccaggtcgctcttgacggagggttcgccgagtacattacctaccaccagagcaagctctacaagttccacaacctcactgacgaggaggcttccctcctcgagcccgcctcgtgtgccgttcacggtctcgacaagctcgacatgaaggtcggaagcaaggtcctcctcattggagccggacccaccggtttgatcctcgcccagctcctcaagcttaacggagcttcccacgttaccatcgccgccaacgagggacagaagatgcagatcgccagagagtgcaaggctgctgacgagtacatcgacctcaagcgaggagatgccaaggcccagtgggccaagctcaaggaggataacccctacggtttcgacgtcgtggccgagtgcaccggagttgagtccattgttgaggactccatcaactacgtccgacgaggagggacccttcttgtttacggtgtctacgagaacaaggcccgagtttcgtggcctccttcgaagatcttcggtgacgagatccgaatcatcggttccttctcccagacctactgtttcccccgagcgatcgagtacctcgattccggacgacttatcctcaagccgatcgtcaccgatatcttccagcttgaggactggcagaaggctttggactgcatgaactcccgaaagtgcggaaagattgctatcaagctctaagtttgagaatgcttgggaaacgcggaccgcaggggtgtcctcgattcttttggatggtcagaccgatatgtatccgtagaagtcgtcaaactcgagcgaggcaagcagagtgagcgtgtatcagtagattagcatttatttcaaaatgaacgtttcgtgtatgactatgtgaacagaggaagagaaaagaacagaaaggacaattaattaggcgttgctctgattaaaacaaaaacatgtaattgagtggaacgtaaaacaagacaatctaacgcgaaatattttctgtcgtagtctatggactttgggagggaggcaagacaaggcttgtgttgtgtgccagttcgcgatttgagtcttgatcaccaacatgccccaagaactatcgttccgcagatcaaaagacatcaaatcaaagaggttccaataagacacaaaagcatacatatggaggtctcgtcgcggaagttgaattccttgacgactaggaacggagataaagcggaagagaagaaagagaaaaacgaatgtcggggatttgctcaaagagttatagctaagaagatcaccagattcgagattccaacaagaggtcggtgctgctgtccaacccaaggcaagctgcaggtaaggtagagagaacgaccggcattgttagtaacccgttgacaaccatttgatgaatcgagagaaaaccaacctttgaggaactgctcgagcccgtttcgctgccgagccagactgttgataactgcagtaccatccttgacaacaggagccttgagctatgggagaaattagtcaaagactgggttagcatgctaacagattcgcagaaccgtaagatgtgttgaacaaaccatgtagctcaggagcgagaggacgctgtgcagaggctggaagggctcctcggcatcattcgccaaggcggggctttcagcatgaggggacactcggtattggacccgggtaagcaactcggccaagatggcaagatcaaggatcaaaggggtggcgagcaaggaatcttcacattggttgaagatgttcatcgtgttctatatggcatgatatagatttgacagatggattagtcaacaacgcccaaaagctgatcagcatataacccagcctacttgcgctgtcgaacacagtgttaaagagacttactcggccaccgcagaatagctcggaaacgtactcatcaatggctcgcttgctgtctccaacggtaggaacgtacttgatgacaactaagtggtctgggtgcctgagaaaatcatagacgtaagcctcggtcccaaaagagactagaaacatgtagagaaacaaacaaactcactctcccttcttggcaccctctcctagctgttccttggtcttgtagagaagggcgttggaggcaaccatgtcgtcaatcacgctgcttttggaaatctctttgcttcggaactgagagggagcggacagattctgtaaagagagtgggtgtcaagagcatcagctcgtttctgatgcacgaacgacggagaacgaggaaatagtgactcactcgtccgtcgttgtttcccaagtggttgtaggaagcaacagagagaggcttgattccggcgttgacaaggaactctgcgagaacagacttgaccttggtctgaccgctcttcaaatcgtctcctccgatgaaggccttgttctcttcagccaacctgacaattccgggaacgaaagtgttctggggggcgccgttgacgaaggggcaaccctcaaggatggaggcgaccgcaaagagagacgaaggagacacctctgagtgagatgactgaatcgaccgaaggacctcggctgaggtttcattgactccgggaataatatcggagtatcgctctgtgttggccgtccaaaaaacgacgacggtttcgagatcatgctcggcctagggatttgttgcaaacgagaaggaaaacacccgtcagatttgaacaggcaaacctggttaatgccggaaggaagaaacataccttaaagtctcggatgtcctgtcggatcttgtccaagtggacctgcttgtcgtttccaggaagaacgttatcggcccgttcttcctgattggcagcgataaagtcggggtagtaaaccgaggggagaggcttgatctcactcatgagaggtgcaacctgtcgctggagatcatactcgaggacctttgctcggttcatagccttgtcaagaggcataccagaaatatcccatccgccgagaacgaagtcattgggatgaaccatgggcaagacgtcagagaaggggatgttgacatcatgaccagtgacggggttgactccgattcgcatggtggacgctctgacgagagaaccgatatagttcggtccctgtcggccatccttagttccccaggtgatctggtgcctattagctaggatagaggccacgagagtggttccgttgtttccgccgagaccgatgagcatgagactaaaggtttgcacaaacagaagaccaagacaagggttcaatggatcggttcttggcgccagagcgcacaatcatggcacgtccgtagaagggagaagaagaaagcaatgacctacccagtcttgggtacggttcgtttagtcttaaactcgtaaccagtctcgaccctagtgacagcaatcttgccgtcctcgcctagagaaaaaaaaacacaatggttagcgggatgtcggcaagattgggagatatgtcgtcgagacttacagacgacttcgttcttcctgtctacaaacctagctcgaatctcgtcgtcagagtatacggtcgcccctttaccgaggtcaacctcgatccccttagggaaggcggtcctagcagcggtaggatgaatctcgtaagcagcatcctgggagggggtggcaggaagagagtgaggtggagaggcagagtctgagatatcgcttccgttgggatgggagttcatattgatggctatagatgatttttttgtttgatttttacttgttttttgtgaggagcttttctgtgttttgcgaagtgtctgtaggttttagactactgaatggattgatgttgaatttgaaatataccaagtttgaggaaaggattcttaatgtgttagagggggagggcaagtgtgcttgttgcctgaggaagagagaagaccgagagtcccaagtagttagaagaaggaagaagaaggaagatggaaaccaggaacgggacctgttagtcaacagcggaggcagagcagatgatgaagagaaaggaactgaagtaatggacttgccaaagaagttgtgaggacttgacaaggtgttgctgaacatacagcttgaagaaaggggtggatgcgaagactaggagaagactaggaagcctgggtgagattgttagatgtaagtgagggtgagtgagtgttgtaggtgagtgaaagagaaaaggaagagagggaaagaaaataatcattgtatgcttctctattatataggatttaaagagcgaaaggcgtaagtgctctgtatccgtatgattggactagccagtcagccagggcttcttggctcggcctggatgagtgcgcaaacgaagcgagcccagacccaatgaggtcttttcgccttctcttctctcttcctttcactctccggtcagtcacaacatgagtaaacaccgcctctgtttttctttgcgtttctggtattttcggtccctctctgccggccgcttgttagccctctctgggcgttgtcagcccttcttacctttgctcttctgtccctccgtcggtttgcccggctgttgccgtagtctgttgctctccgttctcctttggcctctcgacctcaaaggtcaacaagcgcgacatacaagagaacggacggacgatcttccaagaagcacgtacacaaacagaaagagatgcctggacaagaccgaaagacgactgcgcatctacccaagtatgatccgggtgtacgcgtggggatgtgacattattacaacaattggctacggcttacgtatgcagcctgatcacagcatccggcgaaggccgacagttagggttaactctgacttacgttctcttccattctcagtcactctcttccttctgctttccattctatctctgtcctctatctctgtcctgtggattattactttctcttcagccatgtactcatccgtacagatccatacgaggaagccgacacctccgaacgtgcagcagacaatatacgaacctctcctccatgatagccccgattccgacagatcggtacatcatgaaggcactaccgacgacgacgacgacgacctaaagttgggcaggttccaaggtggacgagccactgttttttccagtgtgtcaaagtcagtcccctctattcattcattcattcattctatcctgactaattaccatttatttccttgctgaaccactgaatcatatctcatctgattacgtcccttgtagcttagcaaacagttcgtttccttcggtcatgatgagctcccacgtttcatcctcgcattcaccaacttgtatttatactcttttgcacaaccgctagccatcctcggaactggcatgttggcttttccatacgtgtgtccttgatgcactcttgataccttgatcgatcttgtcactgacatcttttgtttgtatacttgtatacaatcaggcttttgccagcatcggtatcattccaggcatcttttcttgtaagaattctctgcccctaagtgcgtcgaccaggtctcgctcattatatttaatcgtatcctaggcgcgttctctggctccatggcgttcttcgggctctatctgctgtccatctgcgcggccaaggtggagcctccccggtcgacctccttcaatgcgatctctatgcttacctttggtaaacgagctactgtctttttcgacctcgctatcgctataaaatgctttggagtgtctatctcgcgagttctgcttccactgtacttctcaaaagttttaaaggaagagctgtagtagagcttactctaatttatatgtgacccaacttgaacatctattaggtatctcatcatcatcaagaccttgacctcaaccgcgttgaccacgttatataccatcatctccggctctgatgaaatcccacaaattttgatctcccaccgactatggcttttgctctccatgtcgatcaacatccctcttgcctttttcaagaagctagattcgtgtgtcctctatttctcctgtttctctcgtttctcaatcttttgttttattctttgacatcttttctcttccccccccctttacctctcgtctttaaaccattgaaatctgtctctgcgctcagcctccgatttacgtcccaggcagctctcgtctttgtgctatacatgttggccatcgttataacttattacttccaccgtccacacgatatcgagcccgccggaccagtcaaatacttcaagtggtctcatggcgcgatcggcacgttccccgttcagatatttgcctacacgtaagtctaccctacatccttcagctcatgataatttccaatgtgactcctaccccttcatcctctgacaagtggtatctgcctctctttcttaggtgcgcgcaaaatctgttccctgtatacaatgagctgaaggaaaatacccaaaagaggatgaacattgtcatcggaactagtattgggagtgccacggtcatctatgagattattgcgctcgcgttcgtcccacccctctttccttttcgtccttcttcttcttttgtttgcgtctcggctctccaaaactaactggctgtggttcgtaatcaaccattcgtctatctcgttattcgaaatgaaattctacacacacccagaggttatcttacttttggatcgaaagtgaagtcgaacatcgtagaaatgtactcagactcgtcgttattcgtcgctctcggtaggcttggtatcgtccttatggttctattttcctatccgctccaagttcatccctgccgagccgctctcgataaagtaatctcaaccgtgtggaaagacaaggagacgctcattcaggtgcccagagaggaggaagaaggcgacgctcaggtggtagttcccagtctggagatgtctaaagttcggttcatctcgttggtcagtcgacccttcctttcctccttggtttgcttggtcaacatactgaatgctgattatcgagattccttaaccctttgccactccattatttggaaacagaccacgggaattatcctggctggtttggcaatcgccctatcagtcgatcacctcgaaactggttcgtttgtctctactttcatgctattttgctcactggaaatgtgacgctaattccgcccaatgtaactctcatctagtcttatccttcgtgggagcaaccggctcgacgaccatctcattcatccttcctggcttattctacttttctctgtttagacattcaaaagaacgttcgcccgtgttgacctgggcagcgcttggattggcgatctacggaatctgcgtcatgtgcttctgcttgacgtataacattatccaattactaaactgatcttttaactgaataaagccacagctcttccgttagatttcctctcttggagttgtatttatttagagacttcctcgtacacttgctacacttaaaaaagttctttcttgtcctccacagttattcgtagaattgcaatctcctgtttctttgtttaacatcacttcgagatgcatcttttcttgatctttgtctttgtcgtatgtccaatcaaacttatcacaggggtatacttgatttgatgtttagtcgagcgagggagaatgatagtttcgagagtggtctaagcacgtgtcgacgaacgcgtctctactctttcggccagaagcgagattctcttcctcctacttctacacacacacacacacacatctacgctcctcatctttcttcgttgcatcatgacagacttctggtgcggttttaactatgtttatatcaacactgctgcaggcaaggttcctgcccaagacaacgatgtacagaagaaattaactgttccatttctttctcttatccacaatcgattctctaggaaagccaccaagaagcactattgttcgttctctcatatcttcctttctcgtcttcctctattaacaacaaaaggttttctttattattcgatcttaatttggtaaaatctactaggcaagtactgtgatctacatataaacgatgatgcacccgtgagtgaaaacccaaagccatccttccttcatactcaattcatgagaactgacttgcatatgaactaaacgatgcctctctttcctgacggacagtccaaacaactacatgagtctggactcagacatcttggaaacaaggaacgtgctctgagggagatctacaaatctggagaaaagatgaagaaggcgaaggatgaggaggcgaaggaaatagccaagatcgaaaaagtatcgtttacttctttcagtttctcatcctcttcaaataataacactgtgctgtatcaactaaaatttcgatttgttttctcaaatatttctttccttctttctttctttttttcttcggctgcgtctctgaactttatctttccaggcagcagctgaagctcacgccctcgactctgggattcctctcgtttcatccaccgctggcggcgactcgaagaagactgaacgaccatcgaaatacgattcgtacaccacagcagctgacctgggatatgaggacccgaacgcgcatctcgtcgctgagaaagctcttcgtcagactgaaggccgagtaggtcaatgggaagccgttccactccctccaccaccaccaccaccaccccggccgacattttcggatgtcgagtccggatctgggacttctcgaactggtgcttcgacaggcgtgtttggactctcggcaagaaagcgggaagaggcggaggaagaagagaatgggcgaaatttcaaatttagacggagagaaaaacgcccggtagcttacgtagacgaagacgatgatctcggagagatcaaagtcaaagtaaaggaagaggagcgaagtttgctggacaaacagaaggaacatgaagcggcggaagcgaagcggaaagaaaagctggtatggcagccggtcggatgggggacgcggttggtggatgaaaaagaagccaagacgcaaatcaaggaggaagtgaaacaagaggacgagggcgatggttcttcctccgtcaaagccacttctttcgttgcctcatcttcgtttggcctaccactcgtttcccactccatcaaaacggacgaagatgtcaaattggacatcgctaagattgaagcggaggaaccttcgataccgcctccgtcaacgggaggaatgtttaaaaagcgacgaggtccgccaaagggagtaggcaagatcgtcaagccataaggcgagagggagattaaatagtaagagaaaaggaaagaataatctttctttcggctagccacagacactgcatgatgatatgctgtataatgtattttccttatggattcctctctcaccaggagataacattcattcagaggttcatatccagctgtgataatgcattacatgtaaaagatatccatactaccatccttttctcctcatacagtcttcgctacgacgagctccgcgggatcataggggacgtatcatccatagagactcgacatgatatgttgtacaatgtagtaggcagaagtcacgatcttttgttcatcagatcgagttgcgtaggtcagcctagggattgggcgccagagttaagagctcatacgtcgtgaccaaaagcaaaaggacgtactatctctctcgatgagcttggtctactaaccttgttggctaggctccagacattgggaattgtaatcttacgcatgagaagactatcttattcgtcgtcctcttcatcgtcatcttcgtcctcttcgatattctttcccttattcttcttcttcttttcttgaacaccctctcctatactatcctcccactctttccagtcggtcaatatactgttcacctcatcccggcatgtcttcatagcctctaataaaggcccgtaagtgcttgttggttcagccaccgctttcacctctgccttgtcagagagtggatctgaagggataggtgtcggcaaagtcggtttagctgaaggtagcggatacgacgtaatttgtttcgccgggtgtggagcagggtgaagtgggtcagatgagattgtgacttgtagtgtagcagtgattgatgtcattttcttttggtggcctgaacgaagaaagggagggataagaaaacggccagatgagggttagtactcttgcactcgacacagtctatacgggcattacgacaactgattcgttgaacttaataaaccaaagaaagtcataaagaaactgacaagcgagtatgtatgatgataatgatgatgatgatgacaatgacgatgtctgcctgttctgatgggttgatggataaattaggcgaaggttgtcgaaggtagaggaatcttctttcggccttacggttttcttcttccttccagaatcctccccattgaccttcttttgcccgtctccccatcctgaacctctctgtcctctgcctggcatagcaagcgtgcacttgtggagaaagagccgatatcacaatcgcatctagagttgtaccatctcgataagaagaacagagtccattgtggcctaatactaagcctgttcgttcttcctcatcgccatcacgtcctacacttcatccaatctaaccattttttttctttaatctattcacatcacccatacgttttctcctcctctggttccccgttatgtcttctccaccatcggacttggtagaacactaccacccagatatatcttctaggtcgccacataactctcccagcaaatacgacatgggtgagtgatgacgtaccgactaatcatgattgcagtctcttacaatcctatccttaaatttcttatattttctacagccaacgcattcgagttaacatcccctctgacaagacagaagacgccagaggagattgccactccgacccggtttgtcgatcctaaacagcctacgtacggaaaaacgctctcgtctcctttggattcgcctggcatattggccgatcaaatccaagagttcgatctacctggtcagtcaaaatcaggagaggatgaaggaatgaagatcgtcctggggtatgacaccactgttgatgctcttctagctttcaaccagtcagtatgcttcctcttcatctggagtctcgatcgacacgtcgaatggtaaactgacgtatttcaaacgacttggggacctcatcttcttttcggattctacctcatcaacagcgtcttgaataggatgtctttgcatcccaacgatcatgtctacatggctcaagttcttcctttgacatctgcctccgccagctcgtcactgttttctagtcctcaatctactcccaatacccacaccgcccaggcggtctcttacgaaggcgctcatggcgatgaggacgataccaatttgagcacactttctagtaaggatagagaactggttatcttgcgaagaatcagaaaggcgacgatggagaaactcacaaccgaaggtattaagctcttgagcaagggggtgagcatatgttctttctttttatatctttcagcatcgatgagctgggaaactggttttgctgatatctgaaagaaaccttccatggatccagtgcaaagtcactcctgtcatcgttcactcagaacagcccgccaaggcgctctgtacgcttgccgaacgtcacgatgcagatctgattgttattggtcgtcgcaagctgtccaagttgcaccgggtagtaggagctggttcggtcggaaattactgtctactccacggcggatgcaatgttctgatcgttcagaaataaccgtcaggtagccttctaataaagagcgtgctgtatctgtttccttttttgtttttgaatatatgaggatatggtcgtgtgatatccggccttgtacaatctattttgctctgtgtttttatacaaatgctccgaaccttgattataactggatatcttttcgaatacttgatcaatgcgattttgattgaaagagtgaaatgagatgatcaccgatgctgagtatatcaatgatgcctgggaaagatactgtaaaggaacctcaatagattaattctcacttttccgattaatcatatttaccatctctgaccaccatcaacactcctctccttcacagcatggtgcgtgttttctttgatttaccccagaagtcatacataccaccaagccagctccttcgttctgaatcttctccatctataatatttaactttcttcaagtcggctaagaagctcacagttgccgatcagcggaagctcatcgaccagctttccaatataaccaacgccacgtttgtcctctcgtctctcatccgttctgtctctatttcctccttccgtttttcttaatgaccctttggtcattcgatcgaaaaatcgtcatttcacctcgtgttcttgcacaattccttcgtaaaagcgcgacggattcgaatcgactcctcaagacttatagatggaaccttgaactagccatcagcggcttcttcgatgatgccctcgctcaacagaacgcagccaacaacacatctcgcttggctggaagtgcaagtgcgaaagccaagaaggatagggaaactaaacttttggcgatatttgaccagtttaagggtccgtcagatttttgtgttcctttcttcccacacgggcggatcgtgcaatctaagccttgatcgattgaacccaaaaaagagaggaaggggaagaaatgctgacgccgatcctggattctttttcctttcaataaatatatagatgagaaggaatacgcgatcaccatcgaacaggttgcggactactttgaagctatcggaataacagagatggactctgatatcgctgtctaccttgtttcgtacgagctcaagtcgccgtcaatgggtcgactgcctcagaaggaatttatcgagtcttggtctgcgctcaagttggtatcattctgattctacttttctcttgtttcaaaaacgtgagctgatggctgttactcctttttcaatagggtggattcaacagaagccatggcgaacgaggtgaagaacctccgcgcaaagtacctaactgatcccgaatatttcaagaaggtctatcgatatgtgtatgatttaggcaagcaggatggagcaaaagtcatcggttagtgaaatcttcatggagttctttctcatctaagatcacgtacttgttcagatagctgaatctgctcggatctgttgtcttgccttttcgatagtccgagatatgggtcagtccttcttctgttgggtttatggatcaaacttcttcgttctctgcacacacctgccgaactcaaggtagtgtcttcttacatcgaccatttctccgatctgtgacttcagctgtcgctctatggcaatcgctccttccgcctgtgttccagtccaacccttcagccatccagtacagcaccacaaacggcgcgcggggaatgggcgaacgtgaattcgggtggtggctcgaattcttggaggagcaaaagacgaaaggaatatcgaaagatttatggacgttggttagtcttctcttccgcatgtttgaacacccacatgaagcagatcgatgtgtactgaccctgacgaggtttgacggaccgactacaatcagttcatcgagtttgctgtcaaggtgccctacacatacgatgtatatgacgaggatggtaagttgcttgcctcatcgattaatttgttttcctcccagctgacaaaggcgcttgacgtccttcttttcgttggcatataggtgcctggccatcattactggacgagtttacggattatgcaaaaaaccgacgtaagagagaaggacttgacaatgcctgaatctgcttctcacactcgaggtttcccgtaaacaattagacctgtcaggcaagaatatcgctcttgtttctgttcttgatcaaagttctatcttccttgccttaggttttgttcaacttcatataatctatatatgttatcttgcatcgaagctgaacaataataatcgagtcgaagagacgatctggacgaccagatttgttaagagaagcgtcaaagaaagaccacaaagttttggtcactaattgcggataatatagcttgttgtttctaacgtcttttcatccaacacttctcgcttaatgttttccaaacaggagccctctcaggtttgcgaataaggtcgaaggctcagaggtatgttttgaggcactgtcccagtgataagtcgtactgggcgactcaatctctggggtgccttcagggtgagccagagagataggtgtggatgcctcaacggatgaggatggatacggatcaagcacgagagaaggtgaagagacagaaggctctgttggcatcaaagttggtttagatgtaagggaggaggtttgttctgatttcgaagctgaagatgcggaggaagactcggccaggagtagtggtaacgatgatagtatcggagaagcggcctcgggtggtgataaggcctgttttgcaagatgaggaggaaggcttcggtccaatgttgtctttgcaacaggaagagcagatggatgaggaggttgcaaaggttgtggaggggatgatgcacgaggggccggatctgaagacgaagaacgtttacctcgtttctgactttgtgcgttcgtttcttcaattccttttgtcgcaatgtctccctcaagatctgattggtcgacagacacccgggagggaatctcacctgcccggcgctgttcgtcatgatacctagctgcttgagcttctttctctagatcgagattcaaccggctcgcggctgattctcgggcctgacgaagtccaccggtgaaaccttcgaaatgtctgaaccccttgatccacaggtcgcgttcccacttttccaagtaggcgacggacgaccgagtaatctctgggtacccgatcgagaatgtctgatcaggaagaaggatctcggccggggaccagtcatgatccggatagacttctattgtaaaagctgtcaggggagtacaatcgttggctgttgataagttagtactgtgactggagttcaaagatgaataatcggtaggaattggctgatcggattcgttggcttcttgatcaccaagtcggttgttgtacggctcgtgttcgtcctcatttggttcaaaaaggttaggcagatggaagtctggctgaacaggtgcggagagcttgatgagatcgatgaatgatgggccaccgacaggtgagctgtgaaagtaggccggaagggtccctctgagccggaaacctttctgaccggtagtctcattgagagtaggcatacttccgaccggttcattcaacacagtgaacgaacactcatgaccggctataggtgggaaggctgttgaattagggtcctgcatgcgtcgttcgttaaaggcttgttaacagattatatctacgatcgaaaatggaaagagaggagaaagctgagggagtacacaccatgccaaagtgaatagtctctagcgaaccgaatctggccttgagagccttgatgaatgcgagtctgacgatgagatccgaaagctcggtccctttgaatactgttccagagagatctctcattacagctttgaaccgtctgccgtagggaagatgaatgcttctattctcctcccaagtaggatcttctttttgaaggattgtacgtagaagttgagcaatctcatcgaacgatgttggatcaccattcgcatcgacggaggagagagctgaagaaggaggctctgcaagtgtatcagtggtgttattgagtgtagtggaggaagaagaggctgcccaacgagacgaagaagagaacatgtctgcgctagatgagcctgttccttgagtcgggacaggagtatcaaagggcggagtggagagagagaaagaagaggaagagaaagatgcattgggcaaaaggcaagaaggagagctcggagctgttcgaagcactgaacgaacggtcgacgccgatctgagcatggctaacgatgagacagaaccggtggatgagaagcgtgtgtgttgtgcgtaatacgaaaacgattgaaggatttctagacaaaaaagaaaaggcgttgccaggggtgtgacaaaagttgcagggtttgtaggcggaaggaattgctagtagacaacctgcgacgggtcattaggaatccaagcaaataactcttgt

SEQ ID NO: 1074 - DNA, 1369 bp, Xanthophyllomyces dendrorhous
ctttttctctaacaatccctttcccaagctctgcttccctctgttcaaactctcttagcttcctatcctttctcgtccccatggtctcgtgtgcacagtagcaagccgtttctgactctggctctggtacagggagtcagttgcccgaggagggtcagacatctagaggattggagttgcgtccaagtggtgactttcaaataactagaataagaagcttgctaaatttatcagaccatgagcctggcttaagctgcttccagaaactatcaataccaccaaggacatgatgaagtactttgttgtcaacccacctgacgactttgttgagtgggaacgctaaattgaatttcatttccttgtcataataaggggtgaggcctggcagaagcagagaccaatggcactgagggcgcaaatgaaagaggataacatcagaacattctctcaagacggttccctgacaaccgatcatgtcactcatgccgacagttcgaacatgtcatagccgaacgttgaaaccaaaggatcaatggtggatgttagaggaacaatactcacaattattgaggagataatatgactgacaacaagccttctggcgaaaatactcatgaaaacgttgctgtatcaaatgaagcatccatctgctctgttcaacacaaagaaagtgtctttcaagtgataccgagaaatgtggatagcgcaaaagaagactacgaaatataatttgactctggttgttctaaatcaatctttagcagcaagagctggttcagtccagacacacatcgtctggcgagaaaacagatcatcctcggtgacggaaactcgatctggtcgactagagtgggagatgtcgaactgtcaacagcgactgatacaatcatcatcaagcactatcttcatgtcccagagatcgcaggcaacctgctttcggtctctcaactggacgacgaagggtacagcgctgagttcagcaacagcacatgcatcatcagctaagagggaagaaacatactcaccataccgaaagaacacaagatgtttgcaatcgtgctcgaatgacaaggagcaatgggagcagcggaagcaatggagtcctcagaaatacaagaagtataacaagtacaagagatactgcagtaaaacaaaaaggttcgccgatcaatctgatgaccgcgcacagacggatgggacacatcaacattgacgccatcagacggacagaaaaggcagacaacggactcactctccacctggagacaagaagctcagatgcgaggcatgcaacgtcggaaaggcaaagcggtcgtcgttcaagccgactggaacggtctacacaaaaccagacgaccaacccgcacac

SEQ ID NO: 1075 - DNA, 11517 bp, Xanthophyllomyces dendrorhous
cgacttccagagacagagatcgactaacgtgatggaagacagcgggatcccgttcgatcagccgtggacagcagtctcggctgtgagagaaatgactccagttgcaaccacccggcatcagccgacctatccttctgcgcatccttcgctctatcctcccaatcgatatactcctgttccccatccagtcaaggcgaaaagtcctgatgcaggtagccaggatgatggatctaatggatctgatgagtctgactcggattatcacaatcaagaagaggaggaggagtaagatgaagtagaggaggaggacgatgatgttgaagaacgggagggaaaagaggaagggcgagacaatgttgttgaggatcaagtcgttggagttgcagaagaaaatgcagctgacaacaatgtggaagaagaaagtgaggctgttcaagaggaagaggaagaagatcaaagtccgatcgaaacagaggtagtgtcagcagatgagtcagactcggaaagcaccgccatctatgaacctcgaacgactagaatagtgcctactgatgttatagttccaattcaaacagactcaatgatggaacctactttggttgttgctggatctgttgttgaacaagaaaaggcaacagaaaacgtaccagaagacattgcaatcagtagatcagtcacttggattccagaaaagagctatactccgattccgatcgaagtgcctggaaagtacaggaacagactcattggaacagccagcgcgccagtactttgaaggagctctcggacacctgttccggtgcggagatactcgagttctggtccaggacatggaagactggcaatgggatctgttgaatagaaaagacggaagaggtagaagaataacccaacgtcctccactcgttacctagacgacgaaagctacagtgtatgtacagatcgtcacgttcaacatcacaattcaacgcaggctgcaaaacctcaacatatactacaaaccctcgacatgaacggcttgaaacacaacaaagactgctttaaacccacattcaaagctgaagaatattactgaaataaaagggtgaaaatggacttttcgttctggcacttgttcccaatcaagtcctcactggtttcccagaccatatacacaccacccaggtgtttcagtaaaatggattgagaaaccaggaaaacagaaagggaacctgctagaaaatttatagcttttcggagagagaggcttgggactccgcgcaaatagaggcaggcagatgatgtctcaagaagaaacatcaaatgacagatgaaattatgtcaagactgctgaaactccaacagcgaagatgctcaaccacaagaacatagtaggttacaccacttgctgattgtcaacagcctggctagctcaatggtagggcgtcagacttctaatctgaaggctgcgggttcgagtcccgcgtcgggttcttactttttgctaatttgtatacataataacttcaattccttccatggtctatctttttcggtgctgctttgctctagagaacatttgacaacaagttttgaagttagagcaaagagtacacagagtatgacttggatttgttgctcaatagagaataatctatcgagagggtagcacatgtttattctagtcaagagggtataaagagagacgtgttatatacatactaccggatctagagcagtctaaagcaacaaccggggtttgacaagacattatccgaatgatgacgaagatgaatagacacaaataagagatatgtagcagttgggatttggtggttgttcttcgtggtgaaacagagagaaagactgtgtatgagtgatggacttaagtcaatgaaaccatgccacatgtgtatgatgttcagaaacaggatgccagacgtcagtcaaggagcctctagagaacatcatccaatattctgacaaacaactatctgatgcaaaaaacacacctgaacctaattctttcgaacagcggcatcttttttcttcttgcctaatcctccccaactttctcgaacgagaaggaacattgctgttgagcaaacgacgtcctttagctgatcggcactaaggaatccactatcatttataccttccactgggaagggattcattgggtatggcattcgaagttgggcgaggactagaggcaagggaaaaaatcagttagatgttgcgaaatagctcaactcattttcaaacaaaggagtactaaggtggagaaaccactaactcttgggatggtgcggcgcggggctgagcttacccaggagtattctatcagtacttaaccctgagtttccaataccagctccatttgagattgcatggaccgaggaaattcgtgtgatatagcataaccaaggggtctccgaatcctctggatcatcgtcttcgtcttcatcttctgcttcggcaggttcacttttgtcatcatctagagggcttgataagggtctacctcggtttgagctcggtgattcaggaacctgtagattcacctcgcccttgggcgagggagtgacattcgagcgcaagctgctggaatacgggcggagggcatttgatgcacctggtagattcacacgattgggagaggaggacggacgctcggtttgtgatgataccctacggggaggagtagctggcccagctgagctttgtgagggaagcgatgcagcaatattggaagctgatactcgtcgggtcgaagtgggtcgagagttgcaatcagcggagagtttatcagtagatgaagatcgtcctcggacccattcgaatcggacaagggataccggtttgagagaacggggatctggattattggcgggcgggcggatagaaaatgaagtatcgctgggtgaaggaataggagagtgagaaaaagaaggtagggtgtttgagatggcggcaaaagaccagacgtctcctggtgtggcccacttgctgactatccagctatgttaagccggtacataaacgagggttcgatcatttcagtttgaataacatctatactatggaattcaaagctaaagtacaaacgttattgaggtcttacatatatgcagatggtcttccgcttgtcttcatcccttcgagcggaggtttaactatcggactcgtaccaagtgtgggggcaccgagatatggcgcccttttattggaccctcctccaacgactgcttcattcactgcctctgtgacggcggctgatagcggagccgtgaacgatgacctggacgacctagctctttgttcgctgctcgttctaggctccttttctccaagagagaaggatgaaaaaaaattacccgagctactaactgctcgctcacctcctgctctaggcccattctttgaaggggtctttctgaaaagtttccctaggaaccgcttggtcgttcctccgttttcttgcattccaagtggaccccggttcagctcgtcaagcgcaccagccgagagtgtcgactcgagagatattcggggtgacccagtgtctgagggtgaggtcgatagcttccgggtggaggttagttgaggtgaagctggatagactgcaagcgacgtggacgagagcggctggtattgcagggtattggacgaaggaagtggaggccaatgctcgatgggctcaagagatccaaaagaggatatctccagattgcgcttgaaaaactagatgaacgatatttagaaatcaagaacgagatttgatgcacatcacccttgagaaaaactggaaatatttactcttgctactttggcatcagttccagcatccgactgttatgcacacaacaaagagtcagtatctagagaagcttgagaaaaaacaagcagatagacttactatgttgcatgcgatgaccgtctgaaggcgaaaaaaagttgagcatggtagcccatcatagttagcgaaaaaggtcaatacatcaaggaaagcgagcagacctacatggcagttgaggttgtagagcggaacaattctcttcaaacctgatgaacctccgatagtacctgatgtgctggtgctgatcacgctgttggtactcttgacactcggacttcggctaagggcatgatcttctggtgtctcgagctcctcgacatcgtttgaatttgggtcagtgggtggatactcaccagcaggcgttgtggcatcatgggaagacaatcggtgggattgaacggatggggcggtagattggcgggaagtgataggatatagggagtttatctgatgaagagcacaaacccattgagtttgttcagaaaaatgtcttgcaaacgagatagaaaactaggacaacgtaaataagaataggaacaagacgagaactaacacttgttcggcgggggttgggcgtaggtggtgacggagcgactagttggcactggaagtttagaggatgggctttgctcgtgggaggcggtcgtacaaaaatcaatgtctggagaacaaacataaacatgcggaccgaagccgaccagatgactcgtcagcgggtttcaggctgacaaatacaaaacatgtacggcgaagggaggaaatctacctcaaacgctgccggcttacgtgcttttttcttactgcccgagccaccatcctttcgagcgatagattgttggctcggaccggaaggcgagcagagatcagaagtagatacccggttgggagcctgaaaggactgatcatggttagagagctggctatgagaggtcgaaagtgaagttgaggtcgacgttctcgagggtggttgagagccagagcgacggggctgacgactatcaagaatctctccttcatcactggtcgagtgcgaggaaatacctggggacgtgtttggacttgtgctaacactggtacttgtattcgtgctcgccccgctggtgagaccatgattggcgatgttgttcccgggccgagggacgacgggtgcggttggtggccgaggcaccgttgttgtgccggtaacaaagctgaggaagccagacattgtaagcggacacgagctgtgtgtatgtgtgtgtatgtgtgcgtgatgttcgacgtggttactttcggataagctctgaatgtgtacaggtgtcgaacaaaaaagaagataaagtttaacgaggggaagaaacggaagatagatgatggatcgagttagggaacaggacaacggaaggaaaagatggtgggatgcgagacgaaacaaaacacctacccagagaattcgtcacacgcttgacaacgacacggcagactcaagaagggagcgagaaagttatattgtagaggtacacaggtatttagtggacagaagagacacaacgtagaagagacacagccaagaaaagagatacacagtgacaaacaaacactcgatggtacttacctcactgtaaaaagtgggctcacttccccgcaggcttgagggaaaggagaagaaagatcggctacggccttgctcgcttccgacccggccttccctcgtttttctctccgaggctctcgcccttcgacgcgtcaacgtgtttgactatatgcgctcttacgctgttttgagtagatgactactatgatattactagactactcaaaactgtcatggctcatccatataacaacagcgagagttgaattacagcccgtcctaataaaccattacaccgggatatagacacggaaaaacacacagatacatgtatcattcttggtcaataacaatgacatttttaggccttagcacactcggatcgtttcttacgtcattatctcatcggaccatctcggaagatgattgttacatttaccccgaggttacgagtgacattttgatcgtcaactggccttgttccgcacctcccttcagtcatcaccctctgctgatggaaagttggaagaagaacatctaatacattccatgaccactcacaagaacttatctacactcgtccatatccccgacagctcaaccataggaaaacaccagacattacttaagagagtcgctaaacatagggcacgcagggcagatctgctgataccgtcttctcgttcacttcccaagcccatctcccctccggcctctacgccctcatcgaaagatcaagtggacgagatttcattagtctctctgcacgttcctcaggcaaaaagagcaaaatatgaggcatactatccaacatattcttgggaagaagagactattcggaatgatcttccagccaggtatgcccttagcggcgagtggggaggcaactttatctatggagccgacgaagccgagagatgtgacgagtaagtgcacgaggcctggatgttttattttattctatctttcatatgtatgttgtgctcaatcaacgccttttccttgcttttcttagatatccgcggcaaaaaaagttgcttcatttaaaaaaagagcaacttgatcatgtatcacatccaccctactggctctctcttcctctacccaagctttcgtcttctcctcgtctgcctcaaacttcctctctcaatcaagtcctactctcttctctcgctccttccaaatttgactcgatcctgattgatccgcctccgtctcttttgtgggaggaaattgtctctcttcccatccgccagttatcggccgatccttcctttgtctttctctgggttggctccggaaatcaggatggactcgagaaaggcagagaggctctcgccacttgggggttcagaagatgcgaagagattgtctgggtaaagtcaaataggtgtcaggcacccggttccggggtgagattttctctaataatatatggctcctaatttatctacttgttccttcctgatggctaaatcgtattcatcacctgaaccacaatttcaagcacgatccgcctacgtcgtccattttcgtcaacacaaaagagcatattctaatgggcatcaaaggtactgttcgtagagcaacggacggttggtatgttcacaccaacgtatgttcattgtcagttgtttatcccaatcttcttggtcttctttgtcttgttgaatcaactacgtcccttctttgtttcaggtggacacagacgtcattgtttgggagcctctgcaggtcaattcatctacgaaaccacctgagatacataccctggtagaaaacttctgtatgggcaccaggaggttggatctgtttggtaccgaatcccaagcaaggccaggctgggttgtcgccggctttgacacccctgggattgaaaaaactatctcggcctttgatagagaaacgtgggagacagccgccaaaattgatggcaagtttgttgtacccaccacagctggtgcgtctctctgcgctgcatttctgagaggatattgtgtagattcacaagaaccagtgtctcatcttgtttctttgatatttttctacaaatagaggttgaaaatctacgtccaaaatcgccaacccggacaaacaacagagataaaggcgctccgtctgggacgaattcgcagcaaccctggtactctcaatcaagaacggggataccaaacgccggatgtatccgaccgatagataatacaggtatcatctatcagccaggtggaacggcatcaattggattctttccggaccaaccaatgccatctaacataagtgggctccccaatatggctatgagtccaggtgaccatatgaggatggacatgaatatgggtatgccaggcatgggattggacacggcgatcggatcatcgggcatgaacatcagaatgaactcaggaagtcagcaagggttctctcaccctctctaccttcaacaacaacaacagcagttggcctttccttcagcaccttttcaccagtcgctcggcttcaatccactatacgccacttctctaggccagggtggaggtatatatggtagcgtagtgccaggtttagcattcagccagaatagagacttaagctctgaccagactcagcaaacgcaactgatgatgatgctcatgttgcagcaacaacaacaacaacaacaacgatgatagatgagtgcgttgctctatttcgtctatctttcgattgaacagataagctgattttcttctttcttgcctaattgtttgttatcgtggcactgttgggaaaactataacgacatttttggatttgttcgaagagatgcgctatcccagctgatcagacgatgacctcgaagacggataacttatatctcaatttattcgtatgaactcatcatcgtgagcgtataagcgacgaatagtttgttcatctcaaaattctaaaccgaaaccgacacactctcatcgatgttctacattgtcgtggcaatcaaagaatcatttaatatgatagtgaaagataagaaatctataagaatatatggaggacgcaagacgtgttgagacataaataaccgccacagcgagtgtcgctcgagaaatcgtgtggtcgatgatgatgtagatggctgtgtacctgcaaaacagataccttgaaatcaccaagctgacctatctctgcagtttttccggtcccttccttctttatactaaatatcactgaacaagcttcatttgacaaagaaagaatgactgagtactgcgctggctgtcagaccgctgtgtattttgcagagaagatcacaggtccaggtcgaagggtgagtattcaaagaaccatgttatctatcgctcgcccctaaaatcactatcttaccacatccgatccgcatccacatgctcatacctgaatttgatcattctctttgaggagtctagtcttatcataagccttgtttgaaatgtatgagctgcaagaaacgactggactcgcatctgctggttgaacacgacgaagaggtgaggttctacacttttcatttccctaaattgtctttctcttccttttgcactcttgtattgacctgatgtcaattgagggacttgaagccctactgcaaaggatgccacgttaaactgttcgggtgcgtgattagtatttggattgctggggctaactctgatcttgaatactccatcctgctgattcagttacatttttctatattggccgtcaactagaactcgagatcttcgacaagcaaaccatccttatactactgccccttctcccttgtcctcgcccattaagcctgcttctatgaaaaccccttctatctcatccgccccacctcctttttctcactcgtacttgccttccacacaacctcagcctagacctcctcttcccagcacgccaaaacctacgtcctatacttcctatctttcttctcgaacctcacctgttattcaacaaacgacagaaactaaactggagactggggcatctcttcatatggattcataccgaagagagtttcagccagctaaggagcggagtacagctagcttggcagtcagcagtcagacaaatagtccggggatggcaagaagagaatggagagtagaaagtgcaacggacaaatgcgcaggttgtagtaaggctgtggtaagtaatctcattactctcgagtgaacaatcggccaagtacttatacagtcaaatcctaactcatcttcggggattctggcattccttttcttctcgttttcttagtactttgctgaacaggtgaatgaattggtcaaattttggagagacatggtgacgacctatctgaccatcctgctcatctgccctatctataactaggttgtagcgctgggttcgaagtttgtctgtccatattgattttttgcgatggctaaggaatggttaaagttgacattttaccgcgtctttctcgttcctttcaggtggcacaaaggctgcttgcgttgcgtacgtcgattctcttccggttagaactaggttcagaattatggtcaactcactctcgctccctatcacagttcaaatgctccactacgcttcctccgtcaaaggtcgctgatcatgagggacaggttgtttgcgcaaaatgccatgcctcagtcagtgcccgtgatttattagcatttgctctttctatgttcattaagcgtcttacttatcttcacgcttgtctggttgtcggtgattactttagaactttggaggaggatatgctatcaagtgagggattgggttacgccgtttcgaaggtccattctggcgcccatgtgttgatctgtggatatccatctacacatgtctgcttgtttgtgttgaaaatctgtctacatgttgtccatgcaacccaacgacaaatgaggttgtgtttatacatatggataatgtcgaacgtactctgcgagtatcttgtgcagaatagtactcttccaaattattgaagaatcactttaaggtcttgtgttcaagtcttcaaatcgatcaatttcacgagctcagaaacccgtattttcttcaaaaacaaactcttcagcctaatgatcttggcgaatgaaccaacatatggagatggtaagtcgcagaacatgcaatgaagagaaaaaaagtaagaacccgacgcgggactcgaacccgcagccttcagattagaagtctgacgccctaccattgagctagccaggctgttgatactgaaacttggccttgttttttattacgttgattgtgcttagcaatttttgggatttcagcagtcttgacataatttcatctgtcatttgatgtttcttcttgagacatcatctgcctgcctctatttgcgcggagtcccaagcctctctctccgaagagctataaattttctagcaggttccctttctgttttcctggtttctcaatccattttactgaaacacctgggtggtgtgtattgaatatagcagtctataataaaatggggagctctttgggatatattatcggtgaagtcacttgaacgagagtccggttcttctctcagactatattttctggtctctggccctctcaaactgatatctatcctgatcctctcgattgtttctttgagacgatcgattctccttaaataaacctaactctaattctaattctaattctctcaatcaacttgctcactttgtgtgtgtatcagtttgagggaatcagtttgagagaactagtaatcgggtctatctattgagaaaacctttctagctcaacgagagaaacaccattgaggcattcggaaactggaagtacattgttgtctgtatgactccaccattagaatatcacaaagtgctccctaattttatcatttcttgttacttagtttcatttatttctagtttcatacaacatcatatattcaatcaacttgctcactgtgtgtgtgtacaattgtttgagggaatcagggaatcagaattagagaattagaactaggatcagtcttatccaaggagaatcagttgtctcaaacaaacaatcaagaagatcaggatagattccaatctcagagaactagagatcagaaacttagtctgagaga

SEQ ID NO: 1076 - DNA, 362 bp, Xanthophyllomyces dendrorhous
tagtctgagagaagaatcggttggcattcaagtgtttttcaacaagtcggtttccccaccaagtgctccctattttattatacacgacgtcgttcgaccggttgcgcgcccttcgctcggtccacctgctcgaaggacccggcggcgagctcaagctgttccagaagctgatggccactcggatcgatgtcacgaaggatatccagccccagcttgacgtgtttgtcaagatcgtcagcgacatcagaaggatcggaggtgagctcaagcagtttgaccagatcggcggcttcatgcttctccaggcactacctagcacacaaaacgcacagaacatcgtcagcaacatcctcggccaggtc

SEQ ID NO: 1077 - DNA, 788 bp, Xanthophyllomyces dendrorhous
ctgaggcagagtacgagaaagccgtgatgatcgtcggagaagaagtggacggagatgagtgcgtggaagagcatgtgtgtcctcggcattttcaccgtcgtcggtctcgtcttcagagatcacgaactgatggtcatcagccgtgcttttgtcaacgccgctcacatcagctgagtggccttcggtagactcatcatccacgcgaccgagtggctcggaagggatgtcctgaggtagcgcagaaggaggatcggttaggtctggagtccatagcggaagtgatctaccagcagcaggaagtgtcttggactgactgtagttgtcctggccgtactgatgtgcagttcgcatggtccagtcctctgcgaagatgacgttccgggagtatatgaccttctggacgttccgcttatggacgagacggtaggcctgcttgccaaagctatcctcggacgggctgatgaaccagcacggggtcgactttgactggtgcttcttgtgttttggattgtgtgcaaaagcagtgcagccaaagacatggatccgatcgtatgttgcaggtcggccatgccagtgttcatagcgggtcttgccagtcgatggtcgcacggtccgagcgagaacatagagtgcatatgtcaacgcttcggcccagaacgagccaggaaggccgtactccatgagaagggcggtgatcttctcctcgatcgtccggttcgtccgttcggccttaccattctgctggggagtgtcagggatggacggctgctgagtgatgccgagagagg

SEQ ID NO: 1078 - DNA, 370 bp, Xanthophyllomyces dendrorhous; identical to SEQ ID NO: 653

SEQ ID NO: 1079 - DNA, 621 bp, Xanthophyllomyces dendrorhous
agtatgtcttgccggaggagtgttggtccttggcgaagcactcggatgtgttgtgcccggatgaccgatgaaagtcacagtatctgttcgaccgagtcttgccttcggttgccttggggttgtatgatcgaggttgtttcgggcagtcagccgcgtagtgagacgactggccgcagtacagacaatggaccatcggtggagtcactgccatggccgagtgaggctgctggttctggcagctcgccatcgctgttgactgtatgtccttgttgtccaggattcgatcggccacaaagtcaagagtgagcggcctggggttccgtgagcgtctgtgccgacctgggcctgtatattggataccagagtctcgccgtggatggtcttcggtaataaaattagggagcactttgtgatattctaatggtggagtcatacagacaacaatgtacttccagtttccgaatgcctcaatggtgtttctctcgttgaactagaaaggttttctcaatagatagacccgattactagttctctcaaactgattccctcaaactgatacacacacaaagtgagcaagttgattgagagaaccagaaagaagaaggaaaaagaaaataaact

SEQ ID NO: 1080 - DNA, 713 bp, Xanthophyllomyces dendrorhous
atgttgaaggagaaagcaaagagatagaaaagtgaaccaactcgcatcactttacggttgatgtctagactgctatatccaatactcccactcagtcgacgatatcaaacggaaaaaggaacgaaaggaaacgaaaaagaatgaaaagaaacgagaaagaaacgaaagagatcggaggaacgacgcaagagatgtcgaggaataagttcgagaccaatcgcggaaaataaacgagtgaataaaatcaaaaaatcaagcaagaaagagatgaggaaataaaccaggacgaaaacaagaacaggaagatgagaatttagtagtaaaaagaacagaaagaacagaaagaaccggatggaatcggaaagagaacaccaaaagatccttgtctggtcgacaaagagcaaagattgaggatgcaaagtggtgagcttttctggactgggctggaaaacaaacaaaaattgacttggagaatatcttcccttttcaccctgtttcctttcttccctcagatcaacacaagtcccccaccgacatcttatctcccaccgtctcccactatctcccactatctcccactgtctcccgccacctttccagctgcctgcctcatcatcttcttctcccgtctcctttcagccctcagcctcaggatctcctctcggtctctctcggtgtcggtctcggtctctcccatctgatgaggtatgtct

SEQ ID NO: 1081 - DNA, 467 bp, Xanthophyllomyces dendrorhous
ttgttggctaacgcgatcgctccctgattgtcttcgtagatccgagtcggctccatcgtcgtcacgtcgagtgttcctgtcggatcggccatgaaagcaagcacttcccgcaaccagccgacttccttcgctgccatagtaagtgccacgtattccgcttcgcatgtcgatagcactaccatcgcttgcttctttgacgcccagctgaccgctcctccgtttaccatcgccacataggacgagtgacaccttctatcatccacaactgaagcatagtctgcatcggaatacacagcaagtgagtgtacggctgttccataggtcagcgaaagagctttggtggacttagcataggtcagtactctctgcagagctttccagtgtcttggtcctgggttggacgagaacgatgccagtctggacacggagtatgcgaggtccggcctggtgaccatggtgagccaaag

SEQ ID NO: 1082 - DNA, 459 bp, Xanthophyllomyces dendrorhous
agtgagccgagaaggctgacatacggcttgtccttcatttcttcctcctcctcagcgttcttcggtgacatctcctttgagagatcgacagacaccatgccgggtgtccacacagggtatgtctccctgtcttcgaacttcttgaccatctcttcgatgtatggtagctgatcgatgctgaccgtgcgtttggttctgtccctggtgactctgagtcccaaacagaaggccatctcgcccatgtccttcatggtgaagtgagactcgagttccttctttacatttcccaacaatcggccacccttttcggcaaacaaaccgagatcaacaacatatactgctagatgaagttgttctccatcttttcgaagcacatagtgtccgtgttgaaattacacagccgcgttcaacgacaccgcatccaggtcacgtctcatgtggcgggcctggccacactgc

SEQ ID NO: 1083 - DNA, 3103 bp, Xanthophyllomyces dendrorhous
gtgaccatactttgccgaccacatttctttctttcctgttcatcgtcaagtccatgtgttttgcacagcttgccgatggtccgtttctcaccgaatgtcgccgttcacatgatcgctttcggccggaataactccgcccatccttcccggagtgcactcagacctgcaccatcatgaccgcacagctgtgctctatcgtcccatatcgttatctcatatcctgtactttttcggctttccttcgcattgactcggctccaccagccagcttgctgtatatgacttcttccttcttcctatctccttcttgcacctcagtcgtcaccagaactacagtctggtatactgagtcattcgttctgtatttactctcgacagaactcttaatcatattagattaagagtctgagtactctacgagctaacatgccagatcccattctttccacagtgggagtggaatcgacaccttctgaggtctcactttatcgagaactcagaagcaacacactcagtaatattatccccctaccagccccacatacttcacaagtcaactacaagatgtgggaacgccgcctggaatcggctctgttcgagatgcgtttgtgggatctcgtttctggagtacgatccagaccaaacgtggcgtatcccaaggcacaagctgcctgggatcttgacgaccaaatcgcacgcaacttcatcatatctgttctcacagactcggagggagagcgcataagtgagtgtctaacagctcacaaacagatcgaagtccttcgatctgttcatatgcaacaaggcaccgtcggtgtttttcaggttctcagctccgtctggaatatacgctccgagacggctccgagtcttcaaagccatgtcgaccatatcggtcgacaacttcatttgactgaacagatcgccggcaaaaccatgacatacaatgaactctatgctctcattcttatccgatctttacccactaccgctcacggacaatccttcgtggccagcttacctgctttggcaggcaatgatgctttgggtcatcccaacccattaacatatgaattcgtttctggagccatcctccgcgacaagcaacttcggaacacaaccagggcacttcacaatagccgtgagtcaacctctgcacttgctgtcactccttccagtccacaatgttcgtactgtggggactttggccactttgccaaagcctgcccagacaatcccatctcacagactggaaggaagagtgacagtaagtacaaagccaagaaattctgcgacttccacaagtcttccggtcacaatacttcagaatgttacgcaagagatcgacttggttcaggcaaagggacacctcgtccccaagcaaactccttgtcggctcgagatcctgacgagaatgaccaaacgtacgctcattctatcattccacagaatttgtatccctcgttcaccttccttcttgactctggttgcacacagacttgtgtcagcgacagatccctcttcagcacttacgagacctactccgacgagctcttcgtcgcgaacggtgcttctctgagtgtcgtcgggaaaggaacggtgaaggtggttagcaagtcctctgtggatggtcaggatatcgatgttttattgagtaatgtttggcatgttccaaaactatcatctaccattctcgtttcgcttggtcagatatgcgacgttgatggtatcaccttcagtggaaacaagaaatagatcttgatcagtaatcgttctggtgtcattctcactgcctctgcgtacagcaagaatctttgggctttggatgtcacagtccgaaccccgaatcttgctgcctcgctggtttcagaacgaactgagaaagaaatcgacttgttacaccggaggatgggacatgcttctcttacttctatgaaatctctcatgacatgttctggtttctacaagacaaaggtgacaccggaagatctgaaacactactttgatagaggcatatgtgcaccctgtgtcgaatccaggcagcacaaaacaccctatccgacatcaaacacagtccatctctcaaccactccaactcattcacaccgatattgatggtcccatgcctcatgtgtccttcggtggagcacgctacatgctcaccatcatcgacgagttcactgcttaccattgggcctggtcggtccatcaagctcaaaagcgatacggcatccatcatcaaagattggatcgcaaaagtggaaagagagaccgtttacaaggtcaagacaattcgtagtgacaatggaggtgaatatctttcaaacgactttgtctcgtggctcgaaaccaaaggtatcaaacaagaaacatcgatagcaggaactccccaacagaacggaaaagcagagagagcaaacagaacgatcgaagaaaagatcactgctcttcttgtcgagtccggtttgccaggttctttctgggcagaagctcttgtctatgctatctacatacttgcccgcaccgttcgcaaggcgagcgggcggacaagatatgaagagtggtttggaaaaccacctacctttgaccgacttcgtgtttttggctgtactgcatatgcgcacaacccgaaacatagaaaacacgagtcaaagtcagtttcttgtttgttccttgccccatcagaagacacatttggaaagaaggcttaccgcttagttgacaagcagacccttcgaaaaatcatctactcccgagacgtcgtcttcgacgaagcttggacaaaacgatcagaagcggaagctcatcacagttcccagtcagacaaagatgtcgattgcaagtccaatcgaacgtcgtccaatccatatgagaaacacagtgcctgactcatatctgactcaggatacactcgatgatgagcaatcgcctatgacggatgagatccaagcagacacggaagtagaaactattgaacaagacgcagaacatcagtttgtgcagtctgaagatgaagaagaaattccagaacaagaatgtcaagaaatgcgagacttacgccgatcacctgtacatgaacgagtttctccgccgccgatcgttc

SEQ ID NO: 1084 - DNA, 7681 bp, Xanthophyllomyces dendrorhous
gaccatcggcaagctgtgcagatttgtggatgtagcagtctaatcatcaaccaccgagttttgcgagttggttcacttttctatcttgtcggtttctccttcagcatgttatttcacttccctctcgtcctatttcttgtccgttcagttttatttccattctactttatttctatctcatttctgtattggtgatgttgtatatacaggacttgatttgtttttttatattcatttattccttctggtttgtctctatcaagatactcactttatgtgtgtacatttggtcgaaaaatcagttgttcaaaaatatcaggattgatcaattgtatcgtcaacttcagaaaccaaggaatgatgtttgtgtcgtgcatacaccgtcttccccaaattcgatatcatcatgtggtttgtgattccagcattatccctcgagcgtctctattgtcgtataccttttcattatttgcttcactgaatgatcgtgctctgcttttttttgaccagttcatctctgacggacactttttctttaatttttctttttctattctaactttgtacttccgttatcctggcctttgagtcctttttttaaacctggaatatagtcattacatacatatcgtgaatgtggggaaaatcttctaaagatgcaaaccgacttcaaataaggttctgtctgaagcaggtttttcaatcttccactcaaaatgaattgcggcgtgtgtcaagatcaaaacttcaaaagaaatgtcatcaatcaagtgatctgtcaggactgcgaattcatcatatcgtgaagagagtcataagaacaaaatttccgaatgcttttctcgatgtggagttttcaagaaggtatcatcgaattgtcaagatcttcaactctttttacaatgtttgtgtttatgagatataatttctttctcagaccttgagcttttctttatgaaccggcttgatccgcatccgtcaccatttcgtagtccaagagtcatgttttcatcaactcgatagaaagtatttcgttttgaagctttgttcattgtattgagttcaggattaacacgcacaacgatatcatttttacaagttctattatcaacactaatcccatgtggtatgtgttttttaaacgagatatgtgtcatgattctctgattctagttgcttaattatgaagtcggacgtcagtgggcagtgatttatccgttttcatgttttcttcccattgcatattcatcaatcttttaatttctatgaaatttgccatccgaacatcagtcggctctgttcatgtggactcggcagaaaactttcagctcaatgaactgttaaaaactgaacgatgtcgtctatcaatctgatttattggcattttgttgtaaatgtgtgaatacagattgaattccaaaactaatattctctataagttcactccttgatctacatgcctcattgctgttcaaatcttgcctccagataaaaatgataagctcatatttgaaatttattcatctcgtttatatgtcaatatctattttgtgacaccaactgggaattcgtcaaatgtatatttcaattttgatcataggtgaaacttgaggtcgatcaacagcttgatgtcataaaaccatgcaattatcatgctcttattatacaggctgaatcagatgtgctgaatttgacgtagctagttggacttctatcactccaactcattccgtatacgggaaatcagctacattccattgatgtcagacattgtgtgatttgtggacccagtactcattcagagcagatgtccagcagcactcatgctctataagtggtgcaaaattttcgattcaatttaagggcttacaacaggagagactgacgactcggttcccaatctttgtttgtcaatctgacaaactgcatctcaattgagctaatgtgtaaccaaatgaacttgacaaactcttcgtggactgtgtagctttttaagctaaattgaccacaactaatcaccgaagtgtaacaattgacgaggctaagagcttcaatcaaatgactgggctgagtactgcattttgtttatcacaaaaaaaaaataatcagcacgaggtgcataaacttctatccttgttttcaattgtttcacctatcaaaaaacaggattgttcgcaacagtcctttttaatcgtctctgaagtattctgctgttatgtacaaattgatggagtaaatgtgattctaatatatccaaaattgatttgagagtcaacgactgcccagagtgtgattgacgtagaataaaggcttagcattgtctttcgttcatacttaaaccaagacttcgatatcattgacacacttttgatacaaaacatgtctagaacgactccatgtcgatcgagatatgtttggaaaatttcacaaaactgtgtatactcatgtcatcacatactccgtatatatcacttcccatacagtatcttcaatgagtaaaaatacacatctaagattacaaacacccgtagatcgacttgaaaaaaaatgtatgagcttatttgttcttacagcagtaaacccattgatatcaaaggcattataacacaatcatatcagacaatatgaagatgtggaagaacgggaaaagggacaatagtagcattttatttcttcgtccaaaaccttcatgtgaggatacttggttggtcgggaagttcagcgactaactcccaacgcagaatatccatcagttgtaaaagctgatacttctgagatcaaggataaaatatgcatgcatttgagatgtaagtacattatcaattagctatgataaactgtgtaattacaaccgtgtaaaaagaaccctcaatcgaaaaaaaaattgcagaaaaaagcgatatatactgggtcaaaattagacaaggtgactacgaaattcagtcaaagttgatgttacgccaaaataaacatttttcctcacgactgagatatctatatgagcaaacctgagttcatgtttgtcgttatgttgaaagcttcctttttctcgaacgttatacatcaaggtcagccttatcagaccttcaaaagttcaaaacgcggagtataaaaagacaattttaccttttggtgtattcttcactttaagataaaattcacatgtccaaacacatataaatctcgatttttgctgatcttcggtgtttagatcatgtatgagaagtcgttgtgttagatggtttgggtcaacgatttcacaacaaaagtaaaagagaatcgtatgcagagtgctaagtatgtatcgggtctgaagaattaatcttttagtcaataaaagatgtagtataaacagacctcaaacattctgagtactatatatttcgaccattatggacaattttttctcctggccagatggtgagacaataagaatgtaccatgagcttcgggatgattcaatgataggagacagcagaacatgctacttgtgttcatcaaggtcttatacgcaaatgaagattgataacacaaggagaattgtttttgttcgaaacaatcgaacataatactcatttgatggcagctgctgtagatattttgtttagcatacttttgatcatgaacttgaagctgcaaataaaactccaaaccttagaatatccgtatatgaaacactgatacccaagacgttgtgtctactcacagattatgattcaaatacggaacagatcaaattttttacaagaatgctacaaaaacaaagcatctggaagcaaaatcgggggttagcccttgctcaaaagaaaataacgtcacgcatgatcaatcaaaaattgggatcaaactcaggttttataacgctgatgaaccacacagtttgcttaaacaaaatggacattttagatatatagtagatttttacatcatgatgaatcagaatattaccaatctaaaaacacaaactgtgcatgaggaaactcttggaacatgacatatcaggtctgccgtctgataatgaccgttgcaagtcggtaggtgatttcttcttttcgttttctttttcaaaccattttcaaagtttcacttcaaccttccttccaattcattctgatctaatcttgcccggttatgggaatgtacccaccgctacggtactttatatatcgaagccttgcaattatttaatatatttctttgttgtcgaatcaacttgttttgctctccactttgttgagtctatttgctttgcctctacagtaatggttgatctaaatgattacattcctttgtcttgagactatcaattgattgcagaaaatgaaccgaactgtcaacaagacaattgaattaagcgaaccagaaaagaaagacgtactacacgagtaaaatgagcatatcgcccaaacattcaaaaccatgaactgtaaaatgaggtcattcttgattagatcaaagatactatgtatcattgaaagttctgttcttcagagaattcggcaagaccaacacagtgaagtatggttttccagggcaggcgatatttttgtttgaatcatcagcattgttgaattccactgaacaggaactttagacaacgagctttcaaggtagataagggactttgtatttgttcacttcactgactttacaatatcgtttaacttttggcttgagtgtgaatagtgatgagttttgtgtttgcagtataatgattcggctcatgaaatgtgatttgagcatagaacttgatcttcattgtttacaattttgatacctacaacttagagagatatgctcagatcaatatcgcagatcaaaaacatcattctttcaagcattatcagaatgtgcatattcatttcgttgaaaatgttaatgaaacaatctgccggcaaagacgaagaaaggttaaacatggtgtaaattactcatattgtcatgggacgtgtgaccatgaatcgatagaatttggagtcagcagcagtatttacttgaatcaacctattctacttcaagtttgtgatatagcgtacatatgttcattcagaaactcagcgatcattctcatatcaaaacaggctctgtattatcatacattctcctttgtttatttaaactcaaaagcaagttgagcaaagccacgcatttgacatatccttttaaatcagtcgaaatccgatacatttgcataaactcatcgcttgatttgagatcgcttcatacctcgtcagacctgagcttcaattacatgttagaatgcagtaaggacatagaaatcatttgcagatatgatgttcagctttgattcattaggaggaacgccgtgttccgcatcgttttgattatattgatttcgctcaagtcaccatcgtcaaccatgttttttatgcatgaagaaaacaacacatggaaatctgctcagaggaactcttccttctcatgtgctatcctttcgaagtagacccaaactcagtagcttaacaagtgacctgtctgccatgtaagtaaaaatttcactaaccatttcatttgcagtatattgttagatgtgcctgatctcgggcactgaacttgatagaagagaggtatgatcgaaggcaagtgttatatatatatataattgattggacaagccctctttgatgtacaattgagtgtggagtatatagtttttctcattcaaaccaaatcctcttcgactgccttattgagcagatcacactaaatgatatcgttcgcgtttcacaacatgatgataactcacgattctcaacattacaactttgttagactttcgacaagagcactatggagtttcgacttttagaagtttttgaacagttatcgaatggtggtacgagtttatgaatcaaattcgaggagtaactagattcaaaaatacataaaagtccacagaccaaggacaattatgatgaattttcaataagcagtttgaccatactgtggaaaggaacataatgaacttgactgaaggagttatataaaggtttaagacaaaagataatcatcaaaaagtacaaagaaaaacagcagtacagtaattgtttctccttgctcaccaggcagagatgaaacaaagaaaagggggggaagaagcacaatgaaggtgcatataagatcttgaagctcggacagtagaagaactatttgtgaacatagcatgcagacgcatgaaacgttgacaattctcgaaaatgatacattggcttctgctgatcatatatgtatttaagacgtagctaatgaactctacaagtaggtttcctccctttcttttattctttacattctatcctttccttaacatcatcggccaaatctatttttaacctactgatgtcgagaagacttgaatatggtgcattggtttctgcttaatgcctatgtacctcagccttagctagcgcactctgccagctggcatgcttcttttcttctccatccttttcttcttttgacttttctttctctttttctttctcatattcctccttccttagcatttaccctgattgtttcgccgatgctgaggctggtttatacctgtcttcatgttgttgatgtctcccataaaatatgcttacaaatcgactgtcattggatcatttcatcttcatttctgaggttcgtttataaatgaaagcattgaccataactgtttcgttagtgctgagattatttcatcgtaatttctcagcaatactaaactgtatttgcaaataagtccgtcgaccgccgtttctgtctgtctgattgcgccaatgttgatgtgtctcatctgtcggtatgcaatcatcaattccagaggagatccttcatttgtttgtcttttgtttatttgtgttgtacctgtgtttgttgtttgtgtccccactacttccgtcatttcattcattactttggtttgttttgagggttttgttggtttcattttttttgtttgtgtgggtttcggtacttctttgatctccggtgatccttttcgctcgagcgcaaccgcatacatctggtgtttcttcggcacggtgagtatgtacctattgtttcgtctgatggtgcatacgctgttgccaaagtcggtgtgagggcgaaagggctcggcaaccgtttgttgagacttggttggttttaacattttcagatgaggatgtatgtggaaagctcaggctctcgaggatttaggaagatgccaaagtcataggcataggtgtaatgatagacaggacgaagacacttcgaacgaagatgacagagtccaaacctgacaggagtgaagagagaaaagagggaaaaaactatggggaaagggaaagcgacgaagtacttgtatctccccgtcgctcggcatgtatgcaagcccgaagggatgcaagacggaaaggatgcatacaggtatcgaagtgtgaaaactacagagggtagcaaatacgtattgttgagatggtatgcagatacatacaagcatatactactcggtctgatccctgacagtatccccctttctaggcggagagaacggagagcaaagagatcacgacgacgaacgacgcatctgattctgcaatccgaaagcgtgttgttggacggcagcgcgtttagcagcattgatggcagacgtgggatacttagcatagaattccaagacggtagggtcatc

SEQ ID NO: 1085 - DNA, 507 bp, Xanthophyllomyces dendrorhous
tccaagacggtagggtcatcatccatcagttcatcgtgagagatccactgatcttcgctcgcatcgtatccttcccatcggataagaaactgtagccgtcttcggaagaggcgagatttcagtattttctcgacatgccatagcttatcaccatcatcagcgacgatcgggtctggaggtggggctatctgtcttgctggcagtgtattgggatagtaccgttcgagaagggatacatggaacgtcggatggatatgcatggtcgatgggagagccagtcgaaatgcagaattgccgacggctcgaatgatcttgaaaggaccaagtagcttgaaatcgagtttgtcactcggacggtcagtttttacattcacccgcttgagaagcactagctcgcctggcttgaatggaggtgctggtgttctatgttcgttcgcatacttttcctggagatcttgtgcgatcgacatgcccgaacgacagaacgctagcgtcttttgcacatgc

SEQ ID NO: 1086 - DNA, 641 bp, Xanthophyllomyces dendrorhous
aacctggatatgttcggccagtaaaagttgcgggacaacagttcgagcgtcttgtaccgaccgtagtgacccgctgaggggtggtcatgacactgtttaagaatgtcagtctataagtcttggtcatctggaacatagaccaagccttgatataaaattagtccgtcaggctcaagagtgagtttcttgagttgttttgtcaactggacgggagcttgacgagaggggttcttgagaaaagggaggagttcggtcagatagttgtcagtctgataacctgctttcacgcgagtcgcaatatccgacgttgcgctatccgtaatattttccaaggcattttctgggttattgtctgctgagtcttccatggccccgtccgtctcgaaaggtgatacctcgactggtcgtagcagcaactggggagcctcgtcagatgctcgagcgttacccccctctgtatagtcgtgccgtcgagtgaaagcacttactttggtgtttttcttcccaggacgaaagttaaagacatacttgtacgagttcagcaccatcgaccatcgtacttgtcgtctgttgagcattttggtcgagtggaagtactgcaggtttttgtggtcagaatagatctggataggatgctgtga

SEQ ID NO: 1087 - DNA, 475 bp, Xanthophyllomyces dendrorhous
gccagaccttgaagctatcgacgatcgccaacagctccttgtcatagatctcatagttacactcagctgggttcatcttcctcgagtggaacgcaatcggcctagaccttccatcagtgtctggctgcgaaagaacacctgcgatagcaaagcttgaagcatcagtttcgagtgagatcggcttctctgggtcaaagtgtgctagcacagaggccgaggcaaacgagttcttgagtgtctcgaacgcctttcttgcactttggtcgaatgaaaaccgcacatccttcttccgcagtcgagtcagtgcgacacaagtacgagagtagcaaggaatgaaccgcctgtaaaagttggcgaagcccaggaaggcttgtagttgtttgatcgacgtcggctccggccagtcaagcacggtttgtactttacccttgtccatcgtgacgccgtggtcagacaccacaaagccgagaaactc

SEQ ID NO: 1088 - DNA, 522 bp, Xanthophyllomyces dendrorhous
cagtgatctgtatcaaactcgcacttttcgagcttggcgtacagtttatgatcccgcaggcgagacagcacttctttgacatgttcttcatgctgagaagggtcagcagaaaagatcaggatatcgtccagatatatgatgacaaagtcgtctagtagatcccggaagatgtcgttcataaactcctgaaacgttgcaggcgcattggtaagaccaaagggcatgacgagcgactcaaagtgtccatagcgagtgcgaaacgccgtcttccactcgtctccctccttgattcttaccagattgtatgcgcctcgcaagtcgagtttggtgaagatacgagcttgacggagacgatcgattgattcaccgatcaacggcaaagccgcatggttcttgatggtgatactattcagctttctataatccacacagagacgcagactgccatctttctttttcacaaacaagatcggtgatccggcaggcgacttcgaggaccggataaagccttttgcaaggttc

SEQ ID NO: 1089 - DNA, 53434 bp, Xanthophyllomyces dendrorhous
cgatctcactgtgtatctaggattaatgcaatgactcattcattggactgtctcgagacagtttggtgtttatgtgatgatatttgtatagaggaggttttcttgaaggattggagataagtgaaactcgaagaaagacgatggtaataattcgatgacgcaacctcgatgaaaggaaggagaagatcgatacaacatcagaatccgtaaagaaacctctgaagagactttttgaagcagaagtataggtcgatcccgaactcgcacagatcacactcaatgacatttgatttgagttcacagacctatcatcaacatgtcttctcatccacttcagcccttcgttctgacgctgtcgctagattcacgaacagccagttctctcaccgcccttcgaacaaagtactttccagcccatcggaaccacctttcctcgcacctgacatactttcatgcccttccagcagctcggaagtcagatattgtagccgatctgttgcatcttgcctcggtcaccaaacccttcgagatcataatcggacctccatttatgatgggagctggagtaggaattaacatcaaatcaacccaagataaacgtatcgaggcggttcatgacaagctccttcggagatggaccacaacagaaatcgcgctgacagggcaagataagagaaagctaggcagtcctcatgccacagtgatgaacaaatgttcaaaagaagaagccgatgcttgttatgaacaggtcactaaaacttggaaggatcggaaaggacaagccgttggattgcaactctgggagtatcagaaagatggaagttggaaatttcttcacgacttcaactttcgtaagccttgtctaagttacgttgtgccgatcattctctgaagtgatgtaccctgatttatatgtgatatcaacttggcgttcctctctgcagaagttgactcgagcaatgagaccaaagaagatccctcagcggacatgaacaagctcgacatatcgactccttctccgaaagaacattgtaaatcggagaaacagaatgattcctcgtcttctaaccgccataggaagatcaacgagcccaggtttaataacgagccatctcggaagaagaaccatacttataatgaccggcatcaaccactagatgacaatggacccaaaaattcgaccgatgaaggacactgtggtaatctatccaaaaaatagcaactgtctcatgaagtcccactagaaaaaagaggtgcttggttcgacagttctgcaccagctctcaaaccgttggacaggtcctggatcattttgccttagatcagtctcatgagaacgatgttgatctgaaaagaagcgttggctatgtgaagtttggaagcaggttgtctaacctatccgagtcatgttgaggtcttggctcacaaagctaccatatgtctttcgtcacaatcatgatccttcatatatacatttttggtcatttagtcaaggactccacaaatcgatcagggtctgatcgtggttttgagcagccagcagagccatggcccgtcgttttcctaagtcaaaatatccctcgtcgacgtcacttccagcaaagagcgcaccagccgccttcagaagagcaacacattgcttatgagcttgtcgggcagcgtaatacaagggggtatgactataattggatgaaatgacacatccaagaattgataagtcaccaaattgttcgagcctaggaatcatcgctttcatgttatgcaaggggaaaaaaattacgaaccccagcaaatccctacaatgcacaatagctcctctcttcaacagtacttcgaccgctttttcgctcccatgcaacgcagctacatgaagcagactcattccgacctcgttggtcgtgtttgccggattgacaggtggaggcgacctgcgatcttcaggccgagcgtacttcctcagcagatcctcaagcacctcaggatcattagacatggtggctcggagaagaaggtgaggtaagattgcggattcaaggataacagatgaatccggcgcgcgggaccaagacgcaacgggatcttttccatctaagagggaggtttccatcgtggctgagtcactcgtcaatttgggaaggccaaccgatttgagggaagtattggacgaagcaagttgggtagcatgtgtaagaagctcctggagtctctcgagcgaatgaaactcagagggaaccgttgtatcatcctgcgggatagatatttcgcctcgaaggggaatactgataagtcgacgaacttgttcgactgtaagatctggttttgatagtagataggacaactttgcgagagcacactaaaggaaggaaactcaaaaaggagattgagattagctagattgaaccctgttgtcttgaaacaatatggagattataaggctcacttcagttgtcatgtctagtctcaacatttatacaacgtgtgaaatttgaagaggttagaaatttgatgtatgtcgtgccactcgtgactcaatgatgtgaagcgtaatataaacttacctcctccagcaacaacgcctgcgcgctccaaagcgtatcctccagaatagattttgctaacaaaacccttagcgcattgtgtaacgtttactacaacaattccgttcttcttcgtagcaattctcaactcgttcaatatgtctgtcaatacattgagtgaagaattcgaatttcagatacaaaatttcaacaaacgagatgaggatatcacaagacaatgtaccttctcgttcaggagcatttccagcaccaaatgtctccatgacaactcctctcagtttgggtgtgtgtcccgaattaaggaaagaatggaaaaaggaggctgatattcctggaaagattgtcaatatagctgatagcgaaagagagatgccgatgctgatgagcacatcatacgagaatgtttacttgtttgtgccaactcggcaggttattacagatcacttaccgacctcggaacacatatctgaatcgttgaaggatttcgtcccatacaggaaaacacgacacgtcaagcgatggcacggcaacatcacaggatgatgcgaatgcttacctctatggactctaaatggagcaagagctttaggcctcaaaaccgcattccagttgacttccaaattgataccaactttttaatcaacccagagacgaaaaagagaggattaaatatcaagtaaagctctagaattgattgacattcatcttgcctacctttgactaaagctccaggactaccctcgctagcgaatgcatcgaagccatcgttggagaccttgaatgttcggtttcctctccaaacattaccgttgaaaaacaatcctacctccgggatagtgggaaatgttccagagacgattagtcctccgagcagattttcgtatgcatcgtttcttagctgagagataggaactatgatgattgtgcagatcgtaagagccatcagtcgcagataatcgaaacggactagagaaatggttgttactttgagccccggtgatgatgacaggtttgccctggagaaagatgtattgatgcaagtcaggaacagattgttacgacagacagtaaattttggcgcacttactagatcttctaataggaaactcagagcggacgccgtgtaggacatggtatccgttccgtggagaagaagaaacccatcgaagttggcgtaattgagagagatgtccgtagccaatcgaatccagtctgtatggatttaaaagaacaactgaaggtcagttacaatatgagacgagcaaaatatgttttacttgcctttgttggatacgttggacgagtcaattaatggtgaatactgtgttgagaagcattgcgatcagacacaaatgccgtacttgattttgccgcacacaaatatgttttcatctttatgccgacggtgagaaacctacctcgaggatacagtatcgaatccttcgtccactcttgtcgacaggcggagtgaccaagctatctacccacctctcttcgaacctcacgccgtctttgtccacaccatctgcctcgttccctggttgattggtcgtgatgccctcaggactgtcggcaagagagcttctaacgaggaaggagtgctgcaaaggaggcggggaagcaatggtgctggctttcgaagcggaagcagcagaagaccagtgttgaaaagcagttgaggatccagtgtgggagagaagctgtgagagtataattgaaggcatcatctcagtgggtcgtatcagcttgacaattgaggagtatggattggacaaacggagtctcctgagggatcatgaaatcgactttgagctcgaagagttgcctaaagatcgttggagactgaaggtgaggtttgtcgtacaaaaactcgaaaggatatgatgagagtaactcaaacgatcaacttacagtcaaaaacccgggctccggaacatatcttcgtttgattcgttccaattttgagaagcaagatgtgaggacagttgagtttcaaatatatctcatcaagggagtgaacaagtgaggtagacggaagcctaaccagatagtcaagatagaaactaacccattagcagaatgaagcattccgatggttccaccggtatacaaaatcagaacagttgattcctcaatcatttttttttgtcttctaagctgaagaatagaattgtgtgaagatggagagggacagattgacgttgaggaagagaatgagaccaccgcaaatattatttcaagtagaagagtgaaaagagaagaaaataagaaataattcgatgttagttttcgaacgcgaccgttacgctaaagcagataagattaagattaatctaaatcaccatgcacagagtagtttggacaacaaccagcattactatcaataatgtaccagagaactattatacattcgaagctcaatgggacaaattcaaagcaaacgaattcaagaaactagaaacacccaaggcaagaagagaggtcattgaatgtccgattatttgtactacttgatagaaaaaaagaaagaaagaagattaaaggattaaacgttaagatgcatatcaaacagaacgagtcaagatcataaaggaaaaagaatggaagaggacgacacaagaatgaacaatcaaatgccggaagagacgtgacgtaaggtccgagtgttttcgctacagaggaaagaagaggaggatgaggaagattgttttcaaaaatggaggaatgtcaggtggcagcgtgagtatgttgggaaaatgattaattaagtggaacagaaactatgcgagacatgcgaagcacaatatactgcgttacgcaaagagtagatataagacgggaggtcgaaagactcgaagaaaaatgcgccacgacacccgatcagatgggtctttcagggcggtgaacgatgaacgagcttttgattggaggagatccagcagcgtcgaccggcaagatatccccatagcctatcgatgcctgctttccaagtgatatgtctgtgggtgtccgagacagtgatgtggaagcagtctgggattgaaaggtttgcctcttgggccggatcaccttgaagcttcttaccaccggctgaccttcagaagtagtcgatggtgaagtctcagcaacacttagcccaacggcattaggtcctgaaggcatcttgatcgattcctctctattcaagtgggctcgttccttcgtttttcggctaccaaagggccatttagaggttgcggcttgtccaggtggaggggaacccagctcagagtcgaaatcagagtcagagatctcgtccttggggttgccggggttttttacgaaccatgaagaacgctttggtttctggaaggattctgcatcttcttcctcatcgtctgcttcatttggaacaggcatagatgatatgggtaaaggtctgatagcgaagccgctttgagaaaatgatggatttgatccgggttgatatgacgtattgaaagttcgggacaattgattgttacctgaaagagccggctcgctcttttttcgataatgatctgatgggcgagagtacagaccatgcgttcctgaactatccggaaggaacatcatagaggacggtgtgcccgagtcggatgcggtggcagactcgttatagtactgttggtggcttgtcgaggtatcaagagtttcttgtccgtacaataacccctggtaggggccaggagaagcaggaggagaagtctgcttcaaagagtatggtgtctcataagctgctcttcctcctctcaccatagagaaccctcgctgaggaagttgtgtggagggcgaaggagaatctggcggaacagctgtcgaatactgcctctgatgtcgcaaaggtgagtactccgacgaaggttccgtcgttcctccatagtcgatcaagggcggcggtctccagccacccatgatgaaacctgtctcggtttcgttcgagaaatcctgaaccaatctaggaaagtagctcgagtcatcggttccatcaaaattggtggccggggtacgggcgggggtcatactcatgctcgaacggctaaggtcgagcataccttgctggctgggcgcttgtgaatgttgactgaagttgtctccagctcgaggtcggaaaccctgacgccggttctgacgtcttctaccggaagaacggatcagactgtcaccgcaacagctggctttgctaaaagcaccgaggataccactatcgtaagggtcggccgaatcatcaaaacgcgcgcgaacgataagtcggacgagagcttcgataagtttgatgatgagggcgaggagatataacaaaaacacaacggcttgaatgaccaccacagcgtaagcaatccaagtggaagcgagatttccgatattaatctaagaacagttaacgttgcaatgaagaaaagtggcggatagaatgagctcgttgattagaccgatcttttcgctacttggaagaatggtgaactcacagcttgacacaagataagtactaaaatcatagtgattgttctgagcacaccaaacataaaactcatagcccccatactagctcccagcccccatggtaaccaaacagccgtcatgagacctaccgtgatttcttgaacaagcaagataatcacctgtgttgtgccgctcttctgtccagccccaatgacaacacctgctataaagctggcggccatgagaacggtcgcatatagctgggaaccttctccaaatacgttgtaaagtggacccaaggcaagaagagtccgagtagcatcataaagctttggcgaaggcgtggtagccaaacgatagctgaggtagactgggatcgcaattagaatcaagatgaagaatacggctgccagggcaatcgaggtagtggatggagaatttgctgtggaagcgaggtaaaagtggtatgtagtgaacgccgtaagaggaccttggaagaggaggaagactctgatgaggttgcctgtcgacgaaagccacagccaacagttcatagtcaagtcagcttgctgtgcttaacagacttgttctgccctttgcaaaagggaaaatgatcaatgaacgagccttgtagagagctagcataaaacgcgcccacatcccccttgacgctgaacttccaccactgcctccttgctggagacgctacagcccgatccatcctcccgccccctattttgactggcgactttcctcttcctttatgttcgtacgctcctgcttccccatcaccgagctctctcaacggccgtccgaacattccgggagacgtaggcggactcccaacacctacagacatccctcctccctttcttgccatgcttgaattcaagaacgcgcccacgccatgtacgacccagacggccaaggagattacgatgatcgtcgcaattgcaagcagaaacaaagctgcgctcatcgggaacagatcggttggccgaatcccgaccagaaacgcgtacttgtccattccaggcgaatggcctctcatgttgagaaacacattaggtaggcttggatcgagatacaacgctgaagatgaattgttcatagtggaggcaaatgtcgacggagggtcgtatggtgagctaagatcaaatgggtcaacaagtttcgagaaggcatcggtgccttgagtgaaagttacatttccaaccaaagacgcccaggaccctcgagttgctatcgggtagacaaagtccggccagagaacagcgatctggctgaggaacgaacaatactggatgtgatatattatatctctgaacccaggcgtgactatcaggatgaagagaccgtggacgaagttagacatatagacggatttcctcgtatagagctcttatggacatagctaatagactcaccaaatcgaagcagcgacggactcgtcactagtacgtccccactaaccgcactcatcacagccgtccccaacactcgactccacttccgcttgaccccggcggacacagctgccgagcttgaccctcttctgtcacgtccgtggcctgtaccggtctgatgggccgcacttttgccgacccgctcactttcactcgttgaagcagcacaccaacttgcgaacgctcttccgccccataggaccgcccagtagcctacggctattccgacggggatccagagtacgagcctgtagtaccacccgtcaggatagtacggtgtcatctccaactctacacaggcgagctcatttgggttagggtatgcagtatcgacaattcggacttgagttcggagggtggtgagcggatagatagagttgaacggtaaactcaggttgagtgcgaccgggccagagggaattatacaagtctccacgtcgtctgtagatgttgtaggtgcaggagaaggatgaagagagtagcacaacgaagaggctgaggtcaagaccggggacgataagaaggtcgtggaggtgaacagagtggccagcttgtcagtggtgttatcgaatccactgacgacctgttcgaaagaacgaggtatggagagagggtaagtatgaggaccccattgatgtgataggaaacatatacaccagagggggaacagccacgggcttgattccatcctgtccttgtttcttgaatctcgaaagtgaaagcgtgacagactgacctctgaagaggacccaatgagatcgactcgaagaagctcactccctgactccctttgagggcccaacaagccatcagagttcttcccaaactgaaaataaccctgagtgaactgaataggagaagagttgatggacgtatgaccaacacatgatgtgagcgatagttccagcggagccgctaccactacccgagggacaccgttcaacagatagatggaaacgatcactaggaatgcatgcaggaatcgaaagatgctggacgacgaggcgaagtgtggttgaggttgagaggaatttaaacggaaggaggaagaacccgatcgagccataactttgttggatcgactggagggggaacaagaaagacaatatgttcttctagacgagcttggcctggtacgttctacaagaaacggtggctggccggcatggaaaagcagagacagacgaaagctagtttctagctgggtgagaaggaggcgatgtcggggcaaattatgggtcgagttaggctcgttagctggtcggaagaatacaagctacgactaactttcgcgtaacatatatacacaaaccacgtcatacaaatcggtattcagaaagcaactcatggcatcagtttgagaaaccagtaaactttcgagcagacttacacctatatagatagaacttggaaaagaagaacaagaagaagagatagaacggaagagtaaagagacagaagagaaaggcagaaaggagaaaggagaaaggagaaaagaaaaagaagagagaaggaagcatagatctcgggtcatgagaaaatatatgcatacgacggagggcgagcacaacggcaagagaggcaaaatagagaagaacgcgcgaaggatagaagacacaacaaagaaagcagggaaatcgaaaaggaaaataaggatacgtggcacatctcgaaaggtattcaatttgaaatgtaaaccagacaggaggaaggcttttcttccctctctcaagcacaccccatctcccatctagctcgtttccactctgcctcgatctcattatccggggctctccttttgccggcacattttcctctcggccacgtggcaccaccaccacctcgtcgaggaccgtcaatgaaggtctgtccgctgctgggagttcgcaagagctcatcctcggaagagcttgaaccatccccagtcgacaagctcggagcatcctcatcttcgtccgaatcttgtgaatccacttccgaggccttgatctcgagcgaaatgagtggaggggcagcgatggcatataaagcgtcttggatgttagcaggcgaaacgcaatccacaacctgggtggattgagacacagaatctcgtccaacccaaagcgaccacgagagtaggttgcccaactcggtctcacccgtagaaatctcttgaatctgaggtttcattcggattcgacagtgattcttgatagatcagtcacaagcaaggagcagatggatcgaaagtaaagcaagatagacatacttctaggccagagagcttcttccaagctttgttggagtacacccggtcgtgcaagaacttttgggcgagaacaagcgaggacaaaaaggtccgtcttgggcagccgagagtaccttgcttcgcaccgggagtagacaacaaactttgagctcgctgagatttcaaccgtagatccgtctgttagaccaaaacgacatactatccaaccgaggtaacgccatgaagggtcgaaacatacctcgagataccagcgagcagcccgaagcgttccacagttggaacggcttcggcgaaggatctcattaacaaacgttcggagaggaattgcctcgttgtcttccgaagaagaaacggagcactcggacgaggctggccagatggaaagaagaaggtcgatagtagaatctaaagaccaggaattggtcagaaagatcaataataatcaacctctgcaaaaattcaagcgatccatctggcacgagcatcacacagatccccatctccaccagacacagagtcgacgaagagaaagatactcaccaacaagcctgtcagcctcttccttctttccacatcgctcgtggaccgcggctgatccagctgatccttcagacggactctttctcaggtcttgtgaatcgactgaggaaaaggacgagtgagaggcgagcgcggtaagctgtcgaggccggtaaggtcgctgctgcagggattgcacaggttgagcgagggggataggttgtcgatgtttgggccactgacactttgggggttgatcaagtgcagaaggcaaagactgggtgataaaggggactgagttcgaagaagaagaagaagacgacaaaagagcgcgattggcctcgtccccagaaagggtcaaggccggtacggtggatcgccactgatcgatatcaatccgatgctgggacgacgtagaagataaggggcgaaaggccgtcatctttgaagggagaagaaagaagggatggaaggttcttcttctcttgaggggatgcgactataaaagagaccttcttctaagccgagcgaggctagggctgaggtggaaggggtttgtttgaaggggggagggtgtttagtggggagaatcaggatggcgaaagtagggcggagaagatatgttgaaagttttaaggagaagagtgtgaacgagagggacggatgggttgcgaaaaaagtgtttgttagcaaagagctttgtgtgaacaaaaagttggattgaagagtgtagaattgattggccagtggcgtcggtttagagtcaggtggtgttttggttgtagtgatagtagtagtagtggcgttcgataaggcagcagcagttgtcaagacggattggttgttcaataatctaatggaagaaagacgcaacaatggtgaaagaggtagagttgagctgaacgatagacttcttgacggtggcaacggcgacggtagcaggggcaaaagcggtagtatcccgatgggcaaacatgttgggcgataagcgaacggtggtggtgggaagtgtggaggtgggatctgtcggaccgtcacttccaatagaaagaagatgtggatggcctgagagaattcttaggagtagaagagatgataggagaagacagtagagaggatgtattgtctgtcgtcgtcgtcgtcttttattcgtccgacgtcttctacaacgagggagagaaaggaaagaagaagaaagacaggcaacaaggtggtggctgggatgtaggtggggtctgtcgttatatttaaatacttgaattctatataagtgtacttaggtaggaatagcaaggggcaaacaagggtctagcctctgaatgactcccatcgcggaatattcttttccttctctccttgcgcgcggcacttgcgcaggagaaacccaagtcatttctctccccatggcgttatcctttaaccctcagcggttagatctgggttgtggactcgtttggtctatttgatgtccagatccatctcatccaacgattcatccatcggccgaatggaatatactcaggtctgtacataatgacttgccttgggttgctcattcttcagtcaagtcatacaatacgcacatctgctctcgtctcggtgtctcttcttcctctaaattgagttcattcatagccgtgcaatcgtatgtcacgttcactacaggtctcggttgattgtcgaatattcttgcaagttcatgtactgtacattcgacatatgacgtgcacacatacacataaacatatgccctctttctatccaatctttctttttttcttccttacttttcagatgagacacagtcatcgagaatttcttcttcttcttcttcttcttcttcttcttcttcttcttcttcttcttcatttgatacttcctgattaaacctacagtttacttctccaagtatgcaccgtcctgtacgaggaagataaaagacacgacagaatacgagaagagggaggaagttcagtcataagcttgaaacccgtcgggtcatggccgaccccaagacacaaacacacataccgggccacttttcaagccctccgcattctcgaccgcaggcaccaaaatcggctctcgtcgtttttttaccgaagcggtctggttatgagctcccggtcggctcgcactatgggcgtcctcggaaaatatctccttcatcttctccactccaagccgttgaacctgagttgataccattttttgagccaaagtgtcagccacgccatccctttacgttgttcgccatacccaaagtggaatacaaagaaacctgcgaacctccttgtacacggccgtcacaacctgaacgagaggtccagagagtccaaacttatgcacaaagtatgcagacacgatcaatatgagcaacgtcgagaagtacaacggatttgtgatcaccgccatgaactcgttgaatctgttcatgtttttaataaaagatatatatacgccacacaagtcagaacgtttgacgttgtcaaaaatcgaaacagatgaacgtacccaaggaaacacaacgctccccaaacccaaactgggatcatcgctcggctcaccaccatactcctcttggcttccacatacagcgcatccgcctcccgccggaactttgtctctaagtcggcctccttcgtcggtgtcaaaatcgagagcgagttctcaaaatcaaattctgcgtccggatcagacagcgatgacgccggactgtccgacgagatgttagaaggtaacagcgacggtgccgtcggcaatatccgggcatacaatggaagcaaaacaagcgtctgaacagtcatccagcttcagtcccgggtatctatcgagagatctagctattgccctagtgaacggtcaaaggagagaaaagactgacctcttcctttgctttcttgaacgcgtcatctatgtcatcctcaggtttccaaaccctcggcacaccagcggcgtcgtatctgaatcgttcctcgaacgccacccggagcttactcaaaagaacagtctcgctcgtctgttcgtccaccttggaccgaagcgcttgccatgcgcgccggcgaagcgtcgataacgatgccgtattctcagatgatgtgcaattgaagcctatgaggatgtaaaacgaaagcagtgagcgactgatgttcagacagctatttgatgaaaccgtgcttactctttgccttggtcaggtaggttgattcagcccgctcgagtgtttcagaaaattgagaaagaatcttgtcccacatctggggagtgggcttattgagcaaaaattcgattggctcggctaattgctttttgatatttctctatattaatccattggatgacaagggattaacaaggatatgcactcaaatcggctatacgtttgagtttcaccaaggggcataaacagagtggacatacctcaatcgaattgaccatcctctttgtctcatcaaatcggcattggtctccgattagagtaatgtcctcctttagcaacgcaaactcgtcgtcgtactgccaatcagtatcatctagcctgacctctgtatcattagcgcacacgtatacaaggaccatctgtcagcgctgaattggattctgcaagctgaagtatgaggtgtgagtattcagactgaccttcggctccttctcggaaagtattttctgcccgctctctgcttgtctggacgaccgcaccaaaatcgtactctttacccttgagcgcttcttcaatcccctgcttgaagtcgcggacgaccactttgtgcaaattcttaacgtgcccaaggaacaaaggtgaaagactagagtcgagcgactggatgagatcgatccgcttgcgttgatagactccaacgtggtatcgagacgcgtctcggtcgaaatgcgctgattatacgacgaacaatggccaacgaaacaatcagcttactgaactgacagatgatgaagacaacatcaagcagttttaggaactaacccaatgcagcttgcttccagcttgacatcaataatcctaacccatcgaccacattaccactctcaacctgccttcggatagtctttactgatgacagaaacgcctcggttgccaccgcagcgatttcgtcgcaccggaactgggcgagtagctcttgctgtgtagggatatctaaatccgcattcgattggacttgatcctgttgagcaagagaggacaaaaagcaacatgcggtccgcttgatgagtaaatcccggccataacaagtttgtcacgatcgtataagacgaatggctcacccaaataccctccatgtagaacgccacaccatccgccgggatccgcttatggtaaataggtttaaagacatagtcctctctagattggtctaggaatcggcctcgaagatcggacacggcctcctcaaattgagtgggcataagtactttgtggggaagggtagtgaatgctagatcaaagtaatcggtcagaaggctagactcgagagcttcgggctgaatatcaaggatgatgatagaccacagaatatcagttataggctagttaagtgaatagatgcaaaaactgaccttggataaagagtgccagatcttctccatatcttgtcggagtgtggcctccaagttgagcaatggagtggagccaacgtggtctcgaatgacgaacataagcaatgtcttttctttgccactacagcgatgatcatatgaagccacatgttaatgaggctgattttctttctagaccatgcaggatgtacataaccttgcttaccttcctcgagaagtaccaaacaagccaagattgacttcgaacactgtcttgagaagtcccatgtttgccccttgataaagaccgctgtttgtgaaatagagtaagttccattaacaccttcttaatctttcgagaacggataaaaggatacgttgacgcacacttggtgttcccacagattgatgaggagaacttcggaggatgccaacgagaagagagcagacttgcgctcgaagtcctacaagagtagtgtacgaattgttagggccctctcgattagacaggaaagagaacaactgacctgatcttctcctctttctctgccatctgttccctcgacatccatcaccatgattggtccgtctttcgccttgcacatccagatgccttgaaggattattcaaagagagaaaaaagacaagatgagaaaacttcagaagccaggaaatctcaaagtcgcgcgcgcgaaatgagcgcgcgtacctttcgtggtttgttttctcgccttctcgtccattacatcgaacgttgtgccaaacagtctgtttagtagtgtgcctgaaagtttttccccaagatttggaagcaagtttcaaatcaggatgatgttatgaatcagtcttacttagacagagccagatgtattccatgagttgtggtccaaccagatacgaactctttccagttgactgagatccaaagacggagacaacgtcataaccaaaccctttgttgaccagaccccatcggctgatagcaggcgtcagttccttactgtataacagaagtttggggtcgtcaggatgtatgagatatggacaagaggatggtcaatataagtacgagacgatgaataagatgaacgtgggattatgaacgtcgagttcgcactcgagtccaattcaatatacaagacggtatccgatcttagacttgagtagtgaacttgcctaaacactttatcttcgtcgatgatctgtattctttctttgctgctcttctcttccatgaacggcttggtatcggtcgatagtgatgctgatgactgtgttgatggtggagtaccatcctccccggtcagggacgctttagcttgctgaatggcctctttagcttctgcagatgcgtttgaaaggacgttctggagttcttgagatccctctgagagaatttgttgagaggacgagatgttcatctccatgtcgggcgatgaaaaggacgaaatgtttggaatttgatgaagaaaaagagaagaagttcagatagaattgtcgatgggggagagaaagtaagagaagatagatggaggaaggcgtatggttacgcgtgtgatcacgcgtgtggtaaccgatatgaataaacacgtgatctgtgttaccgtgttcataggctacttccaaatctgggacttgacccaagagaatggtgactaaccggcgtatccacttaccgctcgttttttttctactctcatttcgacaactttcttgatcagccactccttacagtttcgttgtcggtctctcctctctttcgtttttcttttctcttcctacacccaggaaggtttctttcagggatgcggatgattttacgctccgttcctcggattcctccacctagactgtgcattccgtcgctccgatcgggctattccatcgtcccttctctctcctctccgcttacttccgttgctgatcccatcccgccatcatccacttacgacgtgctcgtcatcggcgctggacatgcaggatgtgaagctgcggcaggtgctgccagatcaggtgccaagaccgtcctcatgacccaaagactggatactgttggcgaaatgagctgcaaccctagtctcggtggcgtaggaaagggcacgcttgtccgagaggttgatgcactaggcggactgatgggccaagttggaggtgtgtcccaaaattccttttccttagacgcgcttatataaaggctgactgttgttcttcattctttcttttagataaatcggccatcacatttcatcttctaaacacgtcgagaggaccggccgcttggggctaccgcgcgcaaatgtctagaattcaatacaagcgccatatgcaggttgccttatccaaagtcaacaacttggatctcaggcaaggctcagttcaaaatattctctgggaagatgatggagatcaagggaagaagaaaatcacaggtgttgtactaggtaagccttagagtcagggccatacgatgttctgacaattatattatggctaacctgaatgcaaccgtccattacgcagagtcgggtcaaacaatcaactgttctcaggtggtcatatgtactggcacatttcttggtggagagttcgtcgcacacacactttttctctaacgatatcaatatagaagggcgatcttgttcacgttgtatctgatctctacatttatagaatccacctgggtctcgattcctatccagctggtcgaatatctgaacccccttcgtccccgtccctttctcagtctctccgatcaatggacttctcattgggtcgactgaaaactggtacaccgcctcgtctggacgggaagaccatcaactattctactttggatacacaacaacctgacggattgaatagtcgcgcgtttagcttcttgcacgaaggtagaaatggacttgcagaagctggggtaaatttggaaaatcaaattccgtgccatctgacgtatacctccgaggaaaccagtcggatcgtccgcgacaatcttcacttgtctatacatatcaaagaaacagtccgtggaccgaggtactgtccttctatagagtccaaagtgatcaaacaccccgagcttagctcgcatcgaatttggctcgagcctgagggttaccccgaagaaactggtacttgctcgtttcaaagaatgtggcttatagatggacaagtactgatatctataccaacccatctattcgacacttgtagatttagtatacccagcaggtttatcggttaccatgcctgctgacatccaggaacgagtgcttaagaccatcaagggacttgaggaggtcaagatggtcagccctggctatggtgttgaggtgtgctcacctttcgttccttttttatttgcaagtgcgcaagaaaccctaattttgattcatcttttttctttattagtacgattatgttgatcctagagaattgaacacaacacttgaaactaaacgggtcacggtatgtcttctagcctctgtttaggcatatcttatagaatctaaaccggaaatgtcttgtttggtttgtttggatgccaatatagggcctcttcctagctggccaaatcaatggaacgactggatacgaggaagccggcgctcagggcttagtggctggagtgaatgcaggcttggcagctcaaggtatcactttctaatctttccttacgacatcatgtatgtatcatctcttggaacgttatttctgatcccatacatttgaattcactgttcgtgtaggcaaacctccgatggttctcagccgttccgatgggttcactggggtgatgattgatgatctaactttaagaggagcgaccgaaccttgtatgtatcttaacatgtcgtctcggcggctctgtatagattgaatctctgatgtccttggtcctcgtgatgcttttatagatcgagtgtttacgtctcgatcagaattcagaatctctcatagggctgataacgctgatcttcgtttgacacccaagggtatgtgttttcagccgtgttctgcgacgctcaactgagacagcctagagatcaggattatttaatagcatatgcgtgtgtttgttacttaatcacaggttacgcacatggagttgtgtctgaagaacgatgggaacggtttttgaccctacgatcggagatggaagtcactaaacgactcttgaaggagaccacatttgctagccgagagactgatgttcagcccaacatatccacaggcaagaagacgtacgtttgttccgtattctctataccttcacaccggagacttgtgatagcattcatgtgggaatgcttcgcttatcgaaccatgtgctttattctggttggcgataaatccagtgcatgggagctgctagggccggcagactcctctcgctcagacgagagtatttatacttccttccctgagctggcctcaatggagcctatcgtgcgggatcgagtaggaatagagagtgagttcgatgaatacccattggtcttacggaagtcccttacttcaggacatgttcaatttgattttaatctcgccaatatatctactctattctccgaaacaaagaactatacgagaatactctattgagacaagcagaagaaatcagcaatttcaatagcgaagaagactatctgattccctctgaactggactacacctctatccgtggtctgtcggacgaggtcaaagaaattttcattcgatcgaatccaaaatcgatagtaagaaaatttcatgtagcactcttgttcaacgtatcatcatcttaccgctgtctcttatgaatcttattttacaaacagggagttgcaaagaggacgcaaggcgttactcctatgtccatcctgcttctgatgagtgaaattatgaaacttcgagccgtatcctcgtcaagaatctctatacccgaccattcattcaagtctacgacttcatcttcattcacaacaaatcgaccgtcctttatcggcaattcctcttcgcatctcaagactgcaccgtcagttcgtgccttctcgacgtccctaccgcttgcttcaaaacaccgaaaacgttcttctgatcaaggagggagaaagaaatataacccatatccttcacgataccaaggcagtttccgagttccgccggtcgaagttgcaccaaggcatgcaccatccaccaaacccgaggatatgcgggctttgctgctagatgctcttcaagatatcgacgatccggatagtcgactggtcaggcggcttaaagaactacaactttcttcggcagatgctgttactattgccaaaaagtttgccgaagaagtcaaaccagagctggaagaggacgcttacattgatacttggcagtcgacttgggagattcaatcgcttcgtctggattttgagaatttttatatcgattctcgtggccagtcttgggataaggctatccaaatctgcttgatgcatcgattattagactgggcatctgcaatccatttaggcgtcaccgtcaccactcactctggagtttcactcgccgccatccagcagttgtaccgagttgctgttgcgaccgactttcgaaacccagctgatcgatatccggaggcccgagctttgaaacgacagatccatcttcatgtgggaccaacaaatagtggaaagacgtataatgcccttcaagcgcttatcaagagtaatcgaggattctacgctggtccactgagactgttagcccacgaggtttgggaaagagtcaaccgaggggatattgctgggatgaatggtgtcggccggtcgtgtaacctaaaaacgggtgaagaacttcgaattgtcgatccgcttagcacattgtcgagttgtacggtagagatgattaatcttggaaccgagatctcggatgtaggtgtattagacgagatccaactcatcggagatgtcaatcgaggaggagcctggacttctgctgttcttggctgttgctctagggagcttcatctttgtggagaagacaccacggtcgatcttatcaagaggataggggccgaaactggagacgatgtcattgttcatcggtacaagcgattggcgcctcttacgatcagcgacaaagagcttggtggctggaagaacatcaggaagggagactgtgtcattgttcttagccgaaacggtattttcaagactaaggatgagattgaggcggagaccgggttgaagtgtgtggttgcgtacgggatgttgcctccagaagttcgatccgctcaggctaaaatcttcaacgatccggacagcgattatgatgtgttagtggcaagtgatgcgattggtatgggactaaacctgtaagttccatcaacctgactctaaaaaagaaaccgtagttgtacatccctcaccctgagcgaatatatttgggcatttctcttgtttgaacagtgttatcaaacgagttatctttacttcattaactaattaccttggggagcctcttcgaacgtctcaagttaagcaactcggtggacgagccggtcgattcggtcttcatgggaagggggtcagtggcgaggttactactctaaacgctgaagatttgccgatcctgcatgaggtcttcccttccgagattcctcctatagagcgagctcgacttgggttccaagcttccgatatagcgaagctttaccgagtgctaggtcatgatgttcctctggagaggatcgtcacgctgatctccgaactcgcacgaacagggccaaactacatcattgaagaccccaagactatccaaaaagttgcgcccattatcgatcgatacggggcggatctcagcttggagcagaaattgctgatcgctgatgctccggtgaacctgagagatccgctggtggagtactggtttgcccagtttatcaccgcgcatgcggtgggcaagcgaatttctgatctcaaaggtctgcttcagacgggcacgttgatcgagacgtttgagcgacttaaagtacgacacgctacgttcctcaatgatcagtatatcctcgctgaaggttcggccaaaccgaaatcgagaactgtagagattacgtcgaatgaggttgctcagttggaacttcttcacaacatcactaccgcttataactggctctccttccgactaccgttaacgttttgtaagccgcaggaggcgagagcgcttcaggcagagctagagattttgttggactttgcgcttgagctcgttggcggtcctctttctaacgctggtaagaaaggtcaaggcggcagaggagtgaagaagggcttgatggcgaagttgtcgatgagacagttggaagcaaagcagctggcaaaggatttggccgaagagaacaagatcaagttctatcgacccggtgacgaggaagatttgaagaaccgggcccagttaaaccagcttcctatctctagtgcagaagtggagaagctttcgagcttgatgtgattagattagttgagtatatgacatgtataactagcgttttcgcacaccctcaatatgtttttctgcaagaatactctgaaaagaacaggtcattttatcaacatttttaatttatttttatgaacaagattcgtcccttgagaaaatataggcaaaaaacaacctccaaagacaagtgtcaacactaaaacggagaaattaacaaggaaaaatgtcacaagccagtggtctagaaagcaaaataggagaggtaaaagctctgattccatcttctttccttttccctcacactgcagcggcctttacctgtcggactaagttaagagccgatccggcccggagccagtcgacctgatccttactcatggtgtgtttggtaggaatttcgagaacctgaccgtccggcttggtaaccttcaaagaaatgaccgttgaaaggtctccagcgacaagcgaggaaacaccgatggtctcgacctgatcaccagcagagatgagagaataatcggccttgtcggcgaaccagagtgggagaacaccttgcttcttcaagttggtctcgtggattcgagcgaacgatcgagcaacgatcaacgatccaccatagaacctaggctgtaaagcggcgtgctctcgagcagaaccctctccgtagttatcgtctacaacgagcatccaaggttggttcttcgacttatatcgtttggcaatattcgggatggtgtcttgtccatcctcatcacgggcaacgttaacttctccaccctcatcgttgacagcggtgatcaagagattttccgagatcagacgcaagtgtcccttgtactttaaccaaggaccggcagcgctgatgtgatcagtggtgcactttccccggacacgcatcaggcacttcatggtcggcaactcggaaggtccagcctcgaagaacgaagggaaaggggcgaggacctcaagtcgggttgaatcaggagcgatggcgatcggagtgtctggctgaggctcgggtgagggtgtgggggagtaggaaagatcaccgggtgtgaaaccaccactaggcagcttgatacccgaaggagcatcaaacttgaagggctgtccgttcttgtcgagcaaactgtcggtcatagggttgaaggacagactgccggagaaggccatggcggtaacaacctcgggagaggcgaggaagttcatcgtcttcaagtttccatcgtttcgagccttgaagttcctgttgaacgaagtcagaatagcgttgtcctctcctttcttttccgttcggttccattgtccgatacaaggcccacaggcgttagccaagacagtggcacccacgctctccagcttctgctgcaggccgtccttctcgatcgtcgccctgatgagctcacttcctggagtgaccatgaagggcaccttggtcttgagtccggccttgtgggcctgctcagcaatgctggccactcgggacatgtcctcgtaagaagagttggtgcacgagccgatgagtgcggcagagagctcgtccttccagttgttatcggagatgaagcttccaaactttgaaagcggagtagacaagtcaggagtgaatgggccattcaagtgaggctcgagctcggagaggttctgttggatggcgaagaaaaacagacaaagtcagataatgccagatagggtgagtgtgaaaaaaaagttgaacgcacgatctcaatcagctggtcgtactctgcgttctcatcggccttcaagaatccctgagcagcagccttgtcagcggcagcggcaacacccgctcgaccggtggcttgaaggtaagacctcatgttttcctgtgagtagtggacgaagatatccaccagcatgaaaataaaatgaaacacaatttgttaaaacgcatttggatgtctctagatgacgaagggaaactgacagtgtaggggaaagtggaggtagtagcgccgacttcggctcccatgttggcgatcgtggccagaccagtgcacgactgggcctccactccaggtccaaagtactcgatgattcgaccagttcctccctgagagcaaagaaaaaggatttaccaatcagcaattgcgtaccgaattggaatcaagaaaccttcctaaagacttactcggacagtcaactttccggctaggtggaggataagatccttgggggtggcccaaccattgagctgtccagtcagcttgacaccggtcacattaggtgccttgagctcccaaggagtgtcagtgagggcgtcgacagcgtctgcaccaccaactccaatagcgagcattccgagacctccagcgttaggagtgtgggagtccgttccgagcatcaagagaccaggggcggcgtagttctcgagaacgatctggtgaatgatacctgatccgggtctccagaactttggaaggcgcaggaggagaaataaaagggtcagaatgagcatcagcacaacgtcctatccaaattatgggtatggtgagtattgaagacgagagaaggataccgacctcaattccgtacttcttggcagcactctccaagaagtcgaacacctccttgttgctcacgatggacctctattagagtacgagaaggcgcagaagatatcagccgagtctatccaacagaagagagaacacgacttgctagatcggccgacaaaccttgagatcactctccgctccgtcgtaagctgaccaagagatagaagaagaaaaagaacgatacagtcagatcgatgtatcaaagtgttgcaatttaacgaaagcgcaccttggataagatggtcacaatggatggaggcaggtacggccgttctgctcatcccacaggtcatgaactgcaacaaagccatctgagcggacgcgtcctgcatggctactcgatctggcctcaacctgagatgaggaaaaagaccaggataggtcagtatatttctgataaacagacaaacaagagagcaaaaggaacagacttgaggtatgactgtcctctgacgggagcaccggtggcctcgacgtcgtcaaggtgagaatacaggatcttctcagccaaagtaagcttcgctccatcgggcagcttttgcctgacggccgagagtgttttgagcagtcgttcgtaaggcggtgtgattgagctctgccgagagagtatacatgaagaagaagcttgaacttttccattctctaataaaggtattttctttaaaaaaaagtgaatagtggaatgggatgactcacgcattccttctgagcgagcgtggggaaggcggtaggagtggcgaacgaccgagctgctcggggagtagccagcctggaacccagacgggcggaagagagcatggtgaagatggatatggaggggtgaagagagcagagaaagatcaggaacggatgcaagaagcagggaaagaaccaggatcaggatcaggaacaaggcacggcagccgacaagaaaatggaaaaaacccctcgagaaaatcacaaaaaaattcctcagaattacaaaatcgatcatttttcctccttacagttgtttttactcttctttcttcaatcttttttgcatctaccactttttttattttttccgtagtatattctaatacaccatttttctcctccctaatatccctctccccgcggacaattctctaatcggcctgttttggttggctgattcctcgcatctgtagtcgcgtatgcacgcaaccataaccttcagtatacatatacgcacaggcaaatgcccaagtgtgtcagaacgctgaactctcaaaactcggtgttgtttggttcttatactttcccttaaaaatggacacattttcttccaaaagtcaagaccaagaactatttccctttctcaaacgccaacatgggttaacccgactcagcttaacacatagttatcgtcaatcatgctcgatgacatgatcttatagttgcaagagatttgttgattttagggatccaagcacatccattcttcaatatttctcttatcgagaacagcatgtatacaacaagacactgacagacacatgtatatctgtggaagataaactctggtaacgaccgtctggacgtgaagggaggaagccgatcactctgttgataaaaagcaagagaaaactaccattagtcatcctacgtttctttgtttaatcgaactcggacgaaaacaagaagagaagacggcaaggtagaagaagaggaaaggaggagaaaacacgtacttcggtaaaagtttcgtcggaagttgaagtaaagctgtagcacacctcgatcgaatgaactcctgaaccctctgctcgaatgaagtttacgaacagtggaaaaaaaagaagataacgaggaagaaagatatgtgtcagtgggacaaacttttgcgaatcagtcgctgcctttgtctcattggggcgaacctcttgtgactgtgctcccattccttgttgacaattttgaacgcgatatcctcataaggcggtccagccttgaagatgatggtcgcaatctcgggttcttctttgtctcgaacgataacgtatgtcggagcctcttggttgttgatgagatctggataaaagatactgcaacacaccaaacaacaacagaggaaccgggtgtgaggactggacttaaaagaaacgagtctactccggaaaacacaggagggaagagacgtacttgaatttgtatccctggacaaccttggggggtgggttgtcagaatcataatgcgtttggttatacctgaaagcgcgtgaaagagatagatggacgacaagtggatatcagtttcagtcaatcacagcacaccagcacagaaccactcatgctcttagttctgacgcacttgttccactcgaatccagtgtgaactctgttgaagtatcttggctttcttggcctgtacttgtcttgccaggtgtaactcgtgacgtttccgagtccttcctcgatattgaagatctcctcgtcctcgtccaacttcttggccgcctctgctcggtagagcgcctctgcctgtaaatcggccgccgaggccgaagcatccaaacctgtgttgacgttgggtctggctgaacgaggaacgaacttggtagaagtgatttgccgtcgttgggcaaactgtctcgaggtccacataaatttgagactatcagttcggtatcgtcgagctaaaagtcaggtcaaaagattagcaaaaaacgaaccagcttcttgaacacctcgtcctcttccagcacaacaatcaatcggtcttcgtagctgaattttttagggtcgaccaactcaatctccatctcctcctcatcccagacttcctcgacgttgccctcggcagtctcttcctcaatatcttccagatccgccccaaattcggtctcgccagcggccaatcgactttgagtagaagatacgagcgcggccacatccgattgaactttcagagcatcttctcgctgacgaagtcggagttgctccaatcggttctgaagaaccacctcgtgcatagcatgaagcttagcctgacaaggcgtttcaagagatgaataagacgcgttaaataaacagcaagattgctaaccaaaggaaagcgacgatgaaaaggaagatctatttgacgtactctagccttccagacttgtaagcttctaagaagtccctcccaatagtctgtatcaaccggctctccactcgatagcttggcttggacagagccttcgagttgctcaagctgcacgagggacttgcccgagagcagattactaatctcggcctcgacggctgggttaggtcgggattcttccggaagggtagccgaacgaagctctcgaagacgagcggtacatacggtcagcattgactgaaagtgacattggagagaaaaaagtgagtggttgtcaagacaagaatagatactcgaacgaaagagcacgaacctgccagaactcgatgtttgagggagatttctcaagtgaaagatacatgttgatgtcttctcggagctcttcggtatcggccaatgtcaagttctaccgattgtgtcatgggatgagaagagaattgataactgttaatggagcacaaagtgttttggataaatggaggcgaacagctggcttacatcaaagattttataaggctcctctatatccatttccagaccggcatcgtcccaaccccaaccgctgtcgtccttgtcgagcccgtgtttttcttcttcgacatacggctgggcaaatctcaagttgatcgccaaaaagtcgatggccttggctctgttttctttcattctgattcccgctcgtcggcgggcttgttcgagatggaaatcatcttctttgttaatccagtcctccatcatggcggactcagccaatcgagccattctagactcttcttcctcgcgaagctgcatctcctcctctcgttccgcccgtcgcttgttcagacgctctagctcttcctgtagagattaacaacgatgaatagaggagttttggatcgcacaagtttagaaccatacgcgtcgggaacctgaccatacgtttggctgtctgaatgagagaaggacgaaccttggcctcgacccttctgatggcgtcccgcctggagctttcctccaaactgattccagcctttttgtctttctccgctttttttacccacttgaattgggtacccaaatttgcgtcgtggaatgggttgtctgtcgaggtgtacatcgagagctctgcaatcgctcgagcatcctctgcctctttttctcgccgggcagctgccttagcttccttcttggcagatttggcagaaggagacttggagcgggagcgatgtcgtctgtagaagaaaacgaacgatgttcagacagacaagtgagcaatctagttcaaaagaacagaacggggggggcaaagcaagtagaaatgaaggcagcctcacttcttgtccttcttgtccttcttttcttctcgatctctacttcgatcccgcttcttggaagacttttctctccccctatctgtttcatcatctctatctctatccctgtctcttctcctatcatcgtgataatccctatgcgaagagcttgtacgccggtctctgtcgtcgagatcatcgtacttcctgctagatctctcccgagatctgcttcggtccttcctggaagaagacggccgagaatctctatctctctctctatctctatcccgaggagccggggatggcgagcggggcatggctgagtgattgacgtgagagaatgagaaacagcgtgtgtgtgtatatgtgtgtgtgtgtgtatgtgtgcgaatgcgagaataaagaggtatgagaaatagaaacacgagacgtacgtaagtaaacataaatagatgaattaactgccaatcatctttttctaaaacccggctgattacctaagttgcccaaacgaccgggccgaaacctggacaatcgggcgcagtcatcggctcggcaacttgacgtcagaaccggaggagcctgtttcggattgccacaaacttgggttccttgttagggttaccgaccaagatcaatcatctacttttacgccctctcttttcttcattccgttctgcttcaacaaccatcaccactctcagttaacactcactacgaatatcaatatgggttagttcttccttgccttctgtgtcatactttagttctggctcatcatgtgtctgttctgtctttttcgttctttcttctttcttcttccaattaggacttgcctctaaactcgcagctgctcagtcttccggagctgctcctccagcccagaccggaggtccttccagtcttcctcctattcagactcagcagcctcagtacggccagcagtaccaacagcagcagcagaacaatccgtatggtcagcaatatcagcagccccagtctgcatatcctgcttctccagttggaggggctcccgcggttcctatgggcagaccgttgagctaccaagggtacgtccatacatttcaatctgttcttctccgatcctgcttagtttgactgatcttcagctgtggttttatcttcgtactatatcgtctgattgctctctaactgcacttctgtaatgatgaattaatgaatgaatggatggatggatggatgatccgaaaataaaataaaatataggccacctaggtgagacacgtcgtccgatctgttaccatcggatttcactgctgctgacacactgatcatctacttcttcctcgcagcggccatagccagacgactcaacaaggtcagtacggcgcgccacaaggccctgcccccgggtgagtttcgtatcatttttaattcgttcattctcttcatcatcagccggctcacctgtcgtccttcaatcttcgaaacgcgttttgattcattcagccaatacgcgcctccctctggtcctcctccgtctcatcagtcacacggaaagcagccaccaccccaaggctaccagcctcaatatggtcagcagcctcagtctcagtatggtgctccccctcccgcctatggtgctcctcccgcaagccagtcggcttctatcgctccaggggctgttcctttggatccgcgagtagttgagggcatcttgcaagcttgtgtcgttgaggttagtaaacctatatttctctcttggatttctgtgtgcatcttctatatatacaacaagaatctgacgctcggctatgtgttgatgcttgatatattgtacagcaacacatagaggccttttaccctcctggttcgttagggcccattgccaatcgaatcgctggaaatggagcgatcgatcatcttgcctcgacctggaggatgcccaaagagctagccatggacctggttggttttcgtttacacacgtctagctatgttgcgttcatactgacccaacatcctcttgctctcgtgttgtcttttggattaatagttgaaactctcgctctttgacggttcgttatgactttcagcgtgtcatcgtaagatctagctctatgaattatatcctgacataaagttcgattgtatctacagtcatacttctagttgacgattctgggtctatgttcgtttttcaaatcgtgtatttttgttgagttgatgtactcacacgtcgcgtactcggattggggttctcttcatcttactcgtccacagggccttcgaggaaggaggagaaagaattgatgatttaaaactaattctatctcgagttgctcacgcgtcaaggtttgtgctatatcctatcaaacaccatcatcagcccattggccgatgctgatacttcttatttgatgaatcaacagcttgtttgacacggatggaatccaagtccgattcttgaactcaaacgtggaaggaaacaacagtaggttccctaatatttttttccttcgtgacatattctccggagtctgttcttgacatgttgatgcgcctctctgctggtatatgtgttataaaaaagtcacttccgagcagggcgctactcagcttctctcacagatccgatattcaggattgactcctttgggcacgtcccttgacaagaaggtttgtactttggaaattggtttcagctgttccatcaaccctcctatgaataaacgaaaggtttagaagctaatacgtcgtgatttcatttggtcacttgtgttagatccttcaaccacttgttctgggacccgctcgagccggccgattagagaagcctgtcttgatcatcgttatcgttcgttctaatctaaacggctctggttcagatccttatatcagaataagaagcaaacgtgttcgctggttgacgtgttcggtatctttcacttttttttagactgatggaacacccgctggagagcccaaagacatggtgttccgagtcattaccaatgctagcaacgagctcaaacgaaccagatatggctcggacgcaatcagtttccagtttgcccgtaaacatgctatcatttttccaggaagagttttattttcgagcaagcgctgacgtctaatgtatatggtgaactcgctattttgtagaggttggtaatgatcttaaagcgcaggcctttttgggagagctggatgtcgatcctgctgttggagacctggtcgattgcacctcgaacgtgagggctttctccttgtatcgctgtcctttaatattgagatacagccagttctttactcacatcgagctgccttccttgaaatttcaattcagtacgagtcagaggccgacgagatgatgaggaagtctggcatggaactgtgggtttttgcttccgctgtcttgcgtttcttctgtgacttctggtttgaagcaaaagggtgtctcattttgatctgctcccttaacttttgacagaactccggagctctggttggttaagcttttgatgggaggaatcgatgtttcctacgatggttcgtttttttaacagccaagccgatgactgcttcgcgactgaccacgttttcttactttccctgaaatagaacaagatgaggttcgacgttaagaagagaagatactctgcctacctctcacctcgcgaaacctctaatcttattgatctcaccctccttgccaccatccaatctatcctgtcatgtgcgaactatgtccttgtattatcatcgaccattgccagatcaagtcttatgtgaaatttgccttacatagcatttcctcgtgccctaatcttctcaatgtctatgtttattcccttggtcctatctgttcgcttttgagtcatgatccaatttctgaagctatcgtccgaagaataacatttcttgtctcatatgccactgaatcaatcatgaattgaggacctgaacggcattccacgcttcgacttgactagcacaatctagaggagacgctccatcgttgcttcgcttgtccttctgtgctccgtatcttagaagcagttcgatagcgcgcacacttttatcgaaaagaagatcgtcgtatgagaatttgagaaaaaagatagagaaaaaagatgaagcagtgagtacagtagaggtaacgtacttgttgttgtaagcagctacatgcaaagccgtcaatccaccttcctcgtaagttgagtttgggtcaaccggttccgccccgtcttctcctcgaagcatttcttcagccgtttcaagatcgtcttgggacatcaatgataagaatgcctcggtccgtcgaaggtgcgggttggagtcaaaggcgatttctgatcgaatttcctcacccagatcaaagttggatgttaatctgatcgccagccatatagcaagtaaggaacgaggaggagatatgatcagcttcaaatagactttggtaccattgctctctttcatccataagttcctccttattaacggccgagacaatattgtacggcagaaggcgatcaggcaagaacttaccctccttcgtttcggacgtgaaccaacagcttctcagacccgtcgtccgcgatggtgacagcttgttgtctacagaacaaacagaatctcagcttatccacaggactgatctttgaagcgttcatcaagcaatcccagtggaaatggtccccgcatgggagctcgacatcatcaatcaagtgcgacggagtttcctcgtcctcgtcgtcctcgatgtcggaagatggctcttgagggacgagaagtggaagcgagcatagcgcacagccatcagctggagttgtagtcgctctagattttcctttgaggtcggccatgatgttttggtgtcgtgtgtgtttgtgtatacaatgagcaaaagatagtttttatcaccagacgaaatttctattatttttgcttttagtaaaatgacggtctaaagaaattttgaacatcctataacccaaccatcgtcaccatcatctcgacacatactttccaaacgccatgctctatgttattggcctcggtctctctgatgaggaggacatcaccgtgaagggtctgtcagttcgtccacctcttcttcctctggctccttcgcttattgtcttcataatgtgatgctgatctctccgcccgtattgtgaatgatcttcaggctgtcaagaaatcggaaagaatctacttagaggcttacaccagtatcctcatggtcgacaaggaaagacttgtgcgtccttttatctgtttcctgttcattgttctgtctggctggaggctgatgatgtagctttcttcttgcctcgttcgtaactatgtccgcccatcggctctcattcgaccttgctcttacaggaaaagttttacggaaaggaaatcatcctcgcccctcgagagatggtcgagatggaatctgacgagattcttcgtgatgccgacaaagtggacgtctcgttcctcgtcgttggtgatcctttcggagcgactacccacaccgacctccttctgcgagctgctcatctatcgatccccacccaggtgatccataacgcgtccatcatgaacgccatgggcgcgtgtggactccagttgtacaactttggtcagacagtttcccttgtattcttcactgatacttggaagccgacgagtttctatgatcgagtgaaggagaactgggagaagggaatgcatacgcttgttttgctcgatatcaaggttagagaacagagcgaagaaaatatggccaggtttgttcctttctttctttgcctgcacctttttctttcttcttgcctttgtcgcccggaacctcatcaggctctcatgattctcttcttgtcaattcctgttttggtaaaaggggtcggctgatttacgaaccaccgagatatatgtcacccgcgctcgctgtctctcagctgattgaaaccgaatccatccgtgaagaaggttcattctcttcttctcgctctgctttcacttttctctttatcttcatctctgtatactcaccatgtttctcgatcatttctttgtctctaggcgtccttcctccttcagaaacactggctatcactctctcccgtctcggcacatccacccaatccttccgagcaggtacgcttgaacaattatccacgctcaccgaagaagatttcggtggcccgcttcatagcgtcgtcattgtcggtaagagggttcacccgttggagattgaatacgcgggacagtacgcggttgataaggaggagaagggtagagagggtgaatggtttagagtcgccaaggacgtccttggtgtcgagttggagggtgaacactagatacgtatggggtctctctctcttcatttatcttccccttgttcggagcgtagataccgaacttgaaaaccagatccgtgccgtgcgaaacgtacaatcaaagaagacattcaaaaatatgtagtaagaattagagtacatcttccaacaccattgacaatcaggacaagacacagattaaggaggaaaaacatagaaaggaaccaggaaaagagagggtcggaaatacaacgtttcgatatctttatattctagtgctaggaaaacaaggctttcacttaactaggttcgaagagggctgatggcaaagacagaaatatagaaggaaacgagacaaaaacgaaagggaaagggagagagggcatttaaccacagtctagatggatcaaacgaaggaaaaaacaagcgtcagtagagtgaaagagttagataacaagaaatgagcaagaacagaagcccacgtacattcgttgagaatacatcccacagccgttccgtacttggatccatcgatgttaaggatgacaagcaaagcggtgatgacgcctccaattccttcaccagcaatcataccagcggccagggcaaaaccccaaatttcccaggtggcaggtcgtcgtcgttcccagatcatggcgatgatgcaaccaacagacatagcaatagcatagtagactgttgaaagcgcgatacgtggtaggtagcaagtcaacatacaagtgcttcgcgcgatctgtccacaaggacactagcaatcatctactcaccctgaggcacaacgaaagccagtccaacagcgttccagtttggaatccagatagcatacctggggggagcatagaatcgtccgatgtgacacaatgctgtaagtacgaaaggacgaccgttagtcttgagaacgatccacgattctgatcaatgataaatacaacaagactcgtaccagcaacaacggcaagaccgatagcggtcattccagaagaaagagtgacgggaagtgttggggaggatacagcgatagctactgctttccaggcgctcacggcgggcaaagagaaggggcaggtatcgatagtgggatcgttaatacaagggtaggccttggcaaagaccaagaagagcgcaggagcgaaagcaaaaccagcggtacttccagccaactgagcccagaactgagctcgaggagaagctccaatcaggtgtccggtcttgagatcaccgacacaatcgacagaatgagctgcggattgaccgacgacagatccagcaatgagagaagttcgctaatgaagatgagaggaaaaaagaggcaagttagatagctattgcttcaacacggggaactatcttctgaaacatatgcaagggcgcacctgagccgaagcgacgctgatgccctgtcctttagtaacacctccaatgatcaactgtccagctttggcgatcactccgatagggttggtatcggtgctgtatggatgcaaatgatcaacatttgactttcgcggtcttcccgaaaagaaaagaaaagaaaagaaaaagaaaaagaagaaacttacgttccactagcgttgactccgacgaatgcaaagacaaatcctaggatcaaagcgaggaaagagactccgggattaaggccgaactgagagttgagaaggcaaagggctcataatgcttagtaaaatcctgtacgattgaataagataaggacggagagactcaagcacacctccgtctttccaacgaccatagttgttacgaccgagatgaccataccaatcatccaggttcgagtagccacctgttcagattggggggcagggtcttcagaaccttcaggaacgatatcggtgatgtgagacatatcctttcctcgcttctctccaacggtttttctatataggggatagcacggaaaaaacaaatttgataagaaccaaggaaaaagcggtcgttgaacaagaaggaaagaaagaatacacaacataccgagtgttgttgatgagctgtcggaagattcgatagaacattggagcctgaaggaacaactcagtgaaggaggcgatcaacatgacaaggactccaggccacagaagccagctgaaggaagatacaagcaatatgatcgaaagtcatcaactgataaacttaggagaaatacgaatcaagagtgtacgaaacaaacatactatcgagcagttcctctgtgaggatcagttgttccattagccaaattgaccgtgctcattgcaaagttgctatggtatccgatgctctcatcgataacaggcgagtaagcctgcccggtggccacgagggagggaccgatgatggcgtatgagagaatggctccaaacatccaagagaaagcggcattgggtccagtcaagaagccgacggcgtgaaaagcaggagtgaactggtagctccatccccaattggatagagcaattgcgccgggtgctccccattgggagaagagccatccaaaatcccatccccacaaaattcccggagcgtatttagtgaggaccgtccagatcaaagaaaatagaaaggaaaatccaaggatcttgatcttcttgctagaggcttttcgagcggcgggtgtagaagccgaatgcaagtttcggatggtgaaggcggtggcagttggtgacgggaaggtcagcttttgcttaagaatatagtactttctcagaggcatggcgaagaagagaccatagaaggcagtgatgaatgacagggcgataagcgatccgatgtctttctctggagttgtcagaagcccaagttggtaaagggctacaaaaagatggcgcagaagaacaatgagtggatatcttggcggatagagacgaaagaaggagacaccgcaacctaccaggcacggcggcaacgaagagaccggaaagaccaccagcagatccagcagcagattggacagtaacgttctccttgggaccaaagtatcctccccccaatcgagtaggcagggcgatagacaggggtttcaaaatgctacatgattgaaaaagaaagggggtcagaggttagcgatcaagaaaccagataaaggtgaccgaaacgaaagtaagaagcgtacgcaaatcccacgatggatccaaatagggtggctcctaagaacatacaagatgtcaagtgatatcagcaaacctgttcgataaataagaaggagcttagcttctgaataaatgacttgccaaaggtaaatccagttttgagacccaaatacacattactagctccaacaatgaagccaaggacggttccgacgaacacggctcggaactgatggacattggaaagagagaaaagaatgatgagcaacagaagaagaaataatgagatagaggcatcaagaggtgctgacagtcaatgtctgtccctctacgggtgcattagggtcgacagggaaagggtttccatcctgtacgattggtcattcaggaacaaggtatgaatttagtcgtcaagtcccaaagcaagaaatctttgcgagatgaaatagggcagaacaactcacattgagcagaacgatgttctgtccttctttcaggctgaacacatcgttgtcgaccggatgtactttgtcttcagaatagtcttccttcttctcaacgtactcgttcgaatcagaggtggctaagtggtgagcttcatgcttgtgaatctcaggaacggacggatcgttccggtcgatattggactgttgaaacccagtgccgagcttaggcagggaaacgatctcggacatggtgcgcgaggaggtgagtggtaccgatcaagagtgaaatgaatgaaatatctagaatagagacgggaagaaaagagtacaacgaggatagagattcgaagagcgggaagaaaactagtctagcatcaagacaggacgatagcgatcttttaacatagatttcccacagagaaccgtcttggagtcatctcataagaggtcgatcggccaatcagtcggctagtcagcgagagaaacttattgggaacaaagcgagagatacgaagaacaacaacagagatagattcgtcgtcgacggaatgccatcacgcctcgaggtcagttatgttagcaaaggaagagagatatttgcaacagaaagaggagaaaaggaagagacgaccatgtgggttcaaaatcccaagaaaggagataaattcagaagacttcaccatgtgggtcaagatgttagtaagactccaaggtcattatgtcaacagccgagggagagaatatgtagataggcggaagttgatcttgacgataaatcttggaaattaatctcggcgacgcgtcttgggcgtcgagcgccagttgccaagaacactaaaaatgcttgtatgatgaggcgatccggtggctcacattgaacacacaggaggtttctccatttgatgcgtgcgcgcgcggaggctcggtatttttatttttatctggaaattacacggcttatttgaccaaagcatttgatttgacggcaatattccccagctgttttggaaattacggttcaacgtggtgtccgtctggtccggagaagtccacctgtgtacatctcaaagtccatgaacactattgaagactcatcagatggattgttcatatctctgttttagaacaaagaagaaaagagtcgatgtatatcgaattgcagtgacctcaggaggatcatctttccgcttctttagcggtttgtttgtgcgtaaatatgcttatacgcccggctctacccatccttttgtttggatctatattcctccgaccgtatttgagattgatctggtgttgtactcatcctggcctttttagtctctgatgagacttaattcgttacatgcacttacatatacctaggttttatgctacttctcccctcggtgacctcctcggctttgactttggtttcggcttcggccttagcctgctgttaatctcgactgctgagcacttgatgatcaaatagcctcgagggatctatgaacctaattggatagatcatgttatttttgacttgacctaacataataaccaatgatgaatgacgtgcaccaaaagaccatgtttggaagtgagaaagaaataagaaagaaaaggaagaaggggcggagacaatataagcccatgtcgctcgttagcaaacaagcaccggttagcctgacgttttcatcttgcttcttgttcggtgaacgagccatcaaaaatgttcccacgcatccagccaaattcatccaagaatctgagagccaacctggatgctgagcccactaatgagagctatgtggtagatacatagaaaacaacacatgggcataaaatagaaacgtagataggaatacaccgctcacttcttctcaaacatcttcttgatggcatcagaagagtacgacttgggtcgctcaaggggcataccaagggctcggtcccagatgagctgggagaccacacccaacgtcctggaaactccaaacagaacagtgtagaagttctgctgggtgaaaccatagtgggtgaggagaacaccagagtgggcatcgacgttgggccacgggttcttggcctttccggcggcgagaaggatgtcgggcacgagctcgtagagctgtccgacgagcttgaaaagcttgtcatcaggcaagtgcttcaaggcaaactctcgctgggcagtgtatcgaggatcagtcttcctgagcacggcgtgtccgtaaccagggacgacctgtcctccgttaagagtcttccagatatactccttgaccttctcatcagatgcatcctgtccaatctccttctgcattcgggagacccagttgaggacctcctggttggcaagaccgtggaggggtccagcaagaccgttgagggcagccgccatggagaggaaaggatcagaaagggcggatccgaccaagtgtccagtgtgagcagagacgtttccaccctcgtgatcggagtggatggtcaggtagagtcgcatgagctcaacgaacttctcgttgtctccgaaaccaagctgagtggacaagttctgggagtagtcggccttggggtcgatggcgggggcgtttcctccgccgtaggtgtttcggtagattcgtccggcgatggcagggagcttggcgatcaagtccatcgagtcatcgaaggtggtctgccagtactgcttcttgttgattccctcctggtaggcctgggcgaaggcggagtcgtggttgagctgtagcgagacaaaggtgataggcaaagaaaaagggataaagggtagtcagttatccgaacgaatgtagctgtcaggtctatgaacgacagacaagactcacggcagtaacggccaaggagagctgagacatggggtgaagggtggaagggcaggcatcaaggagatcctcgacgaacttggggatggaagctcgggcggcccagtcggcagagagctcggtgacctgctcctgagtggggacctcaccggtaaggagaagccagaaaagagcctcggggaggggctcgtttcctcccggagccttaggaagaaggtcctggcactcggggatggtctttcctctgtagagtagcatcgtaaactcgtcagtctgagttatatgtgtgtgtgtttccgatgggagggaatcaagcttaccggaatcgaataccctcatctgattaaaagcaaatcagagaagacaagaaaagaaggttgacgggtgagtaaagatgaatctataacgacatgttgaatttagatagattacctaccagcatcaaggacggaaccttcagtttcacaagattttcgggcgttagtgattcaagatcttcaaataaataaaagagaggatgaaaaagataccaaccctcccagatcatgccctagggaacggaaaagaacaagaggtgatggtctgtcagctttagtcacaaacgaagagaaccatgggtggacgcgtaccttgatacctcgcataccactaaggagaccgaaagggttgggtatgtcagtgaaagctgatgcaggggataggaggaaaaaaatcttacccgtaagcctggtcgacggtgtactctccgaagctcttggctccgtgagcggctcggatagccttgacctgaaggggagagatgaatgtatacgagatgagatgaggcgagatagaaagagatcagccaatgagcgagattgctcggtgtcattcactgagcatttcattcgctgatgggccgcgaaagccgcaagatgaaacgtacgttctcaatctccttgggaatgagctcggcgagggtctccttaagggtctttgccttagcggcgtatcctcgagaaagtcgaggaatagcagacttggatacataaataaataagaaacgagccagaagacaaagtttgagcgatgcgaaataagtgcgatggggaaaagcagggacgagagaaaaaacccttgtcagtgatgaacaaagatgaaaattcccccatcaaacaatgcgatagagatcgaagaagaaactctcacctgagttctaagaagggatcgaagggaagtggaagccatgatgaacagtgtataggctataggttttactgaaaaagagaaagaagacgatgaaggtagtagtggttggggaggaggaaaagaacagagccaggaaagacagggcagttcagggcaattcagggcggcattgagtctcctaaactcggtctctcgtcgtaattactcttttcacgattggaaggacggagaaaaaaaagcgcagccatgacatacgcgcagtaggattttgaaaaaaggcggagggccgtgtgaagcaagctcggtgctcctccctggttttaccgggaaagccctgtgtgcctgggtccgccggctcaggtacgggtgaattcgggtagatctgccggttgggccggatagatgttgttctgggattttcttatgctgccctatgcgtttgtctcctcatctatatttctaggttcagagctcatggagggacttgtctcttgtatcgatgttggtcggttagaatctagccagttcttggctcgagtaagcgctcaaagacggaaggagataggcagagcagtcattcgtccagaaaagaactccgactatgacggtctttaaagctcaaggtcgagcgagtagtcgtgtccgacaaacatcggatagattctttggtggaggagcgtctggtccatcatagaggattagatattgagtttctaatggtcgactgatgccctaagcacaattcttctacagacgacaaccaatttccttttgcttatcaagtcatctcgctcagatgagcatcttggtgccattcaacaagaagcagctctaatagtgagatctgattgacctcgaactcagttggtcaccatgtcaaatcttgaagaaaatatatagttgcagttcaagcggcaaacacctgagattactttccgctccgcataaccatctcacttgtctaaaccccaacataatatgacacctgcaaacgtccctgttccgttcactgtttccttcgctcagtatgacgtcgatcgaatgatggccaaggttagagacaccaggctgcctgctgagccgatcgtgccgggtgcatcctgggactatggaatcgatctcgaatggctcacaggactgaagacaaactgggcggatcagtggagctgggcagaggcagaaaagaggatcaacaagtcagtctggttgctaatcttctgactccttactgaccaagtcttcagcgtttcttagctcgctgacgtcctgacttgatatcactccaagatattcacattttcgtgtcgatatcgaagaaatatcgctacactttgtgcacatccgatcgagccggccggatgcgattccactcattctatcacacgggtggccatcaacattcttagagttctgggaggtcatcgatggactcgtcgaaccagcagagtctgaacagcctgcgtacgtgtgtacactgggttgagaggctgccaagcccccttggcttgtgatactcacctttgggttccatcattccacgccatcacattgcgcttgtccgctgtgttctttcatatcacagtttccacgtagtcatcccgtccatgccaggctatacgttttcttcctccccgcagagaaaaggatgggatgtcatggacacagcgagagtatacaattcgttgatggttgaggtcctgggttatagtaggtcattacctctcaaaattccactgtagggagtgcaccttcttatctttccaccgtcaaatgccttgactttcttctcaaagaaacctatagttgtgcagctggagattgggtatgtcaagacgtctcagattctatgcgctcgttagactctttaaggtttttccctgacataccatttacctaatagggtgctaccatcaccgtcatgcttctcagcaaccatacggcctctgctcttaccgcccatttcacctttttcttcggccttcctaatctattgaacccgatccagacccttcccgccatactttatgttactccgttcgtccccagaagtatcagccggtgtttcctctcttgggtgtacaccgatacagagattaaggcaatggatgagctgagtaggttcaataaagaggagagaggatatcatgccatccagggctcgaaaccgatgacgttagggtgcgcgttgtacgatgacccgattggaattctgtcctggattggagaaaagtatcatgtttggtccgatgtatgtatattcgggatctcctctctcgtgcaatgtgcgtactgaactgttgacggggcatcgctaatgactgatttctgtactggtcttacctcgtctcagcctcttgcgccagctgctccttccaagattgattccgactacatcatcacccagacggccttgtactttttgacgaactcgatccacacctcctttctgtatgtacgacacttcgtatatctaccctggcgcgcgcttatcttctgttctttccgttgtgtaggccttacaaggagtacattgaggatctcccgtttaaaaagttctttaccaaagccagacctgtcggagtttccaactttcctgctgaggtcatgtacgatttatttcctctactcgcgcggtgtacgattccgtccttgatggcacaaataagccaacgtaaacttttgagcgaaacctttggttcacaggaaatgtcctaggacgtggctcgagaacacatggaacctggtgaactacaaggagcacgctcggggtggacatttcgccgctgttgacaaccccaaagcttttttggaagacgttagggagactgtgagtgggccaattttctttttctctcttttaaaacgaaactttcgaaattgatttgaaagaacattcactcctgacacggccacgctttgatcaatccgataaagatcgtcaaaggatatttctccgagttgtccaagcagtagagtctgttgaatgtaacatcctaaacacaaactgtagcctgcctttgtctaggtactcagtagaaaacgttggtatattcttctgtcttctccgtttcgtctcgtgtttttttcgtatttctcgtcttcatgatctcgtatatacgatggctagtttttctcttttcttttctagttctctcgataattttgcttacgccttaaattgatgtgcagatttgtttggaagaatcaggatcagacgttgaggagattggaactgcgtctaagtaattacttcaacaaaccaacacaaaaagctccctagattcatcagaagctccgtgtttgatcacacttatatccttcatcctaccgggaccctacttgttaatagttatgtatacgtgaaacttgtgtagccaacatataaaagaaccggctgcgggttgagtaaagttatggattaaccctaactactactgctgctgatgatagaacgcccggtgttttttttcactggtgacacccgaagggtacacttcaccttcttcaatcactcttatcctcccttctctttcaacgaggagtatacgcttgcctagagacggacgtttcttgatccctcataagctgtagcagactttaaacaagagacgaccatcagcatggctattcttttcgcgctccctcgccccaaggttttcctcattatcgcgctctccctgctttcgttcactttgctccttcacccagcctctcccgcatcgtatagcagaatatacagctacgtccctagcaagtcatctggatatccaccgaacctacccgatagaattaaaggcggcttcgttaacgataccctcggcctcggtgccattccagatgctggcagctgggaagataggaggaaggcaaacgcaacgtttgtcgtcctcgctaggaattcagacctatgggacatcattccttccattcaggtgaggtctctctccattttgttctcgcaagacgaagagaacgaaaagatctttggaaaggcacagatactaatgcggttgatatgtcgtcggacacctctcgacgggcaattccttacactctagcaaatggaggacagatgtgagtgccctttagtatcacacattggtcttgatacgactgagttaaactaagcctcaaatatttttgttcgtcatttccctgactgttctctcgatagttaactggtgggcaggtgtgtatctttctcatttatggctctctgtcttgctcgcatcctcaaagagtttaaacctcttctttgtcgaaccctacttcaggctatgactgggtctttttgaacgatcaagagttttcagaagagttcaaaaagtagatactctttcatatatctcaagactcttccgtcctgttagctgtgtagagctcatagctagtggactcggcaaagaatgttaaccgttcaactctacttatttagatacactcagcagattgtctctaccaccgcccattacggtctcatctctcccgaggaatggaaccagcccgactggtaagatgtttctgccttttccactgggtgtgttcaacacttcctaatctcctcatatcgacgtccgggatctattctttctttatcttttaggatcgacgagaacaaagctgctgctgctagagatgacatgtttaaacatgttagtcactcgcgttgcataccatcgtctatacacactcttctactcgggactatactgatgatcttttctatatcgtgtcgtatagaacgtgtaaggagacgatcaagtctttcctgcttctgaagaattgattgtctaatattcttctttttatagtatttatggaggctccgtcccttaccgaaacagttcgttctattatcttcgatcgcgcatctggtctgtgtgaactacctagttataacacgcagagggctcaaaatgtattcctgttgcttaattttagtgtgcagatataactctgggttcttctaccgacacccactcatgatgaactaccgatactactggcgagtcgagcctagtgtcaagttctactgcgacattcactatgatcctttgtgagttcttgtttttcttttccctcataaacacttcgcgagatatattgatctgattttggggttccttgtaatgacagcttggtcctgaaggatgagaataaagtctatggtatgagccaaattcatccttctctatctctatagtctgcagaggatatcaaattgactctatacgacttccacaaactaggattcacactttctctatatgaattcaccgagtaagctctatccttctttacactatacaactcatccagaagcgcttccacttacatgccttatacattcattttcaatctcttaaatagaactattcccacactgtgggacgcaaccaaggagtttatggagctccacccagaacatattgttgagggcaactcgatgggcttcttaagtgatgacggaggaaaggagtacaaccattgttcgtagttcagctgtccgaccgtctgagggtttagtcgtcgagcgattccgttctcatactcttctctgttccgtctttatctgatcgcaggtcacttctggtccaactttgaaattggagatcttgacttttggaggggaggttcgactcttttccatctgaatacaactctttgtcatggatgatcatagcatatgctgacgttctgtctgaaaatattgaaatcgacatcaaacgatgtttcggcagatgcatacatggactactttaacttcgttcgttcctatttgccctttgtttgtgtgtatgtgtgcgcgcgcgcgcataaagatgatcgcttactctttcttcattctctttctttttcaaatgatcgatagcttgaggcaaagggagggttctactacgaggtttgtcctgcctgcatctcactatcttttctgatcgattttcgcagacaaccatggttgcattctgaacactccttcttgttgtaatttatctagagatggggagatgcccctgtgcatagcataggtgctggtcttttcgccaaaaaggaacaggttcacttctttagcgacattggttactaccacggcccatattcccactgtcctacaggcgaagcccattcggccggcaggtgctcctgcaaagaggaggacaactttgacgaacactggttctcgtgcacgaaaaagtacaaagctcaattccccaacgagaaattctttggatctgaagcttgaagacaacgtatcggaaattataaaaatcaagtctagaatttctctttctctcttgccattcatcgtcttgtcttttgcggggttcaagttgtcttctgccttcttcttcttctttcattatacggactatcttctccttcttgtctctgtcaatcttatcaacctcatcgttcctgtctatttcttccatacatttcctcaaccaggatatgctctccactctcactcttctttttgcatgagcttcatccaactccgtcataaggaaagaagaaaacgaaagcaaactcaggtgtagtctctcggacttggtagatcatcgttttttcatccaatctctccacagagagaaacaatagacttgaagcttaaatgaacatgcataaagagatacactcgagaaaaaacaagggaaaaggtgaaacgtgaatgattcggatcgttcatagaagaatcgggatttatgacaagtttgtctatgttcaattgggagtttaccaagaaaagaaagacaagagaggatgagattcatctttcgagcagagaatgaaacaaagataaggtatgaagtgatgagtgaattcagaggacttacaaatcgtttcgtacactgaagaatatggacgaaggagttttgcaagagtcttgtcagccaacaaggtccagaggaaaacgtgagtgttacaaggaaaaacgagatggacggaccgagtaccattcccagtcaaagttgtcctttctatttgtttgcagaaacgggtaaacaactggtcaacctcttacacttctctttttttgtttgcccttttttccgactaaacgactaagacggaaggaggaaaggacgaacgggttacatgaacatttccctcgagtatgttcttctccttgtgggcagtgttggaatggttctatcgatatccaaagtacaactctgatcgacatcagccgatgcaccgaaagatatagaaagtatgtacacaaataacgagaacgaaccatgtcggtagccaatatcggagaaccaaaggatctgctccttcttagcgaacaaggcggctccgatagaatgaactgtatcgtgttatttagtcgaaaattgcaaggaggccaagataacgggatcagagagaaggtttgagaaaggttagattttgttagggaaagtcagagatagagagaacatcgaacctggagcgtctccccatcgttcgtagtagaacccgccctttgcatcaagaaagtcaaagtatgcctggtacggctcggaccgccagaagttgaggtctccgagctcaaagtttgaccagaaatggcacttgaagcgatggagaagaaagagagcaagaggaataggtttggttatcaagttttgtacatatttagagtcgaagaaagagaagaagtttttcagaagaaagcaaccaaaactgaactcaccaggttgtagctaaattgacgtacgcgcatccaggctcaataatcagtcaaccaccttcaaaccctcgagaagaatagaaagaatggccacttactgggcaccgccgtcgtcacttaggaaagcttctgcgttgccttctaccttgaggtccggtcgactcttcataaactccatggtcgcctgccagagcgtggggatcgtctcgatgtattcaagcagactgagagtaaacccgtacactgccttcttttgcttcatcaccaggaaagggtcgtatgctggaatggttgttgagatatgtaatctaagctgagaaggcggccaagaaataagacgagaagaaacgagaagaacatacggagatcacagaagaatttgactcctggttcgattcgccaataataatcaacattggctagcagcgggtgtctgtagaaaaactggaatatgaatcgcgcgcgaagttactcgtcaatagcaactcgcatagtggtatgatgcggaacaaccgtccgttcgagataactgactccagaattgaatcggcacactgaaagatcgaataagaaagataggtcgatcagaactcgaacagccattttcttgcttagattttcgaaggaaacgcactgtttcgatacggaactgaatgctacatgcgagatcgtgatccagaattaccatcaaagtcgttaatctatcagtaagaatattttcacggctgagggaagaatgacggataagacgaactccatagatgacttttttcttgatcatttcttccctagcagcagaggctttctcctcgttaatcctgtgtatgtgtgtgtttgcgagaaaggtctaggtcagaaggggccatttgatccaaagagcgaaagtattgagacggaccaagaaggctgacgccagtgatcaggctcaactgttgataatcatgtgtatgtgtatgtgaggatcggatgcaaagaggatcagcaaagttatgctacaacaagagagtgtaagagatagccaatatgcagaaagtgtaggaaggcacagaaaagagcgctcaactgagtccataagagcagcgcgctttagtgagtccctgtgtgtatctgttgatgtacgagcgggaagattttcgtgaatcagcatacttgacccagagatatactcaattaggggaagagaggttgagggcgtactgtttgaattcctcgctgaagggctcctcgttcaggaatacataagggtaattagcccctttacagttttatcgacgatgtgtttccctcatctgttagctatttatatcagaacgaacagctgatagaaggatgagtatgagacatacaatggttgaaagctcgctccatctgcttaatcgaatctgccaacgaccacagatccgagtttctggctgatcaaggaaagtcatgatgattcagatagcgcgaggatcagccaggtagttagagagaagaaaacaggcaaccaagagagaagtaaatagaaagagagaagaaagtaaaaaagaaaaaagaaagaaaggaaagactgtgcgcaagcttacccaaaatgacaaaggccgcgttaaccttttcaccacttctggtgacattcccggccgcactttc

SEQ ID NO: 1090 - DNA, 22404 bp, Xanthophyllomyces dendrorhous
gcactttcgaggtccctccaggtagacggatgaggtttgactccgccactaccgtactttccgtccgaagatttgcttccagcaatcagaccagaggcggtgtcggcgtaaccttgatggagtgctgagagaagaaagtgaaaggcaaactgatggacgtgtgaccggtggttgttagttgtcagtttgccgggaaggaaggtcaagccatgtggaaaaccgaggatagaacaaactgaccaaagagagaaagatcaaagggatcagcttcaatggcgatctgagggacatcagaccaaacatgagtgagcagttgtgagagacgagttcgaacgggttgatgaggtttggatgtatggctattagagagaaggtaaagaggaaccgcggggtattttgggggatgatgcttatgtaatagaagtatgcttacataagccatcggtttgttgcaaaggtctttgatgttcgttatcatcttatctcttgatctgaacaaatatatacacgtgattcaccggccatttgcgacgctcagttagctgttggcttgctctgagagaggaggatgactacgaggtgaccgagatgtaattaagcacgtgaaggagagaacaaagggccagggagagagtgggtacagagactacaacagagggagagagatagacagagatggacagatggacagatcgggagccgatcgggtacgaccgaagaagagtgcctggttcctgatcttcaaattcaaaccccgtccccccttggttactgactctttggtagaagagacatgcatcaggtaccgagacagcgcgaccatcaaaggaacgttgcatgtccgagatgacgggccgccagcactggggatgctttggaaagagctaggctcgccatgagaaggaagatcaggaacgaggaacgaggagcgtggaacgtggaacaaggaacaagggacgcgaaagaggcactagcaatatacatcataccgggtaagataagaccgaaccaattcgagaaggatcagagattctcttcttcttcttcttctactcaacatgcactcacccgatcccattcctctttcaaacaacctttacacaacgtcgcagctcactctcgccattgattcaggtcttacttccatgtctgccttgaacactaccgcattggccttgccaaacacatcctataacgggctcgggatggtccctcaaatgggatgggtcagtcggccacgcaactcatatctctgtttctgtctctcaaagactcatatgttcctgttggatctttacatcatagaactcatggaacacttttggatgttccatctcggaagatatcatccttaaagctgcacaggcactggttgacagcggtcttagtgagcttggttatacatgtttgtaccaatctttcgatgtatcaacccgagaaacctgcagataaaatggaaatgaaagagcaatccttcttgattgactgctgtagacgtccttatcgacgactgctggcatgcttcggccaggcattcggatggtagaccaaaagaagacccaacaaagtttccccgaggactgtgagttactccgatcatctgtatcttcagacccagatctcaccgcgaccggctcaactatcttcttaacaattgcgctttgttcaggagtgctctggtggatgatatccacaacctcggcctcaaggttagtgaaacctactttgatctgcttccaattccttctgtagctcacctcaagagattctcgctctgcttctattcaggccggaatctactcatccgctgtgagccttagctttacactcaattcagtaagacaacgactaacatttgtgcgctcatctagggtatctatacgtgcggtctcgagtttggttcgttagggtatgaagagattgacgctaaagcctatgcgtgagttacatctatccgctaagtccagcatcccgaccatatctcgatgttgaattgttccttcttcaccgaatgttatgctattgcagagactggggtgagtttcatctgaaaccttggtttacaagtagagagacgatgtgtgctcatgggtttcctcaacatgtcgatcaaaaacaggtttcgattatctcaagtacgataattgtttttctgccggccaatttggaacagcaaaactctcgtatgacaggtttgtccctctgcgcttccttcagacgattctcaatgcgatgcacaattgactatccttggtactacagatacaaactcatgtcgaacgccttggtcaatacgggccgggatatattttactctgtatgcgttttatacctcaatatcggactgatgccgagcaccctaaccctctctttcctgtctgatcttctagatatgcaattggggacaagatcaaagtgcgcacacgctcttcatttgggcggatatcaataatgatctaatacaatttctataggttggatgtgggccactacaatatcgaatagctacaggttagtctcgcttccatcctcctttttacccctcgtccaaagcttatggttcgacctcttttttattctgcagaatgagtggggatatcgacgatgtttgttcaaacctcgatctttctaacttgttgtcactaccgctgaaatgggtccacctctcacatctgttggacttgatcgcaacatatagacattcaatcagcagaaagattggtgtcctttcgatgtaagtcatacatcttccttcgatcgcctacccggatctcaccaatagctcatgtgtcttctctaacacctttaggccaactcgaatgccccagaagggcacgggtgctcgatcgccaacatattagagaaagccagtccgatcttgcaaaagcaggtcagaggcaagtctccttttcagttatatattttccatacagagatattcacgaacgaggacttgacgtcttttcttctgctctctcctttaggcgcttgggccgacctggatatgttggaagtcggaaatggagtttgttccgaccttattcatcttatgcgcccatcgttatgtgttggacgcactcaagactaatttgttggtttggaccctttctatagggcatgtcaaccgacgagtatatcgttcacttcaccatgtgggcccttctcaagagcccgttgatcttggggaatgatcttacgaatatggttcgtttcatcttgtctcgctcgtcatttcagacactaaccaaattaggatcaaatcttctgatgtaataaggacgaggtcgccaagaacattgtctccaacaaggctctcataggtacgttcatatcttcttctcatccttccccaggcttatgggctcatttcctgttgtttgatcatgagcagccatcaaccaaatcatgcaaggaagcgcaaatcctgctcaacgagtgaaaggaaagtttggagaggtccagatttggaagggcagccttcctgacgggtatgttttattctttcccttttttatactcgatcgtattgataaaaccggaaagtattttgtctggttttatttgcgctgtatgagagaacagagcatacacagtggcaatcatcaactttacagatgaggatatcattatggacgtcttattcaaggacatcttccgggatgatggagagaacgtccaggctatcaagttcaaggctcgtctttgtatttatttctttgtctttctttcttttctatctttatagtaaagcaagcgctaacccggctgacatcttttctttcgtcgctcaacttcaggcggtcgacctatgggcgggattcttctattccaattccgaggacaccgcattcggaagtaacgatttacctgacacagtgtctgatcaattatcccagcttgagatccgaaagcatgccggacgattctgggtgttcaagcctattgacgaggaagaggagaagaaagttttgatcggaaagtataacatgcaatcttcgaggtctgtttagacgggtcggatagataaatttggattattgtcgagttgcaggcaggtagagttcccgccctctttcttctctttttgaagccgagatatagtctttagacatttaatcttcaaccaagcgttcttaatgcccttttgctctctttcgcattgtatataatatgtcaaaaccatatatgggtacatctgttcatccagcacaacactctaggattttaattagggcattgactcgcccttttcacatcaggttcagaaacaggagattcatcgtgagaaattattgtttcctctagaaatatgatgtaagggacttaccagtgtccaacttcaaaccgttaggagaataaccagaaacattttgttcagctatctgaaatcgagcaaaaagaggaaacagcacaggcgagggtggaaaaggcaaagaaagcggaaaaaaagaaacaaaaaaagaagatatacacataccattatgacatttgtagcattctagaggactcgacagacgatagtatcaatcaatttaattggtcaagagaactaatgtgtcccaagttttgggcagttgaaaaagagatgaagacgtaccatctggcgtgctcgatcctcctgcgcccctgccaactcctgctcctgctctagaaccacctcttgacctgcttctggatccatcttggttggcgttgttactgaaactattattgttagtattatcgtttcctcttccaaatgatctaccacctcctcggccatctcgtgcatactcatttgggcaattactcgcccaatgaccgggttggttgcatttgaagcattctcctgtcgtcccacctccgttagtcggaccgcctccacggtcggatgaacgattaggtccactcctgatactcccaccaccgccattggccccgcctccattaatacgttcgtcgtcccattcaaagaacttgcacctagctgcttctgaattaggacaaacccagaagactcggcctttgttcggtccctccttgttcaccgttcgttgtacagctgtcaggttacactggcaacgaagaatatcacctctattgctgtttgtcctctgctgttgtacaggacgatggtttgatggctgacaatatttttccacaaccggtagagatcaagtatcaacatatttgttggacagcaagagacgataaaagacacatactgctatcgggcccgactgtctttgtggttcccccgatacatcgtcaatccactcctgaagttcgtttaacgccaatcgttagcctgtcttgttatcattctcaacaaggaaatccatgaaatgattttctgactcacgaagaacccacatccttccccttgaggggccgaacatgcccaaaaccttttacccttattggcagtgtctcgtaatactgtcctttccacagctggcttcatacaaccacatctagttgtcgacgattcggaagttctggttgatagtccagacactcgagaccctgaagccccaccaggtcgaactgatgtagtgccatcctcttcgcccgagccttctttgtcttcgcgtgcggttcgcgatcgtgccgatacattaccagttcccctgccccgcgtggcggacgacgtccctcttcccccgcgggttgttctagcgctaggaaaagacgcgcttcctctcgcacctcttgtccctcttgcctctgttcctcgaccacgtctacccctcaacggtgcactacccgggccaggtctgtcatgattatcatcatcgtcatcgtcagacctgttgctaccatttcctagatcattggaagtgccccttgtaccatcattaccagtttggccggagccgtctggtaacgtgaggatggaagtccagttagtcttgctgagtataaatttgattgtatggttgggaaaaagaaaagaaaaatgacatgacacctaccatccctcagatagcgtatgactacctgtactcatgagcattaaaaattggtcaatattcagacaaactgtcttctgaacatcgagaatatcgagaacataagaacgtacctcagttaacactctcatttctcttttggcagtgatgaaaacctctttatattggttgagactttcataaagaacatcattcttgttggcgattccatcacagatgagctgcattctatgttccgtctagatgtttgaattttaccgaacccaggttatgatatcatttgatgagccgggtcatataagcgtgaatatacaaaacacatcggctaaagtggagtgcatagtggaacagacagacctcgcgcctcaaatgaggtttgcaaactgatcggtcgattccaatccgatcccaaccttctaccagcgcgatccctaagttcgaaggaacgagatacttggtttgaccctgtttctgctccatcacgtattctcgatcgactactttggatatatgttcagcaatagtcgcgtccgttcctgtgatatccagagtgattttgaagacaccggcgttaacttcatctgcacatcatatttcgctcttccatggtgttctgaataataaaggaaaacaaaactgaccaactccattttggtccatcagggtgactaagtcggcctcagtgagtaatgatggcgcagtagtatggccctccttgagctcacaaatggtgggaacgaatgtctcgcctaactggaagtcagggatctcatgtgtggcccatttgtcgtaaggatacacatccaaatagttttttgctagtaccactaggccttttttgccgtcaagttgagaataagagaaagtcacgctcgcaaaaacgagtcatgacctgatgtcaagaagttgaccaagaagaaaatagtacgtaccagatgcatggaacccctcgcttgagatctctattccgaccgtcgtcgtccttccttctgcgtcttttgaacaagcagccaggaaccggcgaacgacgaaatcatacactcgtttctcatcccctacaggaacattcgtccatgctgtcgggtgaattggtggatgggctttatcatttttctttccattccggggtgtagaaaactcgccgtcttctagcctaagagagtttggttatcaagttgagttagctacggtgagcattagagaatctccgagtagagaggagagagcaaacctctgagcgaacgtcccccaagttggatcttgtgtttgctttcgaatcagagccgagaagtcgaacgccggatcgaactgatcggtttctgtacgtggatagctaagaaaacctttctgatagagcttctcggcatgctgcgtcgacgaaataaattcattttgttaatgcgacacgagagtaaagcgtataaagttacaaacacaaatatgcgaatcattagagaggagatggtgagcgaacctcaagaacctgctttggcgacatatggagtagtctcgatcctgctttctgtagctcgaccgtggttaacggatatggcttcctaagagttatgtcccggaaggaaagggcgcatgccagttcaataagaggatcctcggtctggttcagtaaacagtaggacagaccatttttttgctggtttgttttcaaccttgacaactgtagcttccgggttttccacacagcactcatataacaatgcggcggacatgaagtcaaacaggtggcctcggttccatgcgaattgcacagtctgatgatctctttgtagagtcacgtcgatgaatgaaaatgcttcaggccgaaaagcttgaatttgaagataccgagcgacgacaaagcccatcgtaggaaactgacatgctccttgaaagccaaacccgcgaaggataaaacaccccctcgttgtagcacgatcagtacgcgcgcacgattcagtctgataacacagactgtatacaagagaggaaagaagctaagtgataccataactaatcacatgatcctttaattctccacaagcagactgaagtgccaacgtctgcattctggtgaatgccgcacctgtcctaagatccagttctattcgagcttccacggcagcagctgataacatatcaagagcgactggattccgagcagcgttgtggatctgtctatagcgcgcgataagatagcgttagcttgttatattgatgtacattttcaagagggcccccaaagcgcaaagggggagagaaagaaggacatacgcaggaataatggcactaaacctggaccgaaggactttgatctgacgattacctgctcgacagtgacccaatatttcagatccaatatgttctccctctctatcacaatcggtccagatgaggaggagatcatggtctcgcgctagcttcttcaaattgctgacgaccggtttcattttctgtcaaaacatagcgaatgagttgaatcagcgacagggcttggctgtatcttctccgtgttgacgcttcgtacgttccatcgttcgcagtgtatactgacaggtggaacaaattctacaataggggcttcgaacaactcgaacggttcacaactactccaccttcgatagtcgtcatgaaagtcgttcgagttgacatggcccaggacggatgtgaacgtgaattgaaccggttgagactggggtggcagtttgtactgaaacgtgtagttcttcacaaagaccacaccaggtacattcgactagagaaacccaaccaatgtcagtcaaataagttcagcatgtgtctctaaaccattctgttcggactgcgaacgaccaggtcgaatgaaatatgtgcaaacactcaccgtgtcggattgaccttccgacaagatcctggtgagctccttagcgatcgatggtttctcggccacacataacactcttctcggcgatggatggatgggcatcagagaccgatactcatgagagatgggtgatggagatgctgtcgccgttgatgatactgttgatgttgatgacgaaaggtggaggtggagtttgccgagggttggaatgactacaaacgctccgtaatgaattgtaacaatttgtagtcttttctagtgtagtacagcatacacccgcccaccacgttgcagatagcatacagcacactttcaccttccacaagacagcatacatagatcagacagaacatatacgaaagccttttcagaatgagcggttctctcagccggttcattcctaggcatcagttcagattcccaaacaactttgcctcatggcatccaggccacatggccgcgttccagaccaggatggcccaggagcttatggatatcgatatggtgattgagtgtcgagatgcccggcttccactcacatcaatcaacccgcagttagaagagatatgtgatagagcatggggtcagggctgggctcttggcaccggaaaggaaaagggtagagttcgggaacgtcttgtggtctacaccaagaaggatctggccgaagagaggttcgaagaggtatgttcagtttcatacgttctcctttgctctgttgccttgcattgacgtcgctcttttccacgggattgattatgctcagccgctagtggctgcattcaagaagcatgccaatcaaaatatcatgtttgctgatacaaagaatgtgtcggatatgaaacgagtccttaagagaggtgtaggttagtccctatgttcatgttaccgtcggccttgagcgacattctcactaccgaatgaatgtatcgcatcctctcttgatctttctagcgttcgcaagaaaatatcagtccactctacttgacatgaagattttggtcgtaggtatgcctaacgtcggtaaatcttccctgctcaacggacttcgtcatgccggtctaaagagaggttcgtccaagttttctcttagagctgcctgtgaactgttcatgtgcttctctatcttaaacaaatgtatttgtactctgttcctcttctccaccgttagattcgaaagccagaaaatccaaggtgtttatgacatcctcttccccgggtcacaccaaaaagtttacagggacggccaagattcacgaggatcctccgatgtatgtgtacgattccccgggagtcatggttccttggttcggagagggagatgaaggagcggatcgggcaatgaaatgtgcagtcacaggtaagttatgacaatgctcctctagaaagaggaggagggaatagatcgttgatccgcactcgcgcgctctctcatcctagaaatgttcaatggctaactttttctcttactcttctctcacattcgtctgtgggtctctctcttgataataggctcagtaaaaggaggattgttccctgatgatattgccgccgactaccttctctacaaattaaatttacgtgtgggcgaatctgatgcattacccatgggccacgaagaacgaggtgacacggtgtatctctattatctttcgtcgttctagattgacttatttcctatcttgtttctgtctcacagtcattccatggcatttcgggctaccctattccgaggaactttacgatccgactaacaatatcgaccacttcctttcgcttcttgctgcccggatcggcgctctcgagcgaggcggccgaccaaatcttgagagatcggctgcattctttctaaaccacttccggaacggcaagtttggacggtacacgctagatgatctagaacaaaaagaagatctctacgccgatcccgatttctcattctatcccgaagacactccttctctttgctcatccacgtcttctccgtcgtcatcgccatcaccatcattgtcgtcgtcggcgtcatcgtcagtgtctacttttgattcttccaacgaacctcgtccctcagaagtgaccagcagcacagagctagataccgactcaagtacagatctcgtctcttctcaatctccaagtcgagcggatctcgttcaaaagacacatctgaaaactctcctccctgcccctcgaaatcctattctgaatgaagccctccaactcccccgatcattcgaccccacgaatccgccctgggcaccgccgcaccctggctccgaagctttcaaacagatgactgttttccaacctccaatccttgccccctctgatatctgggaaaaggtctctgaagctgtgcgaagatatttctttgggaaagagcgaagagaaaaccagatcagtcggacacaactcaaaaagattgcgtcgggagagaagagggcggtggcaatcggccgcgcaaagagcatgttgctggagagacagcgcagagttggtttggctcagagaccgatggtcaaaaggattgccgccgcaaagccggaatgagactcgctgggttccatcaagtctttggaagctcgccaacccttctgactgtactgtatttaaatattccacgaaacacacaagcacaagttcttttgtgtggattaacatatcagctccgggagagaatagggccttagcaagttcgaaatggtgtttcttggtctagacagcaacaaaaaaagaacatagacaatcgtcttctaattaaatgcccatccatccagatgtacaaacgcttctctctcagaacattctttcttcctttgtcggcattagcagtgttcacatacgtgtgtggatataggggagaagagagaagagcaacaagagtgtgtcacagttggaaggtcaaggttttgtttgtgacattagacaagtgaaaggggaaagaagaaaaagcgccctaaggataggaagatgacatgtttactggaactcgtcggcttttcctgactataaagccgagacaaatcggataagaacaaagaatgaatcaacttggagtttgtttttgacgtgagaggctaagaaaccgagatgagagcttacgataagtagacctatatagcccagccacacgtttgagcgtaaaagtaaaatcaaaccggatcagaatatgtaaatatcgggcatgtacaattctagttggcaacaaagcagactgatacgcaccaacaatcaacccgaacaaccccaacacacttccgaagatctcgacaatgagaatcttgacgaagagtgtcgggtcagccgcatcggccaacgcggctgtcgctccggtgatgccgaccgagataccacaaagaagctatttcaagagagatcagagggcaagatgagtgaagagtgataagcctagatagagagaacggaaatgcgacacatacgttgcataatccgacagtcaatcctccccagaagagcgcaaatcctgaaggttcggcggatcaggtatcacatcatgtagttagacagctgacgcgtaggaaaattcgagaggaggaaggcatgcgaaccggtgtagtaattgctctcagagaagacggcatcagcgccaaccgactggattttggccgagaagacaatggccatgataactccctaccaaacaaaagtatcacatcacattcgcttcagtaatgtgtttgactaggtgagaaagacgtctcgtgtttgaaggacccacataaatggctacaacctcgcagaaaatgatactgtacaaaagagaagaacagtctgtcagatggtgttgcaacagagaaagagtatgtgtttatccatatagtgatcctccttgcgagctacactcgccatcgtctggatcttttttgatggagaacccgccggtcaagaattagatgatggaaatctcaactcacgaaatcaagttcttggtcctaattcgaggtgtacgaacacctccaccaaggatcgatgccccggtaatgaagatacccctgtgacgttgatcgccaatggaacaagcaggacacggaactcgattagccattcactccttgttgccgcatcttagcattgtaagcagtatatatacagagtggcttcaaagagaaagcacagcgacggaaagccttcaaataaagaaaacgtaccatccggcacccaagacactcaacccgatgcaaagccccacgccagtgagtgcccaaaagaagggtgatgtctcctccaagaaccttccagggttgaactctacacgacacgttgaagatcaaacgcggttgagagaatggaagtataagctcggtcgttgctaagctcgattttgcgatcatatacggcaaaacggaacaacaaagtcgaaagagaatacgaaccctctccttgacctggtgtagcaacatgatagatagcgatcgaacaacaccataggatgtttgcaaagagagggagcaagagatatcaacagaagcacatgtcagacctcttgatcaatcagataggtttgtttgtttccaaaacacacaaaagaaagcattgggaaaagacagaaagaaaaggtgtaggaccgaacggaccggttaagatgaggtagaggcctatcaagccaacagttgagaaaccgatgaaaggagagtatcggatgatcgacgacatcttgtattgaccgatctgcttgctctgagtgttgtgtctgtctagagaacgaaagggagaacgaatggcaagatggaagcgagacggagatgggggaggatggaaatcgggatgacggtcagagtagacatgtgggtgtcggccggggacgtagaaatcattgggaattttgattaggaaatttcagagatgcattagagacttttctaatcacatctttctctcttctctcgctgtttcctatggtctcgaatagatttaaacgcatgtatacatgtacacgatagctgatcgatctttacagaacggttctgttcatttgcagtcttcctttctccttctcttgtccttgagagcatcatactcttaattcgatccttgggcaccggagcgagagagaacggtggggaccgagctagaaggaatcattccgtactgatgaagagataaagatagtttttacaagaacgaaatacagccatgattagctcaacggtcgatcagtatttgttcttgtataaggaaccaagagagtaagaaaaagacgaacctcagagcaaacagcggtgatataatcaggaggcgtcaagtcatacaacaaatgggtcagttggacggaagagtcgagtttgtcgattgtcaacgaagactttaagggatgtgtcgatgggatctggagtaaagccaaaggatcgcctgtttgattcgaaaagggaacgaaggaatcagtgaatacacaggaactaactccagaagagcaggaggaccggaagagatagcagacgtacccatctcgttcgcgacaacagcgtccagctggattctctctccaaacttgtaggtctcgcagcagactactaccggcacggcctcgctcttagccatcatcgccacgctcgctgttcccgccctggagtagagcgctccatttgaaagcaaggcattcgttccgagaagtaccaggttcgctctcggcaggacggagggcaaggaggaaagcaaggcgtaggttgtgggaatctgatggttgagtagtgtgcgaagcagattctttcctgaaagtgtacgttcacatttgtaccatccggtttttttttccacatttccccaaagagagaagagacagacgtgtggtcagcatatcaagtgcacctcggcttgagaacaggttgtaaagcgtgtaccacgtaccttccaacagaggtcgagaatctaccacaatcacagaaaatccttccccacgtttcttcatctccttgttcgctcgaatcagaaccttctctacaactgaactcctggcgtatgtgagaacgacatcaccatgtcgaatcttttcctgagcaaattgaacaatcatctcgtctgccaaggtgactcgttcccgaatatactgatcaatctttcgcgtcagaaggtctttgctctgcaggcgcacagaaacattcacagcatagttcattccacaaattagctgccgtgaactatcactttgtagaaacacacacgtacgctgaactgaacttacatctgcttcagcctcatcaatatcgattgtcgagatttcatatttaagccaacggatggcatttcctaagccgaccggcattgctcgggcctgtgtcagatgagcaatctgaggagacagatgagttgtcaaatctcgcggaagcgttgtcgatgggggagtagtgtatgataggatgacctgtttcgaaggtcggtagaagaacagtgaagcagtcagtagatgaaagcgagagcgtgaaagggccaagaagggtccagaaggtatatagttgagaggcaaggcgataagtccaggcaacagaaaaagccttacctgcttaagtgcttccagtccagcaacaagtctcgcgttggctcctctgatctttccttctttgagcataagacctaaccggataaccgccgggtgaacgtctcccttcaacgtagctgccacgctcccactaggtttcggtccgggcaaatggctgacgatcatgtgtggctgaacggtctgttgcgcctgagcagaaggaagagcgtaaggtagccggttggtagacgagacgggtgtactcatggacggtcgtaacgtagcggctgatgaattagaggttgtcgagctagaaggagtcaaccctccaccctgcccactggccactgatgaactaatggaggccgaggtggtgagcggacctcctttgttcaaatggggaagagtcggtcggtgtggttgagagtgatgatcagtggaagaagaggcattggcattgccggcagcaacgttcccactggcaccaccattattgggatgagtagagccgtcttgaggttgacctccgttcggtctggagttgaccttttgagctcgtctggcggctctctctgctttcttatctactttgggctctttcttgactcctcctgctagcttttgattattcgagggagctttggctgcagcaggtgcagaggtggcaggaggtgcggacatctttgtggcagagatgatgttgacgtcggtgttgatgttgatggaaggaaggaaagaggatgaaaatgggaaactagaaatttcccaataggaggaacaaaatatactacgaaaaaggttgagcttcctaaccgacgacgctaccaaccacgatcacaccgtatgctcaatcttgtgctttgctcttactgacctcacatcctcgttggcgatatgtgtgcccattcactaacgaagactgtctaaaccttgctaacttgtgttggtgttttttttgtgatttgatactgtgtgtatgtccaaaattcatctatgcctcttgtaaaggcatgccgatgagcgttcgatctaggtcacttcagttagtggctcgacggctagatccgtcatccatttgtccactcgaccttccattcagaagacacagaacctcttcggcgtctcgaccggagttgtcgccggaagaacgattgtctcgtcttcaagcctctgcggcaaacttcctcagagcaaaccataagaaacctgccaaatcgagatctacagttgtcaaatcgactggtgacgcgtccgactcccaccgcatcactccgcgtacgcctgcgtctatttcttctgagcctgctcttccccctctgccgtctcggccgtcgcgtgcgttcactccggatgaagtgatccgtctttcggcgaagtatgtcaagcttcggaatatgacaaactatgaaaagctcgagaaggcatttttgaaacagcgagcttacgaggattccaagaagaaaaagtctccctcaagaaaagatgttaatgtgatgagcgagaagaatgattggaggttctggcagggaaagagaggcgtcccgattatctcggtaggtggtagtagtctttctgttgtttgtgtacccaatacgcgcgcgcattctcttgctctgggatgaaaatcgaatcttgttgtccgaccgatttcctcctcttcccctggttttgtctatcttagacaataccacaacctcctgtgacgaatatttctgaaggaggagcagccgaaacaacgtccgaaccgctggatctggcctcagactttgattttgagcatgcaagcactcgaatgtttagaagtctaagacgcacaaacccccgactgcctccgtccgagcgcaaatctcctccgcttcttcgagtccgagtaggtcaaacacttctcttcctgttcttagaaaaccgttctgtctcattcgatgcccatatgcttgactgagttctcgattgattgattgatagtttaccactaccttcaacgaagaaggttctacctcgagctacaaggcacccccattagagataacaccagtgaaccagccgttgattcccaaatcatactttccctctccttcggtatacaacaacaagccgttgtttctgatgcgattgatctacccaaagcctttcgatctctctcggccatcggccgtgccaaaaaacattcgaatggaggatgggtcgtctgaatcaatcgcgatgaatcttcgtcggacggtagaaacctcggctcggtacttgaaagaggtcgaagatttgttggctttacctcagaacaatgatccagagatcaggacactcgtgatgagggaaatcgagaaacggaagaccaagttggactatcgtcggggaatcgagctcaagaaggtgccaagtaagacttggccggaaggaacgaaatgtctgagcttagggttgttcattcctgtggggaagaagatggtccatgcgctggcgagtgttagaaacaaagtgaaacgaaagctgaggaatgctctggcgatcgctctagttcaggaatgggaatcctcgaccgaggaagtcagggagcagcttagattcaacggtttgtgctctctctctctactctattctttttcttgactctgtttcgtacggcgcagacagacgcagacttacatggttccttccgtctgttgcgtgcttcttttcgaggcgataggatggtcggctatcatccaacctacctcccatgtgaaactagcacggatggaagatctggtgacgtacatgagagccgccttaaaacgggcgggaaggaattactacactcgtgggtgggaagaccgagaggccaagtcggccgacatggacgagccttttgagaaaaagacggccaaggcctcccaaagggcactcgactactcgagagagggcaacccgaaggctgcttggagtgacgagcgcagaagcaaggacaagaacacgaacatgtcgaaacggacccgtcaaaaatcttgacaattcttctccttttgtatgtatatgtatgtgcgtatgtacgttaaacatgatagacagccttagggtcggtgagagtatcctcaatcgataacggttgatgcatgatccttctggacttggatgtcctctgcagatgacatttgatgtctctgtatcgctatcatcaaacgctcaataaccatctttcatgcctatgccagaacattccccgtctgacgtccactcgggtgttagtcgagcgcgcacagcacagtccagccatcgggatttatttgtaacgagggttgcatccgcgttcccagataccctgtgttgatatcacactgtacagcagaatgtgtattcctttgggtcagataggatgaggcctcaatcgaagacaccatgacatccactctggtatacgtatcgcgccccagctgccagacttcccacgataatagaacagccggaacgtcgcgtaggggaaacagaaacgagtggtagcgcaagggagatagagaaatctcgagtcgttctatcccatccgcctccgtagcctcccgtgtatactcgatcggctgtctatccttgtctcttcatttcaaatcagtagctgttcgagatttactgtcctttcctctttacagagtgtgggaggtatcatcgaaaggtggtacaacatgcttgttctcagatcgaacactgagacaaacaatattgagcaggattcatggacgtgaagaaacatatctcaacccctcaactggcagtcgatagtgtgcgcatcttccgtgtcgaccggtgagtgcgctctgagctctcgaaagtcgcaatcttacgatacagcacctttgcgaggatcatgggacttggaccaactgaggtagcgagcccgatcgaagaagagaaaagtctagcaagccaagcatctcagtgtgtgttgagccaagcctgtatatatcagaggttgagaacgatcgcaagaccgttagctggctcgactactgtggtgctcatgttgtatacctgacaccgggcctctcgatgaataccgctgagatcagctgcgcgtggctcgatcaagcatgtcttccctgtctcttcgtctgatgatttgcttgactgctcatgactgtctctatgtcgcgctactcctttgtctctttgatgcttgctctcagacttggtggaacagagatgtcaatgcgtcacgcaacatgctgcacctagcccttcaccaggaggagaacaagggggcaaggataccgggctttgacgctgtcgctagtgaggctgaccttgagactgccatgactgctgaggctgaggatgagactggcacacattgaaaccatgacccatgggaaccttggtggttcatggtctgagggcacccaagtccaaaagggccatgtatcgactgccatcggttgaggttgccttctagtagccgaagccacatagttattatgttataatttgtatagatgattttggacagtctcatgaaattcaaataacatgacaaattccaatctgacttttctccagctcatcagtctgactttcgtggctcgcgctttgctcacagtgaaggcattttgggtggtctggtgtgagcggattgttgtctaaccacagatcctcaagaagtaagtcggcatgctggcctttttttcgtctcttctatgtgtctatgcgtgttgttgccatgtggacgggagagagacaggagagaacgcgtgttgcctgtcaaatatcggtccaggtccctttggttgaggccccgataggtcctactggaaatcttttgaatcaaccctccttcgacaaatatcgacaactctttgggtgatgggatcgcaagcgttaggcttggaaaatgcaaccattgaaaagaactctcaacaaggaatcctgggaattatcggttggaggaaatatcggagaaaccggatagtgtgggatagatagagaaagcgtgcggttcctattgacaaacccacacgagggtagcttcggctggctggaagaattctcccacgaacgcacacatgcttggtgaccaagaaaaaaattggctgaccaagaactcgcctgtatttgttgctttataatcgactcccttctttttcctttcgaccaacctttctgctctcttctcaaccatcacatccactcttttctcaaatcgccaccacctgctttcgttttaaaagatctatcaaaatgggacgacgacctgccaagtgctaccgatactgcaagaacaagccgttccccaagtctcggtcagtttatcttctctgtgtgtgtgtgtgtaggatatccgtgtactgatctagaattctctcaacaatataggttcaaccgagccgtccctgaccccaaggtccgtttctgtctgatcatgctgccaattcatttctcttgaatcatcaactcaactatcttcctgtatatgtttcgctctcctcgccttctcattcgttctctccgttccctgcccactctttcttcccttccactcccacgaaaccctttttgcttccttttccttccaattttttccacataccttaacagatccgaatttacgatcttggacgaaagaaggcttctgtcgacgacttccccttctgctgccacttggtctctgacgagtacgagcaggtctcttctgaggctcttgaggctgcccgaatttgcgccaacaagtacatcgtcaagacctctggtaaggagtctttccacatgaggatccgaccccacccccaccacgtcgtccgatgcaacaagaccttgtcttgcgccggagccgataggttgtcccagggtatgcgaggagcttggggtaagccctacggtaaggtcgcccgagtcaacatcggtcagcccatcatctccatccgatgcaaggacgtccacaagccggtcatcatggaggctctccgacgagctcgatacaagttccccggacgacaaaagatcatcatctccaagaagtggggattcacttctgtcacccgagccgagtacgccgagcttaaggctggcaagaaggttcgttcactttctgttttccttcttcttttttccttttactctagaagacttcttttccccagttgttagcgagtgtgccattactgaccttgcttctctcattctccttctcagctcatccccgatggtgcttacgtccagttcatccgacccaagggaccccttatggagaacctccagaaccagctccgagcttaaacagcgaagttcgggtttttctttttataagcatggcatttggttgtcttccctactggatatggtatcgattggttgcttcctaagcttctgtcccaaaaaaaatattaaaacgagttgcgtgcctgaaccaactatcacagacggggtgacggctacagaaaaatatgaatcatgaatgagagtggaatcgacgacacagcacatgggggaaaaggtctttagtccggatggacgaacaagcacagagttccgtggtgctgcgagggctctttttcggacgattcgatatgaatcttgatcggttcatgcctgcccatttgaccttctaacatccaatataactgacgatagaccggtggaagactgggtagctgattaaatggccaacgtgctcgtcgagagcgtcgttcgttctcgacacattcttggacttccctcttctcatccgatcgaagagaggacaagctcgttcttcaagaaaagttcaggttggcactaatccttctccttctgccgtttgcttcttgcataaacacatcggaccttcaagttctgcgcatgtttcatcgggatgcgtctttaatcgatgaatcaagttactatcgaatgggatcatcccctcctctcatcatcgctccttctctccgcgcatccctttagggtgaatcttccgagagaaacctcgaccgtctagctcaacctagtttgtttgaaacaaagatcgaaagatgaaagagcctccaaagagattgtatggagatggtgtggtttactttgtcttcttcaaagagttgaccgaatcatcatgagaccatgggaggagagcggataaccggtaagccatgtcgactgacatgatgaacttg

SEQ ID NO: 1091 - DNA, 14197 bp, Xanthophyllomyces dendrorhous
aagagaagtcgttagcctagatattttgcaaagaaacacgaaagatgaataaaccgagacgtacagggataacagcgaaaggtccatgggcaaggaagagctgtgctctgtgcccctctttgatgaaattcgaaccgacgttccacacagttcctcccggctgaactccgatagtagaaacgacaccgagtacgggaacaagggtggtcgtggttgcgaccgcatagatcaatagcgggaggtacactctaggtgtgttcttgtacaggccttgaaggtatggacgaaagacgaacaaaatcgtggtttcccagtaggttagggttatcttccgagtcggccttggaaggaagcatcgagaacagaaatatgaggacgcataccgtatgcgccgatgaaaaacatgggaagcgagaacacggcttcgagtccgaggagagacttgaaccaggtgaactcggacgagtggccgatcaagttgaatgcgccctatggaaaagaaagaggtagaaagacgcgaagggtcagccgaggatggagatatcttatgcctcggaggagatagaggagagaagatacgaaaacacgaaactcgcatcatcggatctccagagagttggaaatagaacgcgacgagcgcttttagtgggctaggaacccatcgttcgggataaaatacttgaagactggaaacaaagaggccggcgaaaaatggttcccaggcgtagtgacattccggtcagatgtgatgaagagtaaagaacagaaagacgagatcgtactctacgcaaagagctgccggctaggagtaaggacagacgaaaccgttagaaaagcttgatcaaacatcctgttgccaatcaagatcacctacaatatgaacctgtaggtatcaacaaacaggtgcgagtcggacgagctaagtggtaaggccataaaatcctctgatggaaacagataaagaaacagacgaacgagaaagaacagaaagtaaataaaatcgagaggtctcttcgagagaggaaccctatttgcgatggacaccatggctctgtatatgtgtgtacgtccgtacgaatgaggggtagcgaggaaagaaggtgacgagatatcaatagtccattatcggatatttcgtagttggcattacaaacatctattacgacagactgtaatccgttcgtacgaacaccttttctgacgtctctcctccccatcacacatagcatacacagggtacacaactggccaggcattgtatcgatccatccatgtcgacagcatcggtatacaacctcgcgagggagtctaggtcgatccttaaacgattcagaaaggcatccccttctctttctatagagctctatccaaaacactttcggttcaaaggccaggtgcgttcgtttctcacgatgtatccctcattctctctgttcgagcccgacaagtgatgaagctgacgtgtatgaacatccttcgtgggcatggtcacacgcttgtatgcatgctggtttcaatattcatataaaaaaaaacaaagactggtatttttctctatgacagtccgatgaaggtatgtttagctatcgtcgtttctcttgagcataacgcgtccctaatacatgcctccgggtcacagaccttccttgaatccataagagcccaacagatccctcatgatctgctaccctatcttccatccccacaaatcccttactacgacggatgtcttatcgtcgagctcattgatcaccgaccgacagctaacgttcatccttccgttgctgccgcctcgtcggacgcgaccggctctgctaaaccaccttccgactcgtcattgaaaccggagggacaaccagcgacgaatgtaccgcctgtccccccgcctgcaccaccgctggcgtaccatgggccaggaggcaaaggtccaccacctatcagagtcgttcttcatccgacgcctgccagcttgtggagcgatgtttgcgcaatgagcgaggacgtcggccagggcagctgggacgattgggatgttctccagttagaggctaggatcgtcgtacgttgcttcccgttctatttccctctttgtttctctttctgtcttcatcgttttggtcgaaccccgcttcttgggattctgtctcttttcatttatgcatacatcttctttcaaaccgttctcccacgacaggctgcgacagcacctccgctttaccttggaacaagcttctacggcactcgagtagccaacgcgtccattgcacagacatctcctctagcccctccagaagctcaacaaccgtatcatgccgagagttccacttcatctggtctcttagcccgaaagagggcccgggcgcatgggtctggtgtccagagaagagacgaaatggaaagtcagaagagtctgtatcaggtgggggagatcaggaagcaggtcgggtttcaaccaaagtatgtcatccttggtgctgtgtagtgctttagttgctgatcattgtactgaattcctgtttgccttaccgtctgcaagtttctcgcgactcacccagatcgaagcgtttcgatcgaatccggcatcaaaccggccccgctcgctcgcctctgacatctcgtccactcatccaggtcttcctccaccgtcgggtacctacccgaactataaccctcgtccgtctggttctggttcggccgtgaatatggttccaaatgcggatgcctcgtcgagtgtcgataatccggccgggtcgatcgttcctgccggggcagaggaaggagcgaaagcggccagacgaacatctgtggcttcctccataggaggcgatgttgggcaggatgagcaactggcgtcggaaccggcagtgtccgaaaagaaaaagacaaagaagaaaaagaagaaggcccaggcggaagaacagacgaaggatgctgatatggacgagccgtccactccggcggttgcctcagcgcccacaccggttgacacaccggccgcgattacgaccacgaaatccaagaaagggaagagtaagaagactgtcaagccatcagaggaggctgttccgcaaacaccagcttcagactcggcacccactccatcttcatccaccacggtatcgacgacggcgaagaagggcaaaaacaagaaagcggcaccaggggtaggtatgtctccggagagtcatcctcccaagaagaaacaaaagacttcaacaacagctagcgcggcctcaagtgcgcctacaccaggagggaccgctcttcctctcggccctccacctgtaccgtcccaggccggccactcgacttacgctcaaaagcaacccccaccgtcgtcctcgccttatgtgtcgtccaagacgttgcctccgacttacccaactgggcgaccgctaactggcggtccgaacggagttggaggggttcgtacagcgcatgggcaaggaacgggtgtaaagacgttaccaggcgtaccgggtttgcaaagctcccagcaactccagatgttgcaacaaaatttccagactcagcaaggctacccgatgcagggaatggggatgcccctccagagggatgccggacagagcgggaacggatacatgggcggaggggtaggatcataccctcagcaaggccagggatggtagctcttgtaattgagctttgttctcaattagttttttcttcttcttcttcttcttcttctaatcctagcctgatgcttgtttttgcttcggcaagtattcttgtgcttcttgttgtttcttagaccttcataccggttgtgcgtgcgctctgctacaacaccagaagagatcaggatgtccatctaggtgtgggttgttgatatatatatatatacacatgtgtagataggcaccttagcatcattgaaagaccaagaccaagaccaagaccatccattcatccatccatccatccattcattcgtcgtccttcgtagacgagtcgaggctgaacgtcaggtaccgagattgaaggttacggcggttacgcaagccagaccgtgaccaacataaccaaggatcgcgtaaccatggtccatcatgtcatctgttccttcctcggccgccatgttcatctttccaactgtttctttgcccatagaagaagacaactaaccttgaagagattatgacggatctcaagcaacatgggatcggtatcgagaaaggatcgcagcatcggaacggaaacagctatgccggtagtgatggagatagggacgaggaaagggacctagatgaagaaagatctcttctcgggatggatagttcggctaaactcgtcaactcgcttgacatgtacgatggggatgtgagtgcttggttgaacgatctgttggatgagggtgaagatgatcagatcgtatcgtcagtggatggaatagacaaggtatgttctcatctgggttattatcatcgctatcgccattgtcgtcatcaccatcaccaccaccatctggagagttattgttcgtcgtatacgctcaaggctgatcatgcgttaacttctcacttgggttatctctctcggggtcctgcttgaatgcgtctctctaacgggctctcttctacagataaatttagaggccatcgacgagaaagtccgaacactactcggcaggttatccggaatctctcaggatacatctcagcagcttgaacagacgatccatgatatatcccgaacggttccccggctgacgtatgaccttcagttcatgagagaatccgctgcatcgctcagagtatctctccatgggatcgaatctcgaacgaaagcagctcacccgacccagtccaaatccgaatccgtttctatttcctctatcgatggaccgaccggattttcttcggacgcgacaacaacaacaaccaccaccaccaccgccgacgatgaagagactaaaggggtactagagcgattgaagtaccttgacaaagtaaaacaagggatggaagccactctcgctgtgttgaaagaggccgaatcatggtcgacgcttgaactggagtttacatctctcctcgccgaaggtctattccacaaggcggccgagcggttggctgaggcttccaagtcggtagctgtgttcacccacaacacggccgaatacgaatctaggcgaagtttgcttgtcagtctgcagaaccaactcgaagcaagcttgagcgcggcgcttgtcaaagcgttgagggaaaaggacgaggatggacggaagaacctgttcgagatctttggaatgattcagagggaaggagaatttagagggtactactatgcttctagacgaaccgatctcgtcgatcggtgggaagccgctgtcctgacagactgtgaatcagtcacttcacaggaaaccggtctgggtcttggacgcccgactggacctccagaagacgaaggaaagtctgctgtcggattcaacccctttttgtctggtttctacagctctctgctctccttagtgttagttcttctcgcttcagtgtgaaattctctcttacagtaccgtttctgaccattcttctttttgttcgaatcgtgactgtattcttactgttgatcaacagcgccgaggaacgaacagtacttccttcaatcttcccagatcctcaacccacgttaatggcattcattcagaacgtattcgattcgttaaatccttcgctcggccaacgtctagagctcctcgttgaatctcacggaccgagcgcgctcactgagctcatcactgcattcaaatcaactgaagatcttgcgctcggcattcagtccaatatggataaactcacctctccatctcaatcctcagctgctaacacacatgctcacggtagaagtactagcccggctcctgcctctcttactcggaagaaggatctctcgccttcaccttcgccttctcgaaaacagtcggtctcgtttgcagacggtgcttcgagaagatactctagaagactcaccgccgcatcggtttcgtactctccaggagtcgaatcccctctagacggcttacaccctcactcgtacccccatcctcacccttctcatcaccacacgcaccctcaacttcctgtacccaatgcaggtgggccttgggaaatcccgttgtacgagccgttcttagactatcaaactgaatatggtcagctcgaacgaagactcgttcattccacattggacaaagcgttagacacattggatggcgtgacagtcggtggtgctgagcaagcagatgctgccagagttgtcggagatcgatcagtagaggtgttcgcgctcgcggaaggagcgctggacagatgtttgggactcactcatggattcggagcggttgaattggtgaaggtggtaaacgaactacttgctcgctttttagccagatgtgagaatttgttctcagaccgtgatgtaagagaatccggttctctctcttttttttactgcttcctctttacctcctctccttgctgttctcctcgaatcgatcacaagtgacggaacgaataacactctgacgatctatcgttcttctcttcccttttccccttccttggctttagtcttctgcgaaacaacagcagtctaacgggtcgacgcgtcgagaaaatgcgatggacgaactcgacgaggttgatcaactcgaaatggatggaatgaactatagttctgaggactgggggacttttcaattggccctccatctcattggtacttgccgagggatccaagatcgtctattcgcttttgagagtaagctccagcaggcactccaacatgtagcgaccgccttcttagcagctcgggacgatccagctggtcatttcttctcaagaacgacaaagggctcaatcacgcttctccaacaatctgggctcaactcgaaagatcttcatgatttgctcgaatccttgggctcgacacacggagcagcaggggcagctttatatggatccattcagccttctcatttgcgcgcgccatccttctttccttcctcccataccttcggtgctccttccaacgctgtttcggcttctcctgcgtctaatagcactggctctggtgttactgttgtcacatcaggagtacagtcgacaaatgccaccccatctagaaatagacggacgtcaacctggacgaaaaatcaattgatggaacccgctcgaaagtcactgatcagattcaccacagcatcccagctttttctccaaaaaacaattctgtctccgttgcaccaacttttgagtaagtatccctccttaccagtatactcctttgaggtcacatctctgtccaccgctgccatgaactcgacatcttcatcttcgataactggtgcctctaccaagccgaaacagaaagcagcaatttctacgatcggtgtccctcgattttcgaccgctccaacagatacagtcgcccgaattggtgaaggcttgttgaacttgccgaggttattcgaagtgtatgccgatgatgacgcactctcgttctcgcttgatacgcttcctttcatcgatccggcgacgctacgtgaattccgggccgcccaagctcaagacacatcgagtgtcttcaactttggtccctcttccactcaccccgagaacgtgcctttggtctctccaacccatctatcgcctctaccctcaccatcggcaacattcccaccttcgtctatcccggggaaatcatccggctcggcatcttcgtccacgttaccaccagagatggtggtctctctccatctatcttctctcaccctatcccttttgagcgcgtttacctccgtggcgttcgactcactccccccgctgggaccgaatccatcagtccaggcggacaaggcggccgaacaactagggacagacgtagggtatcttgtgaacgtcgttcgggctttagacgttgattggtcagaaggtcaggtcatcaaggattgtttagatctcacagaagatcagctgagggcaaaagtcaggggtgaagagggaagcgccggaggtgaaggcgagcgcgaaggtggaggaaaagaacaaggtggtctggaaagaaggaaggtcatgctcaaagtagcaaagttgagagggatctcgtaggaggaggggaaacataaaaaggaaaggaaagcgcgagtgttctccctttctttcaagtacatgatggattgttttacatgtatatcctcaacacgaagatgaagcctggagggaaatcaggacatgcatcctgtctgatcgagtcacagatacacactatctttcggctgcgtccgattcaagacctttctgagaaattatacataggcacgtaggaagaggaaagtagaggtagtatatacacgtatgaataaggatggaacaacatagccacaaggaaatctccataagaagtttatttccagacccagaccaactgttcaaggcctccaacaacctgacagaccgctcgaccaccatcggggatttgatggattgctccatctgcgcaaacgagatgtgagagttcggatgtccgagtcggggtccattcccagcctgcacctggtgaatgagcgcaaccgggggatagtcaatgaaaaaacatcatagaccatgtaagaatcagtgttatgataggtgaatagatgtaacgaggtgaaaagacaaaagaaggagacgaacatcgatagacctgaacttctccttcaggctcggcacctccttccggagattctatcggatcctgaaggacctcatctacgtgcttcccgtctatcgcgaaaagaggaagacaagttgattgtcggaaaagagaaagaaagaaagagagagagagagagagagaaacagagaacatcgtgacgataagcatgtgagaaccctaataaaaaatttagagaactgatttgatgacggacctctgtaagcgcctcctagagcttttcttaccctgccttgccactgagaccttcgatcttcttccttgtgagcttctctgacagctttccctcttcctggtcggacgagaatgagatctgccgtgcctggccctccttctttgggtgggatccgttctagtagtggcaagatgacaaattgaggctcgagccgagtcaccaaggttgaagcgaggcagtacgcccagggcccttggagaaagactccagatgaggccgaaggcacagggtggaatttcccagatgcaggggaaaacaactcgataggggttgatacagctgggctcgctgttgatgaagcagatgaggtcagagggggaggaggaaagagtcggagagtcgcttcaaactctacatcgatgaccttctcggctgccaacttgaatctttccaatcctggatggtcgtttctcagcgtttccgacacatgaagtaacgacgcatggagcgcggtcgacgtaacgatatgacttaggaacgagtcaatcggatcttcttgcccggcagcatagattgatgtcttctgtaaaggaagcgatacgagagtcgacgatctacggttcgtttggctggcagatgtagacgaagaggacgtccttcggtggtccaagtaggacaagactgagctgagattttgtctgtcttgctcggttgatatgaatttgtcgacaagctgtgattcgagtgtcgactctggggtaggagggatgaacccaggaggatgtagatggttgaacaacgcgttggccgttcccatcggaatcggaatgatttctagacgaggtggctgtgagctatttgtatcgagagaggtacatgcttgggctcggaagaggtcatgatagaacccagtgattaattctgtgatgagtcaagtagacggcccgaaccggctggtcagctctcggtgtcaaaactaatcagagagtaggaagaagttagaatgagaaagaggaagagaacagaccatggcttgtcccatcgcctcccaagacggcacaaacgacgttctcactccctccttgttggctttgggtatcctcgtcccaccgagctctcaacttcctccctaatcgttcaccatctccgttggtctcggtttcgaggagttcgaaaggaatctcgacggcctcgaggaacgggcgaagaatatcttggtaaactaagagaccctcgtcccatcagcaagtcatcgaagacgagtcagagacgtaaagaagatggaatggtgttagaaaaggaggactcggacggtagaaggagggtctcagatggaccatgaccaatcagttagattacaaagagcctagacgaacagcttgtagcctttctattaccggacgaagggtttaggataacgatcagttccatctggtatgtcctattaagtttgttcagtgttccagatcacacaaggtatccgtccacaggagaaaagggatggtaatgtatcagaagaaacccaagaagatagagagatggaggtggaagagacatgtctatggaaagatggcggatggagaagagtgaatggcgttgcatcttgataagatttcgttcttgccttctcgcgatgccgagatttgtcatgatacacacatccccgggccatttattactatccagtgcatggcaaggactcggtcggttgtcacagttaggcagacatgtctggcctttcctagaagtcaagcgtcatgttgagctggctgatgtatctctctctctatcttatgggatactttcagaatggattcgcatcgaccgaatggcgtcttggtctgttcggtcgtcttgcagcaaaaaaacctgtggccaaaacatgtgacaaaaccttgacgactcttcagccggtgaccggtgaaacccaaagaaaagtcatgatcgcaaaacaacagacggtcctcttccaaaggaaacgtttactccatcttggcgtcctcggtggaggcggcgggctttcggtcctttcgggcgaggagagcctttcggtcagcgtcaaggtgaagggaggtgatctggaggttggaggggtggatgccgatggggacggtggcaccggaggacttctcgatgttaagtcgctcgatgtgaacgacgaacttggctcggtagacctgatgtgtggaaataaaaggaagaaatcgggtcagccaatagatcatgacacggcaacgagaccaaggaacttgtcgagcacatacctggacgatctttccctctcgtcccttgtactttcctcgggtaaccttgacctcatcgttctttcggatggggatggctcgagcctgtttttgtagagcggataagagacccgaggcatatatccgtcgatggtgagaacacgtccttccaaccaaagctgatctacttgattcagtcagcaattacagaaacaaaacaaaacttacgttgtacttctccctgagctccttggaaagggtagtgctcatgatctttctcctgacggaggaaggggcatcgaagtgagcctttctggactttcgtcgggaggagtggacgtctgtaaggccggaaaagacattatagatgaatcagcctcatggtcatgtaggaaacatgtgtggtctgttgaggtcgggcatggaagaagggatgagctagcttcaggatactgtgcaaacaacgtgacggctcgagtgtttccttagacaagaaacagttcgtgtcgtgtcctatagttccgtcgaatcactttctcaacaaaagttctgatccttcgtgagggattctaagcagacgtttctctcctggtgcttcctctccatgttctgaacagtatcctggagctttgccgtcgaatgccgacctggattgggaaaaaaaaatggggaaagaatatcctacgaaccggcgttctgcttcattctgctgcgagtaaagaaacgacaagaatgggagtttgacggtgataacggattgttgttttattgggaaaggtagaagatcggtgtgaaaaagcgaaggggagaacaaaattggcagagtcccgtgtaaaattgatagacagagtcaggtcggttcgagaaggaaaaaaaaccgagttgggtttccgagtaatgttgtaggattcgccaggggtttttcaggtgggttccaagagaccgaacggaattgacgaaggaagaatgtgcagaagaagaaaaaagcgttggtttcgtcaaatttctcttccctaatgatcagtcaatggtgcccgtcggtcctcttctctttttttttctccttcttcttttcattctctccatgtgcaaacccagcggatctgattgaaacagccataaacggatgacatcgagagtatctctcgcagaagaggacttcaagcaccgacacagacaagaaacgggtgtgtactgactttgagtgatcttgaggatgaagtcgctgaagggaggttcaacactagaccggatgggatgggagggcctttgctctgcgactatgatgtgcccatgggtatggggttatgtcccaaatatgcccatatatggggtgtcacttgggcatcagccgaccgtccgactctcgacaaaagtcagatcggatgtaacacacccaccaaaaaaaatcgagcgcctttttagtgtcaagacatttggtcgtgtcctttccatctcggtctacatctctcgtttctgcatctctcgttctctctattgactgcagaatggagatggctggctaacgtatatgttcgtcgtttctctttctatgtctgctctcgctcatgcgctgatactgaacttcgctctttctctattacagttgaactctttgcttcgacgctaacctaactcaaagagaacaggatctgaaccaatagaccgctcgatgatcttatcttctcttcccttttcctctctctttctcttttccatcttctcttcctccctccactacacacgcctacttcactttgatgtcttcttgcccttaaatcctaggcactagtcatccattcagtacgcgaagaaccaaaccctcctcttcttcgtccgattcgtgtctcacgttttgaacggcagaaggggcatttcgttattttgttgatccgtcctatttacacgacggtgagcttcacaggcgaaagatatcctgtcttgtcttccttgcagagtgcctaccgttggaaacgattcgtttcgtgcgatttactccgcatggtccttccactttcgtctttactcttttctttgttcttcattttttctttgaaattgcgccattacactctgagtcctctctctctacccaagagagaactctatttagttcggtcgctagagtcaatttgttctccattactcaccgcaccgtgtagttcttaccgcgaagtgaggtccttttaagctcgagaggcacattctatacctactccatatctgtttgactatattgaatgtctctggcgtaaatatgtctctggaaagttgaccgatttgatagcaaaccgcaaagtatcaatctccaataacatctcattgtacaatcacagctttcataaacgtgacaagaggattccaccggcattgctttttgtttattggcgaaatagaataaccctaacgacctacacgtggcttcatgtcgaacccgtccaggcctcaacatttgttcgaggttttgtgtctgtcgagaatatcagaagcaaataaagagagagagatcaagatctaagatgaaagctgaacgagaaccttatcaaccaaccaacgaaacaaatgagcaaattgtacatgatatttccctttctatcgtatactcgatcctgatttctgtccccagccctcagaatactcgagaaaggggaaaagaacacacactctctctcgtcgctccaaaggaatttcgacctctaatccctctctccgactctgacgagccactctccgacttctccctcggtcatcactcgccagagtccaacaccagtggcagtgcccgtgtagagatccttgtcgactgggtcagaggatgacaatccaatctcgatttctgaggatttaaagtcggtagccaagatggtagacagtgtctcgatcgccaacttttgttcattcatccaatcgggttgtttgttttgtttcaagaacaattttgtcagtttggggtttcagatgtcagaagaagagcacagagaggtcgagcgttcgttctgtgttctagattttctcacacacacacacacacacacacacacac

SEQ ID NO: 1092 - DNA, 9874 bp, Xanthophyllomyces dendrorhous
acacacacacacacacgcgcgcgcgatacataactgaaggagaaggaagacgcacctcgattgtttctgaccttgtcaggcccttgacggcgtcgcctgataattctggtgcgtccgggtcgtccactttcttccactttttctccaactaacaattaccacaacgaaaggatagatagatctcaaggatgtcaatcggtcggccacaatttatagaagtgcgctggaccagaagacaaaagaaggagacaaggacgctccagattagcactcacaaagttcatagcctctgtttgcttctgaccggatgcggttgctttgaaaccaacaaagtaaccggccgggtcgaccttgaagatttgaggtccgagctcagagtcgtgtccgattaacgtcatcactacactcccaatcgacagataaaaagaccagccaacgatagtcgtgtcggacgctcagtcagaaacagccgtctcccggtgcttcagcaaaaaaagtatcaaggagagcgaaacataccgacacctaaaggcctcattccggctcgttgagtgtgcacctgattaatatttgccaatcgtttggccactagaaatccagacaaggaatcaggatgagaacacaagccattgatttctccctatttccgtgaaacgtttatgtctggcagcatcgttctgatgtgcaagaaaggtcgaagaatacacatacaatcaaccggctcaatctcgtacccgtacttgtacctccactctgctgcctcggcctgagctgtctggacttgtgatcgggcgtcggctgatgagtagagaagggaaagtagatggtgatgatgagtgtccacatgcgttaaacggcaaagagaagaacgaaaggtcgagaaacatacgaagcaagccagtcatcacacagccaattgtcggtgtgatctgaaacagatgggtgactgtcgagggatccacgagcttgtcctatggaaacagagagcagatgagaggtccgaacgagaggaagaagaggagcaaagttaccgagaagttcgaggaagagaatcgaaaggttcaaatggagagatgatatactaacggcgatcttcttctgaacgacgataaccgaggtgtcttttcctctgatggcgacggctgtaatgcctgagccagtgatggccttgaacgcgtactctgttttgcagcgaacatttgaacgatagccggaaagggagttagtggacgcacgtcgtactgtacatgttccaaagtaacacaaggcgactgaccgacttggtataagcgtcctgaagcgacccaaacaaaaacaaaaaaacaggaagaagtagtgtgaacgtaagagagagagtacatatgtgagagtgtgtgtgtatgtgtagatgggggacctgtcagatgtgattccatctgatcaaagcaacgacagcaaagactaaccctctggagagaagacggtgagatatcgatcgtaagaacctctagacatgatgtgtgtatgtgagtgagtggtatatagtggtagaaagagatgcaaagccaacggatctgatgggaggatgatgattcctcctcggatgagccgttggaatgaattgtttcgttggaggtttccttgcttaggtaataatgttgcaaccctaacagaggaaccgtcggccataaccatggttggttacacgtttctctcaaaatcaatgacatgtcccacgagggaaggatgaaaccaaaatgagtaatgcgcagtagtctcgataagattggcgtggtacagttttgagatcttccgcggatggcgcgttctgttgaatttctggcagagcgtagaaacgaagcctaaaaactggaacaggcgctggaggagtggtaaattcagggacgcaaacgaggaaggtaccagggcggacgtaaacaaaatgatctgcgaaaggaagatctcaagctgtggaaagaaaacaagggcggcgtcgctctcccttttagccggcttttcccacaggcacaaagagcccgtcaaatttttttcatactcgtccggctgagaaaactcgaaacatggattcgcggaaggcgaatgcagatacacaagagagtttacgagatcagatacaaggagagagcagcggaggggaaagagaatagagcaagaggagagaatagatgagaaaagaaaagaaaaacatggggaaggaatgatcagccaatattcaatggagaagaaaaggaaagaacaaatcctcagaggagcctcgacccacagaggggagagaaagagagagagacaacccttctcttccacgcgacacacgacacacccacttcacacatcgtgttattatccttactctctcatccatatcgatatctatagacagaccgaatcggaaggaaagtaaaagagcaaaaaaatagaatagaaaaatcggcgcgtggtggtacaaccttctagttgagtcctttcttccccaatcttcctcttgtattctgtctgtacttgtcttttgtgtctgcctttcgttctccctcttgctgctgttatcgtctcctctcttttgattcagttttcttcatcacttctcaaaacatcgattgagattgatagaggaggcgagatcgaaagaaaatcctatagaaaaagaggagagtgtgtgtcaccagtgtccggccgatcaaccctgttcccttttgttccgtctcttcttttccaacctccctcatcctccgaccttaggacactcttctttcccttcgttcctctcttttttcttctttctcttctcttctctctttcatttgcttatcctcaaagcttgttcgttccccatacaggctgtttttcaccgctaccaagcattcgttgtcacctctctctttgttcttctgacgaccgtccaaatccgctctgtttacttcttcctttgatccctcttgtttaaatctctctatcctctcgtctcgtctcctcacgcaatggaggaccctacgacagagcaagattcatccaggcgcttcagtctgcctagtatccattcactgctcgaaaaagtaaccgctaccgatactccaactaccacaacacctaccaacactggtcagttctcctttgaggttcttacctaattcattttccttggtctttctcacgtcctgccttcacttcgttcttgttccgtacatccctgtcgcgtccgtattcaccgatctatgtggattttaatcaaccaacaccaacccacctcttctctgtccatccatccatcctatctatccgtttgtccctcgcgtttgctacaacgcttgcagaaaagcatccatccgcaaagtctgaagtagaaaagaatctcaaacctggtacggcaggcaccgtttcttcctcctcaactgctatcgatagcacatacgtctttgaacagaccgaggaagaacggtcgtctcgtgtagactcatcgtcctccatggcatcaacaaaccctggcggtccttcgactccaccaccaccacctctgtcgaccagctcaattggtagcgatcagagagattttgagaaacttcggggcagccaagttggaggaggcatgcaagactggacggttggaagctcgcccgaatcggcagagggcaaacccaaagatgcccaccatcatcaccagccggccatccagccggcaccattccggttcttagagtaccagaaccaaccaccttaccatccagaatccgtcgacccgtattctaaagaagcccctcttggctcggacatgtccaacaaaagctcgataaaaccacttaatacttcggtcgacgcgtctcaacctcgtccggccgctccaacgtcttcagggacgatctcggcccagccggtcgatccatattatcctccaccctccgctgccgaagagagtacaagcctggattcaatctcatctcgtccggtggaacgtgagccaggctctatctacgcgccttccgtcaccactcactcatccacaactgcttcaatcccgattggttcgcctcactcttcttccgggctttactcttcctctggtctcaacttcaacacaaatggtccatcttctgtacacagccaaccttccaccaccgttcctccgcctgggcctcacccggaaggacatgctggccaacatgtctgggctagaccggacgttagaaccaacgagcagggttcatcagctccctccaaccgtagagaaagtaccatcggcggtaatgacggtttcatgatcacccccgacgacacacgccggcagtcgacagggagcaacggtcggtcgtccagtcgagctgccggctcgtctggtcggctcgcggagacagtggctagacgatccagcggagaagccggacctggaccgtccagggaaaggaacggttcgtccgactcaaccggtagcatcagtggccattctcatcctcatgcgtacaggccgtaccatgtgccccacggagatcagcgatcccagccaccgccatcagtcccgtctaccgcttcatcttctgtggaaggcctagccggatctgcgtctgggtctagacctgcgtccggcccggaatcgcctcatggaatgcaacaaccgtatccatatccatccggtggtcatggctctcaacaaaggatcccgcactcccaacaagtcgcagattcctctcagacgtacgcattgttccggcagcagcaacaactacagcagcaacagccacaacaacaacagtaccctcaccatccgccagctggttcttcagaacaacagacggtccagtatcgacattcgattcctccctcccaacatcaacaccaccaccaccaccagcaaccacaacaacaaccacatgcgcctttccacccatcgacgcagcctcaatacccaacccagcctgaccctcattcccactctcactctcaataccccgctccctctcaggtctctcctcaggttccttctcagccacatcgacaaggttctggagttgacccctcgggcatgccttaccaggcatcacaaccaccttaccaagcccagtactacccctctaacagtaacggataccctgggttgcctcaatctcaccactactctccttctcaaaaatatgcccatcagcaacatccctaccaacagcaacaaccgcaatcgaccatttcagcctacccaagacatcactcgtatccttcggactcggcgaacgttgcgccaacacctctttacggcataaatcacccattcagagcgtacccgcctggatcaaatgctattttcccctcaaactatgcgcctgttcctgcttaccctcctcccgctcctggcactactcccggccctaacttaaccggtaccgatccagctccggtctacggacgaccactctcaggaaagcattaccaacgtgggccaggaccgacgcacatgccgaatgtcgatccgccgagtcaggtcgagtctcaactacagatgtgggggaacgatgatcctagacctgtctttggtcatcctcctccatcgatgtcttaccctcctcatccctcctctgccggaccggtcatgcctcccgcagccgcggcggcagggttgttcagccgaaacggatatgatactaggctgttcatcggtggttggtccggaccgatgcatatgaatcctaatggtcatggaccatcaggtatagacatgctcggtcgtcattctctcgatgaccgaaagattcaacggagaaatactgacgatggactagttatgtcgacttcttcaatgatgatcaacggtggcattggtggaggggtgagagaacgaagctcgctttcgaattcgatcacttcatccagtcggaatgagagctggataggcgagaaacggacaagccaatctagctcgtcaagctcttcagggattgccaaggaggcaaagtacgagtgtccgcattgtcaaaagagatttaatcggccgagttcgctcagggtacgttcttgcgaggttggagaatttgtgatttgaaacacatgtactgaccatcacttttcctctctggttctattgttattgttatcgcaccctcctctctctcaaattagattcacatttattcgcatacgggcgaaaagccttttgtttgtgacgttcctcgatgtggccggcagttctctgttcaatccaacctaaagtaagttatttcattctttcttcttttcatcaaagataaacgttactcatcttttttcggaccactcttctctcttcccagacgtcacaagaagacacacgagagccgatcaagtttctcgatctcttcaacaagtacaaccgacccgtcgataacttccagatttggtcaacctacatctactggtaacagacccacagcaactggtacgggtacgggtacctcatccggggaggaatctaactttgccagacggcatgacctcgatcaagatggagaggatgatctcgaattagatgatatggaagaagatgaagatgaggaggaccgggtaagagagttggagagagataggccgatagttgaatttaatggtaatatgaacagagcgagttaggcgttcgccttgtggcctccgtggttcccccccctccttttctttttgggttagatctcctgtctcaccagcaacatacatgtgtttcttttctcctctttgttagtttttgaggaagtctggtcccttgctgctagctctttgttctgtcttcaacacccttttctttctacatatgcactacctttgatcgatttctcgttctcgtccttttgttgagtttttgctggaatctcgtctctaaaaaaattagaacattcaaatcaatagacaacgttgttctttcgtgtttttgtgtcttcttttccactcttcgttctcgttctttgactacccttatgctgctggcatcttttcttgtcatttctctctctcttcttttgtctatatctcgcagactaaatgggacggaccgttaaaaccatttgtattcgatagatcattatgccttcatcgctttcctatcgcccccacactctcatccttgttacaatgaagtacatcctgcctttctctggcataccttcagagaccaagaaccaaaggacaaggacagatcgagacagaggaagcagatgccatgatcaccccttcttatcttctatgggtttaaacaggtgagaaatcgcaggaccttcttcccttttcctagacagatcatcagccactcgatctggaagtcagttgatcagaactgcgttttgtgtttccaagttccctacacctcagtcttcatcatctcaccttttttctctctttcttccagtcttttaataaatgagcggttcggtatgatattctcaaccgagataggggtttatatttatgtttatgcttccgtttttctctcttctactattcattgttcgttattcgttatctgtcgtctagatgggtacaccacactcgtgtgcgccgagcttttgatatatcattccagttctcttctttctctgtctcattctgcgggtttcattcttcatcattcgttcaaggagacacccgagtctctatcccgatccctgtcaccatcgttgtcccgaataggttctttcaacaagtgctgtgtatctcccctctctctctcttagccttgattcaatcttagtgccatatcgtatagtacgaccatactaaacgacctgacccgacccgatccagcataaaagcccagttcattccgatctgttccatccacgatatcccagtttcagatccgatcttgacctatttgatgactttgatcttttggtctgatgctggttgggctgaaactgatcggcaaaagctgactcggactttatctatttcgtttcgcaggctaatccatcaagatgtggctcttcatcgaattcatttgtatctaagaaaaaaacaaccgaaatcgagaaaaaaagccagcagacggaagtaaaatccaatgcgagcgacaagaagaagaggaggaggaggaggagggtaatgacgagggaaacaaaatgaggatgtggcacaccatgtacgcatggaggaaaagccgagggtttcgaggcttgactaaggaatgctgatcgagacgagcgttcttccttgtcatcatgaattctccggcgcaaaaggatacacatcccccttgcatgcggcccagcattctcttcaagatctgggttctcgaacaaggagaattaatcgcccgaaggacgatcggatgtttttatcgttacgatatgaattgcttttttgccctcgaagaacaagtatccggtcggaacggaggccgacgcaagatcggctgaaaagggagtgaaggtaatgaatgcggatcggaagaaaggaaaaaaggagaaaacaggaaagatgggaaccgcctggcggcgaaaacttcgggcgatggcggacataccggcaagggcaaggggcatatttgaatgcaggaagatttggcgaggcggaagctatcaagaaggaagaagaagaagcctgattgaccgacgccgggggcgtcttaaccgtagactagaatttaattcgccgatcacgtccagctcggtcgggatagcttcatacccttttcggttgagccacaagtctcgaattgttgttcttcttgagttgacaggcgtgacaatcactactactgtcagcataaatcatacacagagggtgcagtaagaaacacagacaaagacagaaagagaaatacacacatatgcacacgcctctgattcaacgaacaggctcttgttcttgactgaatttgaagcagcaacagcgatgatcacacactgatcgacagacagactgtatcgaggaaaacaatagaagagagagagagagagagagagagagagagagagaaaacctggttgatgaaggattctaacctactttgcctgaacactctttaaatgagatcgtcttccctgtcttctctcgcagtcaccagcactaccttaaggacacagcaaggggagggtatcagtatatctagtgttagaagcgagtgatgtgtcaccgaatgattgtgaggtgtctagtcagtctgtcagattcgtaaccaggaggaggatgttagtgtatgtgtttatatacctagggaacgggtcaaataacagagtccctgtccactttccaaggatttagtcaccatggaacccccccccctttccctttttttcaactcagtcagacgcaagcacgactatcagtggtcagtatctgtgattgacatgttcgcgagagaggctttttctcggccgtatggagagcacttgtgagagacctgtaatggacgatggtgttgtttgagagtctgacctgttctgttttcttgtgatgatcacacccagcagaaagagaagagaatgcaagagagagtaagaagtacaggagcatgagagcaagaatatgggagacagagaaaaggcctcaagcgaacccataggtcacttggggttgtttctgctcgaacagagcgcagtgttgagaaagagttctttcccacgcaaactctctatctcttttttatctatggctaaactattagattaatttctcaacggtctttgagtcggactctatgaacgggaacaggtgagagagtatcatcagactaggaggcgactgaagctatcacatccatcgcaccacggggtgtgagctcgtttgcaaacgatctacagtgtttcctttcccctccaattgtcatagctccgaattttcttattccattactctggatgattctttcagtgaaagagctagatatccgctctttttccgtttttgtttgtttgtttgtttatttgtttggggg

SEQ ID NO: 1093 - DNA, 20029 bp, Xanthophyllomyces dendrorhous
tctatcatctctctgttgccgatgagcatcatgttgctgctgagggcacatctttctccatccaatctctctagcacagaaggatctacttccgtaaaagtgtccgaaattccgcggtttgatcgtgtaacctctccttttccgctcgatctattgcatccgttcgatctgcgcacaaagtatccctcttggctggggatttcgaactaagatagattcagtgcttagacaatctttgaacgtctcgagatctggagtaccggatcatgaagcggggaaaaacgaccggaaagagaaggagctagttcgttctcgatagcatttctctctattgtttttttctttggatccggaggctatgtatgaaataaacatattttacttggtctgggattcgaaacctgggggatgtgcagcgatgaacggtcatgattattaccacaagaggatgagcttttactgaaggaggggagctcctcattcgctcgtcctcttatctctgtcctctgtgttcccaagtgtgatctctatctctccgaaggcttctttctttctcgttttccactagtcatggctggaaggataatatgtgagactggttcgatctcgccgggtcatttagtttgccattttaaaaagtccggccacttcgccctagtctagactgggtacgatagctattcctgtttctttttgcttctaacttcttctgtactacgttctgtgtgtacaacttaagtggtggacatgacgaaagatctgtcggtaaaacggaagataacctcgggtttctttttcctcttttcgaatgtgtataatctcaatagttcagcgccgatcaatgaactatacgtactgttcaggcggggtagcctggggtaacgatcgtgaactgtagagagaatgaccggtcgataaactatggattctcgtgcccgtaaggctctccagtctgagacactttaaagttttctgatcgtgacaattcagaggattgtcacgatcgagaagagacgaaagccaggtacccggttgatttgaatacttttcatatattcttctctctctctctcattttgcctccgcatggtcggcataagaaaccaggtatcggttatcgatcagcgccacgggagtgagaaccagctaaatgtaatgatctactttgtttataataggcttctttaaccgtctttccgccatctggtggcgcttatatagtacatcatatttttatattttaccttcggctgtttaatcaaccttgtgtttccatctgggcgtcagctgggcgtgtctctcaattgagagccaaacatcggctatcaagaaaatatgatgaaaaaaaaaaaaaacccgatggtcggtcgatcggtcagaacgacgagcgtccgtacttgatcccgtttatccttcgaatcgaagccacgattaagagagcagagaacgcggctgatgaaccggtctcaactctggtcgtcattctatcatatttcgataccgtgcgctcgaaggttcttgcgccggtgttgacggttagaacaatcggcaaatgagtgtgtgattatgtccgtggacgaggcagatgatcgaggcttgctacatggaacaatcagccactgggcgccgaggggattgaggatgtgagtgagggtgagagtgagagtgagagtgagagtgagagtgagagtgagagtgaggatgggggtgagagggggagtaagtgcgagtgaaggtgctgggaggcacaaatcatcaatagttgtaaacgaactgatagggtggtaggcaacatgagcgcacaaagacagagcatctcacctacactcgaaccacatacacacacacctacacaaaccgagaccttttaggttttgaaatgaaataaaaagcgaagcagaagagaacagaaagataaataataagaagaagaaaacagtttgatattcctatatatgcctaccgattctttttcctaaactcgatttcttcttccgtcgatctctccattctcgtccgtttccccgacagcctgcttcttcttctcgtattccttcatccttctctcccattcgcttgagtcccaacgaatcgaagaaaagttttctctttccttgacaaacacattcgttctcaaactcttaaccttactcaactagacactctttataacttcctccttctctcttctctcttctaccttctaccttctacctcttatcccaactcttttgttcactcctatcaacaacaaccacccactcacaccgtcatgcaatcatcttcgtccaagaagactgcttccaagaagatccctcgaccttccaagtatgtatttgtccttgtgtctcatgtgtccttcgcccaagctgatctttccctctcctcttccttcttttccttccgctcgtcctctcccttcgcagctcttggattctctaccgttcggccacgatcagagcattcagattagcagagtcagaaggaagagagtatcccttgcctccaaaggtgctcgaggcattacaacaatccggacatgtgttcgatcgaaccgtcgggatctgtcgtacatcggccaacccgatcgaactgcagaccattatctctgcgatgtggaagcaagagagcgaagaagtcaagaaagagtttcacgcaatgagcgcccttgttaagaaaaaggtatgtctcttgcgttcttctttgccattgtttacttttttcgtctcttatctaaactcgtattttttttaaaccactccttccgttcaccttctcccaacctgccgtcgtatcctcctctccctcggcgatccccgttgccaacctgactgtttgattctcagcatgccgagttgtatcctgattatgtgtatgctcccaagcgaaaatctacatccacctcgtctgcttttagttcccagtcgacagtgaacactgtatctgcttcgacgttgtcctcgatacctacgttcattaccccggcgtctcctttggatcacagtgactgtggttcttccagccaatcgtccccaccggtctcgccgtttgccatgtcctttcctcttggacagcgtcaaggacagttgcaacaataccaccaacagcaagagcattgtcaccaacgacagttcgagaccgaccagtctaccagattggtcaaacgacgagtctcttcggccgtagtcaacacactatccgatccttgggcattctcggcacagcagtaccttcaccctagagcctcggtctcttcgtccgacggtcatctcagctcgtcgtcctataccgaccaagccttcccagtccatcgattaagctggtctggttcagacatgcccgacatggttagtcctcggcctctttgggggtttctttcgtttcttgtttcacttcctgctgtactgagctgctgcctcatttaaacacctccagacctacagctcattgtcagactcgagtacatcgccttgtcagtcgccagcagcttactacccatcaaaggattacctgagtccaatctctgcctgtccgtcccaggcggatgagttcaactttggatcatcctacccgatgtgttcctcgccctcgtcatcatcgtcattctgtggaccggcctacacgtttgcgccttccttctccgagctttctttccaaccggcctcggcgacgcccacgaccaccacgtatggctaccctgccgtccagaccaacaaatcatcctccacgttcttgtacactgatccatcttattgtgatccttacgagaccgagccccaaaccatggtctacccggataacatcatcggttggactccgaccgagtcggcgccgaataacggtgtgagcatcggtacaggtgtgatgacaacgtcgttgccaaccacgatggaacccgcttggtctactggttggggaaatgagatgatcgaatccgttgcggacgatcagacagtcacttggtcgctggtcgacgattgtcttctcccggttggtccggcgtgctaattggggatggggaaggtaaagagaaaaatcaaatacagtttcttacccttcttttcctatttcaaatagactgtttctactattctctattcttctcgtctccattgtttcttcacgaaattcaattagtcggtcaatcagttattcgggtttattcatctcttttcttattcctgtattttctacgtccttctacttcttctacttcttctacttcttctacttcttctacttcttctgatttcttatttcttatttcttatctcttatctcttatctcttattcttctcttagagtgtatatacccccaatcgtttgtctcctctccccagagtcccatattttatctcaacacaaccccaaagatcgattgcctgaactgtaacaagacccgatttgtcttctgattttccacatcacgttctcatctcctgtcttttcgtatccatattcatattcgttttttctattcttttcttttctctccatctccctctatcattgataaatgagaaaagttacctcatttgtttgttacaaggagtatgtctttcctttttttagacagaagaaaaacaaactaccgtcgtcacaaagattcctattgatgttggaaccttctttactttattttctctagtccagtggtttctcctctatatctaaacctccaaatcacaatccaagaacccaaaaggagagacatcaacaaagggcgaatgaaaagccacagagaaaagttagaaggtgggctgaaattaaacatgatcatcccaaactgttctttccacatcgtttcctcagctgggactaagatcgaggctgctccacagtttcggaatgtttatatctctagaggaaaatgcatctttatgtttgtgggagttctccatcgtgagatcaatataacgaacttgacccgttccatcccacgttattgtaatttaagtttggatagtttagtcttttttaatctggtttcgctctgggtccctcgggatttgaactatatgcttcgtaccctttatcaattgggttcattgttgatccgttcgccgagcacgtattcttttccatctaatttctctttcaactcttatttaatctctgatccgtctcctttgcttatctttagaaatcaattcagaatattacatccagttatattttaaaaattctctactcaccttctatagtcttcgtttgtcctttaaagttcacatcgccagatgctgggcgttttcgaggtcagacttgtaatgccacgttgaactatacgaatgaaccgtcgacctggaaagttccagtaaagttcccaattgaaagacgagaacgttcgggcaagtcggttattgtttgttttctttctgatctttgcgctttcttctgttttaccaaagaatcacgccaactgatgacccctcaagtcatcttccatcattcccctcttttccatatctttggacccctctttctcttcaccttcttttccttcttctttgcccaactttcatgcaaacgcaaatgagtctcaaaagaaagaagaataagaaaagacactaaagatcaaaaggtattcatgaatcgttcattcatcattttttaatccctcatctcttttgaaaagaaagaaagaaaacaccgtgagagggttgagttgctttatgttccggtcgtccatgctccgatcacaactccctggattcaaaggagattgaccgtatggagacgttgaaccagaatcctttctttctttgtaagagttccgggtatatttcgtttctcttcttcgtgtcttccttctcttttctttgaggatgatggttgctgtgttgttgacctttcggtgtctcatccccgtcccgtcacaccctaggtcattccacccacccattcacatctatcggccatccttctcgatcggaggtctctttgggctgattctccctcccgctcttcatcatcggtcgaaggaggagaacattaggctagataacgatcgtccactgatcgaccgggtcgagccttcttcatccctctcggccgccgatcgtcctcggatcatttcgtcttggccctggccgtcacctccgtccgtggccgcttcttcttcttcttggtggtcatctcgatcactctcgatgtgattacctacgatggcacccataggttgaccgccaagtagactgtccctgtcaacagtacgcacgcccgtcgaccgatggccactccatagggaagcattatccaccccgtccggtccaccgaaactgctagacagcgtgtttcctccggtcaacccgatcaaacctatgccgccaccaccggctgcactccatcgactctcaccgctctcccaagaaccttttcgtctgacagcacggacggaagcctgggcgtcgtccatccatccgagtcggccaggtccgccaaacgtgtcgacgctccgtcttctcacagacgcacctccgccgaggaacccaggccctgttctttctccaccgccgccgccgcctccagggccggagagggagaacgataggctctcgggtcggtcggttcctcgtctgctcgagagggaatgtgcgatcgaccccggaccggatttcccagtgcatgacccaactccggccccggtccgaatcgagccgttcgaaggaaggacgccggtcgagaagaacgaggacgaagccagtgtgagtaccgaagcatcgtcccctggtggagcggccgggttcggattgttcctcacgtgtggacgagagtgaacaggcggccggtagtgggtcgggccagactccgactctatatttgccgtcatcggactcgagctttgttcttcgtctaccagatccgtcagacggtctgccagttgatcgatcgtcggtcgatgcagactcgagaaagaagacgcagaagagggcgagagggactggatgtcttccagaggaatgagtacgggatgagcgtatgaggtcgaacgggatacaccggcagatagagtccctcctccggatgaattccccaaccgagaaatcggtcgacgcgatggtgaaccctgtctggatctggaacttgggattacttgagggtattggaaaaaaaggaggaaaaaaagaaagatgtttaggatagacaataaatggacattcatcagtttttttttgagactctaatctattctcgcagaaagacaaagagaaacacatgaagccacttaccaggagaaagtttcaaaagatcgtttctgagatcagcttcgtcatcagaagcgacgaccgagagatggagaggtgaggtcgtggtcgtcgatgagatcaccgagtttgccgcccagcttctccgtcgtctatgagccgtcgtctgaggaccaggaccaggaccagagtgaccggcaggatcaacagccgacgttgggacttgtgctatatgcgccacttgactagtgatcactactggcatatcgtccagactgatccgtccgtcactcgaggctacgctcgtcacagccgtcgtttccgtccgagcagccatgctgattgaatatcttcccaatcgagtcgacgaatttgccgtcgaattgagtgttgaattagcggttgatccagatgagaccctggataacgacggaaaccttgatagactcggcgatggtggagaggacagacagaaagctcgggcagaggcatcttcatcggcagcaaacacgattgaagggccgaaatggtgattagcgatgcccggagttagatttgatgaagcattcgagtcaaaccgggatagttggttatcagaggtagagtatatcgagctggacagataggagtctctcgaggtgagaatcgttggctctttgaacgacggagggaacggatccagagaggtagcgatactcagatagtcgttcgatcctgtttccccagtctcttcttcctcctcttcctctccttcgtttccaccagcctcacccgaacgtctagttgaccgagctgctctaggcccgttacgcatcaatgcaatcccgtttgtggcgacaaatcgaccataatcacttgtgccgcctcgatcgatcttccttcttgctcctgggtcgatgacatgtgtagcagaaaccgtcggcaaatttgccgcccgttcgagatgactggatgaacggactggaacagtcttaggtggtgcagccaaagtctggtgggctggaatcgtattggacacgccgacggtactactccgtttgagtcgacggaaccaaccgagcaagggtttccctgccttcttgccgagactatggctgggtgagtatggagaaacccctgtaggatgtgcacccggacggataggttcgaccggagctttcggtcggtcgaggttactcctgttcgcggcgaaccaagggcgagagatatcagcgggttgtctgatattcaatgccgaagatggacggtctagtaagggagtaggacgatctgctcgaggcagtcgaacggaagccattggttcagagatgataactgtcctgctcttgttcttcttcctcttctcaacggttgatggtagttacaatgaccaagacgatgagaaggcgagatttaaattgtgcgtatctttctctagccgggatcaacattccattgtatcttgttccctctacacttccctgcgatctctcagtttcttgctttatgcactgtcactgtctcttgtagaggccgatatggatcttgttattctcatcctgccttgtaccctcataactctggctgcaagaaacgtcatgtggggataaatctttggcgcatgttcggtatttatccaacatgttatccatgctgacaaacgctccccgttcgcctagcatacaggccgctctctcgcctccccacttagtcgaggccgtttagcaactggagatgtgttcacgtccacatccgcgcctacccctttctctttgtccttacactcgtctactagtggtgcgacaatcgcccttccgggtgatgtaggcacgccagaaaagtccatcccagctgattggctctcggtccggtctctggccggtttagagtaactgcttgtcggatcgtcctgaaaccaaagcacaaaaattgtgtcccgaatactttgatgtatcagaagggtaacggatatgcagattagatataaaaccattcccgggacatacagaaagaaaggatttcgttcgagagagatccagagagccaaactgttcacgatagttcgatagaagatgatgaaggtaggctatctgaccgtgcgaggaatcaaggtcggcactgaacgaaccaaaaacgggttaacgttcgggtgtctgacccgatcatgaagcctgaaagttagacggacgtactcgagagctagaatcgcctggtgacaatctgttcatcgcgtttcatggatacacataaaccaaaagagccatgataattgttccatcagttttctaccccttaggccaagaaattgagaaagaaagagaaagagagagaaaagcttaccctcaaccaaggctcttagagtattcacctccagatgatcctttcctacctctgccaggacatttcctagttcctcgttttcctcaaccagcatctttaatcgtcccataactttcttcaagtcaacccttcgtgcagactcgataggatcagtcgggttcgatggaccggcttggttgtccaataaggaccgaagttgagcgttgtcggcaacgagcacgctggtgatctcccggatctgagtcaatacaggtaggaatgtttgaggtacatcgacagtcaaagagcctgtcgacgatggtcgtgttggcaacgataatgaggaagatgacgacggtaggggaggtagtgaggataatgtagatattgatgattgaggatccttagggataggagacggtcgggcggtaggaatggaagtgaggagactgatcgtttgctactaacccccgctcaaatccaggatcgatcaaaggaaagacacggtcagttccataagcacgcatatttgtgtatacatgcgcgagtacgtatgtgtacaagtgtgagtgtgagatgcggtcccttgagagctagaaaggagaggaaggggaggacgatcgttcggtcgatttagagattctgtgatatgagaagattaacatacggtcaagtcggccacttctttttgtttctgttcaagctggtggatgagttggagctccctagcggtcagaggggtcgacatgtcgagtggttcacccatggacaatgttgagagtttccctccggttctgatgaaccacggggttgagggtgatgacgaaggagataagggaagatggtgaaacttctgaaatctttgtttatctatcggggtgtttgtttctttttcccttgctctttcttcttcctttctctctctgttctttccttcgtttgtctcatctctttcattctcgcatggtcaaacgcttgcataagatggaacgacgaccaaagatgaatgaactgctaactgcccatcctttacacaatagaaagcgcaagctcttcgtcgtcctgccagtgtgatccgtgggactttgacaagccctacttttctcccgaacacagtcgctcgacatcctttctctccctcactgcagtcgtcagatttcgaatccctttctcttctaccagaacgacgtcctcaatccggacacctcccatcggttcatactcagccaggacggacgtgttcaagaacggcgaggatcgccaaggagcgagcacgtgaggggaaaagtaacatcccggctcgatcgtctgtcgattagccaaattcagatgaacaaaggagtgatggatccagtatggccatgtgagcaaccacagttcaaacacaattcgagagtgtgtgaaagaagagaggaggcgtacaattatcatgccctgctcgagaggaagtctcaagcgaagaaacttatatagctgagggttttccaagctctgagcagggatagtcggatttgtcgccggctttgaagcggaaggcacgtcctgatggaaagtttgaggttgaaacaacacttggtatccggcattcatcttttcaatgcaaaactgctccgagttgagagaatgtgcttacatgaacgtctagtccgatagaatgacctatatccagatgagcaagtgggcgtcaggtttgagaaagaaaaatgttgtctccatccaaccaggtgtatcgacccaagatgacaaagaatgtaacgaaccaagtccatgagggaagaatccagtggaaaccccactagcgagaatttcttcctctgttccgttctgaaagatgccgagcctcaaaaagttactgatgagaattttgtgcatcagaagatgaaccgtatcccaatgaatgcctgctttgatgatctcttctgccgccttttgcatgtccaagaccaactgatagatctcgcctgaccgctcggtgaattttccgccgttccccacaggcatcgtcctcgtcacgtctgccccatagcaattccattcggttcctgcatcgatcagcagcacttgaggtgcccagtcttgtcggagtgcgttgacgtctaacggatccggttcatcgtgcgcatgtgcctgagcgtcgccgttggtggctccatcatgggagtggtgatgggaggaggaagaagaagtggcggaccgagagaacgaagacgaggtgagagtggtaggaaggtggtgtgtgaacggttgatggttgcagatatagtgcaaggtggctgcccgtgggccacctgcaacgataggcatgtaagatagatgcttggatctatgagagatgtgcaaagagtcggtagatgttgtttaatacggagtcgctctcagttctaattacgaatgagcaactagaaggatgaacataccctcctcgtctgcagacagcagtgaacaaagcctcggcatctccctcaccttcaatctcccaatcctgtccccccaaatcaagcggcctcccatcgattcctctcatcgaggccctaccaccagcgaatcggccaagctcccgcatgaccacctcatgggcggcgctggtgatcttgtttgcgcgttccatgttttctatctcgaatggtgtcttagtcagccgagcctggtggatggcaggaaggagactggccgagctcgcttgtttggagctatgataggcgttcataaaggtcggcagagctggaaataggagggttggtgggagggtatggatctgatgagtagaaccaagagaggatacagtggactgaagagacaagattggttgaatgaagtgtgtctcaaagagcgcagaggcttcttctatcgagggaggtggaacggaccacattttcgagtcttcgtccgcctgagggacgaaccttgttgaagcgcgaaagatggcaaggaagcagacaggagaaagcatgacaaagtttgagatcagtatctaggaacatgagctcaggaaacagatacaacagaaggaaagttctgaatgagaaagaacaaggcagatgctcacagttgatgtttcacatcctggacgttcccagaaaggtacgagaacgatatcaggacagctgatccggggatatcacacccggtcaagtagtaaaagttgctctctggccgatggggcatctcgcctacatttccagatagaccgttcagattcaagccaataaaacgagccaattttgggtttcaaacaaccatcagacagaaaggtttcctcaaaaaagacacgagatcgtgtgtgtttcggcaacctccgaagatgagcatgtgaacggaatgatgagaaaagaaagaagaagaaggatgcgaactaacggtcggtatcatttctcattggagtttcatgagagacaaggagtatcgcatggcatccgtctatgatctcgtcctgagagacgagtttgtggacgactttctgtgcatctagaacacggagaaaagggaggataggacgattagccggtcgacgctcatatccggagcggcagaacagaatgacgggaccgacgaaggatagctgtgtggtgattcaatcatacgacgggttagccaaagatcataattatctcagcatcaaccgggaccgacctggatagagcgacatgatggattgcttgatggattaggatgggtggatggatggtagaggcttgggagagttagaggtctatatggtggatatttgaatacatagatgaatcatatagatgaatcatatatgacgcaccttagctaccttagatagggctgttcccatccaacctcgccttctctagatccttcttctcatcctcgcttgtccctaccaaaccatctagctccttgtgtctttgccactcaacagtcaattagaacctacatctctctcaatatggccgaagaagataactctgcaggagctcccgtgagtttggtttcgttatggcttatctggacggttatcacttctctcgtcgtgtcggagtcttcctgtcatttttttcctttcccctggtcgagccttgaagatttcagggcatgctatctggagagggtttggagatggataaggcaggacggcatctacgctcagcccactgtgaagggtaaaagtcaggcaggcgatctagaagactggtagagatcacttcaacatggcttgagatacaaaaagacacgctggagcttcgctcgtccttctcgagtgtgattttccttcccctttcatcttgttttctatgaacgagaaagatctttccattcgactcggatagagtgggctatatgctacattcgtcaacgaaactggcatcggctgcgatagccatttgatccccatcttgacatgtcttctctagattgctctcaacgtggtttgattttgtgctgaggctgattatgtctagaagaatgtctttatactgatcagtcttatattttattttattttatttcttttccctggcgtctccttatctcaccaccatcacgaaatgaacggcattggagtttactaggagactgagccccatttcgagcccgtccacaagctcaccgagcaggttgctgtcgctaccggtgaggagaacgacactgttcttttcaagatgtatgttcccttcatgttctttctttttcctttccttttttttcctctttttctcctcttttggtcggacataaacatctcagacggacagaatgttaccttcctcttctcctttctcttctcagccgagccaagctcttccgatttgagaagtcttcttccgagtggaaggagcgagggactggagaggccaagattctcaagccggaatctggcaagatccgattggtgatgcgacgagataagactctcaaggtctgtgccaatcacgtcagtgagtgaactttccgttgcatttagctggagacagagaggagacaagacagcagaacctcctttattgcacagtgctgatcgcgtatcaacgcatacagttaccaccgacatgaccttgtctcccaacatcggatccgaccgatcttgggtctggaacgtcgctgccgatgtctctgagggagagcctacccaggagactttggctatccgatttgccaacgccgagagtcagcacctttttcctcgtcacttccctcttctcttgtctgtttggatgctttgagtgctgacgctcaaatgagagggtgttctcgtctgtgatctccagatgctggtcttttcaaggatgctttcgacaacgctgctgaggagaacaagtctggcgcttcggccgagaaggcttccgaatctcccgtcgaggctgccgctgcctccgagtcgtcagtctttctttatctaaagtctgccttccctctatctttttgagcttacctgagtgtactttgggtttgcgctatatgtagagcacctgttgccacgaccgaggagaagcctgcgactcctgtcgttactcctgcgtcagtcctttcccgtgtatttcttctctctcgttctggtttgacatgattacttaatcgccttcttcttttcctgttactctcaccgatcgtctctgttctctttagtcccgagccggaaagcaaggaggacgtctcttcgcccgttcctgctgctgccgttgatgagctgatcaaggaggagaagaaagtcgaggagcaggtcgacgtcaaggcccctgagtaagtcgactgacgatgtttttttcttagtcacagttctctttgttgaatataatctgcaaaaaagggtccgacatgttgagctgaccacctgtatctgtgctatctgccattgcgtctgtctcgatcaggtcgtcagccgaagagcctaagaaggacgagtaaaaaaggcaaggctcggtgtgatctggtgtctctgttctttcttttgctacttttctgctgcctcgttttgatatccattatgttagttgaaagagtatacctgtgtttgtgtctgagtggagagagaacagagaaaggcgagtcgcctacgtgagagccaaacgatgctgcaaccctaaccgaatctgaaacatattcttatctccttctccttttgttcggaggggagagcagcagcgaaacaccgaccaggtctgtgagcgacaagatggattatggatggagagagggtatgtgtgatacaacgagaccatggagtgagagacagagagaaacaacaccaagagcaccttaaaaagcagcgtcacaaaaaaatatgaaactttccttttgttcgctttcttcttgaccttgaccttgatcttgatctcaaccttgaacggtctaaaaaccgttacacctttcttctcgtcctttctcatcatcgactatgagctctccctcgcctccgtcctcgccttctccggtcactccgttgaatcgtttcagaaagtccgttcccttggaacgtcctgtaccacgcgccgacccaacagccgccatcgcctttaccgctttcgtcctaggctccggcttttctctcgctctcgccctaaccgtcccactcctcataccagactcgatctggtcgcttgtgagctctatagagatgcaaggcagaagattgatcaggctaccaacctcagctttaccagcctatgttgcagcttggtgtttgttccatacgttggagtatttggttactgctatttggaatccgagcaaggtctactggggctgtatgtcctccttcttcttcctcttctttccgtttcttgcgtatgcttatgaactgttcttcaattcatccttttcctcttcttgtcgatagcgttccttctctcgaacggaatggcctacaatgtggcatcctccctcgtcatagtcgaatatgtggtcgagtcctacttcttcccctctttgaaaacagtcggctggtggacatatctaggactatcgatcgttgttgttggtcaatctctaagatcgctggctatgattcaagctagtgttagtttcagtcatcacgtcgctttcaggaagaaagatgatcatgtgttggtcaagaccggtctctacgcgtgagtgattcttccctcgacatcaatcctatcgtcaatttaacatcagatatacgaaacaagaatcttctactaatcaactcgtcctcttccttggttgttcatcatacacatatatacatatccgtgtttacgaatgcgtgtaatcctttcgagcaaatacagatacgccagacatccttcgtatatggccttttggtggtgggcagtaggaactcagatcatgacggcaaacccgatcatgctcactttattcgcagtattgctttggaggtggttcttcaagcggatcggaggtttgtttttctctctccttctccttcttttcccttgtggcttgtctggtttcctacgtgcttctgacgcgctctctttgctttctcttcttcgttggttaaaccaaacctgggctgacacctggctacctcatacagaggaggaatttctactcgtccgatttttcggacaagaatatatcgagtacaggaagaaagtcactagcggacttcctctacttcgataaatctcaagaacaagaaaatctcaacaagttagaagggggaactttctcgtcgtgcaatcctttctccttcggctatagactcttgcctctcgagagcctttttgaaagattctgttccgtacaaatacaatcgtctatctttccatccctttccaccacccctcacccctcacccctttaatccattctatcctataccattgaaaagaagacgaatatatgtgatccttatgatatataacgatgcgcgagggtcaccgttcacccatctgctaataaacattgattgtttcgtaagatcgagaaacatgcggagccttgttgaggtatgctgacacagacagcctttggcttctaaacatatatatatcaagaccgagagatgtccagaaaacagtttctttcaatattctaaatgaagccaaagcctaaatgaagtaagattctcggacgttgcgcatgatagatgaaggacataaaggcgaaacatagggtatgcagaagaaggttagaacgacgtccaagtctatgtaggctaatcgaaggaggtgttatcgccagacaagttgaagaggtacgagatccattcttccacccttcatgcgacagtggggaattgaaagatgatcagcattacacgtagttcaccaaaggataccccatgaccaaacaagactgaatgaaggtcgaacgaaacagaggacgtactcgaaaccttcaggcgcagagttccataaacccgtcataacatcatccgacattccactgaggccgactgagggctcttctagtctatccggcgtactgggtcctttcactgtgtccgttgtatatctaccagcccctaccctcgctccctgcactaccgactctgctgcctgatcctggaccacgttcccaattctctgttcttccgtctgactgtagccaaccgggacatcgctcgaaccgcttagtggccatagttctgacgggcttgccggttcaaacacggatgtgcttgtatcgtaggcagccggctgatatagcattgacgtgcctgacgtatgtatcgaaggagatgggctataggttatgtgctgttgttgttgctgttgttgttgctcttgctgctcttgctgctcttgcggatacagccgattgagtttgggcaaacgttgagtagatggttgttgaagaccatgtagtgggtgcccaggcggaatcgaatgcatccgttttgttggtgattgcggttgagaattcatttgatacaagtcgcatcgggattcaggtcgggtgctcaacacaggctccaaagctagattgcagccagctatagagtatccaacagatgaaggtggatcattctgccttgaagagacatcaagatctgataaagaaggtgcatgttctgatggtagttcattcagacgcccatccggattggatgagctctgctggtggtcacaggaggaaggcaagggaggcgtaaatgtggccattgtgctctgggctggcattgtaccataaatatgacttgaaggtagtcccaaagtcgaccgtggctcatcccggtgtaatgtcgaattgggctttgagaatgaggaggctgaaggagtaatcagatgatgattatcttgagggttccttgtgaaatcttcccgattacgcttattcgtcggattagttccttttgtcacatgggcatgttgaactagtcccatgataatgtctctgttagcgttcgagattcaacccaagagtgagcatgcgctacaagcaagtgggtttgcaccttcggtaaaaaaatcaagttgtagataagcggtctactcacttgagacatccagccaccatccacgtcttctcgtagacagtgaacatctcaatgatcttggagatgtcgttcagtctgggagatgcgaagaaaggaaacaaatcagtggacacaaagtggaagcaacatcatcagaagcgacggtatcagcggcggcagcggcggcggcggcgacagagacagcgatggagccatgcgaagagagaaaagaagtcagggtctcgacacacgcccaacagagaggggacacgaaaccaaggcatggaatcagcagaccacgtacatgcctctagggtcgaacgagctcgacgaccgcttcccgccccacaggttgctgcatcagcccaggccaagaacaaggcagacacgcaacgagacacaaaagcgagtgagcacatgcccggtcagcacacacagccagacaagacagcactcacacagccagaacagtgccgaactggaaagccaccctgatctgttgcggcagcagtcgacagcagcagccgacagacaacgacagagtggaaaagcatgagaagagcaaagcatggaaaaggagaagcacgggaaaagagaagcgtcagcgtcggcgcatgcaggcaagcaagcaggccagccagtcagccagtcagccagaagcaatctagccagccagccagccagcctgatggtctgatggtctgatggtctgatggcctgatggccagatcgtcgacgtacacatagcacatccagattgtctctgatgccgcgcttcgagagcgcatggagcgcgttcgcacccgccctggccgcgttgctgcagactgtcgagtcggaagaacagagagggaaggcagagagggagcagagagggaaggcagagagggagcagagagggaaggcagagagggaaggcagagagggaaggcagagagggaaggcagagagggaaggcagaaacacacggcgtcagcttcttggtcaggtcaacggctctatctctctctcgcacacacacagagcacagagcacagatggactcactcgcaagcgatgggaacgacggctgcgatcggtcggcagacggcgagatgaacggccggtgggtgtagatctggtcggacaaagcacaccagcacaccagcacac

SEQ ID NO: 1094 - DNA, 10570 bp, Xanthophyllomyces dendrorhous
cacacacacacacacacacacgtcagtctcgatgttgcctgcttctgacgcgcaagaaggcagagagcagagagcagaccgacctgggcagagtagtaggcaacatagatatgtgcgctctggaggaaccacatatcatccttcctgtgcggatcccatctgggcagacagaggaaggcgaggaaggcaaggagggcaggcagatacgacgcaaggagccagcatcagaaagcaagaagcagcgatcagcactctgcactctgcactctgcactcagcggtgtccattctgcactctgcactcacctcagatggtccggcagctgctgcacccagttgttcagactcgagtcgatctcggccacgatgctgagctgtgcttcgagcgagtggaagtctttgatgaccttggacttgttgatcgcatactgtgtttgcacaggccgtcgtcagacaagtagcacatcagacacagcacactacacacactacacacactacacacactacacacactacacacactacacacactacacacactacacacactacacacactacacagaacagacactcacaatcgtccgcagacagtacccatggatctgcgccagcttcagcagctggatgaaccccccgatcttcgacggcttgccctccggctgccggaacgccagccccggctcctcctcgttctcccagtactcgtcgtccacatcgatcgggtagtcgacatcgatgtcctcgtcgtggatcgccagcggccggcccgtgctcccacagagctcccggtcggccaggtagagcgcccagaacgcccgcttcagcatctcgccctccgcctttggcttggaccgaacgacatgcttcctgtggacgcccatgtcgacggccgtgcggatgcccatgccgatacacatccaggccacccggtggtggctacacgagccgacaaacatagcggcaatctagatccgataacagacatagaaaagagccaagtctgagaacagtgtgcaagctgaaggagagaggacgaagcatgcgttctgagacgtacactgatagcctgcaagctatatacacttggatctttgataatctctggtctgttttgagcaaactacacgtcgaaaagcaaaccgaaggttgagcaaaatttcgttgaaaactctatacgaaagaaagagagagattcaaagtacgaatcatatgcgcagaagaatgaaaaacatacttcgttcatgtaggcccatccctttccaaacctacacggagaggcaataaatcaccagatcaagcaatgcacaccgttttaagaattttgcccagaagaagaagcggaagaggacgaaacaaggaaacgtctgacaaaacaattctgaccttctctctctatcggtctctgtccactttccatcatcgtccgatcgattcgagatgctgtcctccagacaccgactagcactcgcaaacaccaccaaacaaagtgacttgaaatcggaattcgtcttgtacagctcactagcaaattcgcgctcgaatgtcggtcgatgaaggatggaaatattgagttgagctcgatcaaagtatatctggaccagatgcttagcaaatttaggcgagggccagaccgaagaaagctgaggagggcgcgaattatgattaaagacttcccatagtggaggcatccagtagagggctgagagccgtatattcaagataaggacggaaggtcaactagcgcactttactttgttctctattaagaaaagaaaaagaggagatgggtagataggaaactaacgtcttcgattggagttcatgtcactctcgaacgtgtcctttcctatgtgtgaggatttgttttcgataacacaatgaatcaagctcaatccggatgactacagttccgtcattaagtaaaaccctcccatccttattagttctggacaaatggtcgacctcccacttcaactctatcttctgatacatctgtaaccaacatacctttccccaaaaagcattctgaaagtttgtttgagagtcatcgctgaatttgaggttcttcagtgaattcaatatagacgtctcatcctcgtcgagctcgtcctcttttccgtcgtcttgttcccacggcttgactgcctccaagtgtgactgacctccaccgggcgaatcaacgagtgtatagggtccctgctcgttggcagttgaggtatatcgactgggcatcacgcttgtttgaggaggaagcactgtttcttgatatatcgaagcaggccgggataccgacggaggagcctccactactcgtggactaggcagagccgttgacgtaactggttccacataatccatttctgggagaaccgtatccggagcgagctgtcgttcgcacgaatgatcgcagacaccgaaaagagcaaagagaaatatcctaatggtcagcacgttcctccgtatccacaagggatccgtcaggttgatttgagaacttacttgaaggatcagttgttccatccgtttcagccgacgttccatcgattcgatatacgcgtcggatggtccatgccttgctgcactgtcgacatacgagcactctctgtctgctatttgacaattcttacactggatgtttaggccagcaaggccatcgcatctgatctagaaaatggatagggtatcacaggtatcgtcataggccaataagtcgtacgagatatcaaaagagaagcatgtcagaccatggccttgagggatgccgtgcattctgagcctcgttgaatacagatagagaaccctttgagaaaggaggaaacgaagagaagactggacaaacctttcttcgtcggcaagtatcgcctttcaaagtaagggaggaagagacgaacagtcaggcagaaccagatatcagcattcatcgtcgggcgattgaaaatgtgcacacacttcaaaggagcaagaggcccggctggttcacttagccaggttcaaatagtgggtaaacaacaaatagctcacaagctcgttgaagtttcctcctcttctcctttgaatcagacatgtttgggttggtatctgacgatctgctggctcataagagttttgggattttcggcggagagcgtcgagcggactgtcggaagaaagatgatgaatccaataaaaacgggggggacaaaatacagaggaggagcagggatgtcaagtacaggatagatagacttcttcttcgctacttgttctttgtctgatgggtggatggatgccttcgcctttgctttcgtgttcgttcagctttcggactggtcgttaggacggcactcacatctcagcactttctctttggctttgtgagaacttgctcgttttcttcttcttctgtgtatgagagagaaacgaccttcatgagactctcctgcttagctcttgctctgagcattctttggattcaagtcagcaaagatatcgctgatccgacttctatagcatggtatgatttacatggaaagggaattacaatccattcgacctttgaattaatcatcttctaatccaatatcaatccctccatcctctccatcatcaccttctgtatcaccgacagtacctctacccgagcctctcgcattcaaaacaacctgagaaagctccaccatccctccttctgctctatcccatctcgtcccctcgtcctccatctcgtcatcaccgtccaccttgcgtgtccgtttactcgcgccggtattcgatcggggaagaacggacagactccgggctttccaggcagagtagtgatccctatcttcgtccgagtcttctccgtcgaacggggtcggttgtctcaatacagacggagctcgacttcccatcatgccaggttgaacgcttccaccggaacgtgaagaaggcaggggctcaaacgaagaacctgatcgaccaaaagaaggaatcgaaggcgtagagcttcctgatcgagattggttcggtggaggctgaaatggtgtggcggatgagccggtagagaacggggtggaagatgtggcgcgggatgtaccagaacgagaccgacggatggagtgagaacgaggcatgtagtgggatggagggaggagtgggaatggctcaatcacaagacacagttgtttggagaatatagtgaagcctaggatgggacaagaagatggtaaatcatatgtaacagcagagtatgttctgcaaaggtagaacgacgaaccgttgtaagagagctggagagccggcttgaatgttttgacatcctcgtcctcataattcataccaccgaaggggacgtcgcgccgatgatattcttctggaggctcctctgactcttcgtcctcctcagggtggaacaagcttgaactcggctgagcaatcaatgggagaggaggcgaaggagagcgttcggccgtttcggatccagtctgggccaacaaggcgaatggatcgacctgggaaggatcatcagggtcaggtttgatcacagggatcatagctttcgttggaaggcatggagaaaaaaaagaaaaaaaaggaaagagagcccgagggtatctatatcagaggtaatcctaacaaagacaacaacacaagaacattttaaaaagaggacaggcttactatgatgggctatcgaaccggtagttgagtacgttcttgaagaaggttcttccgaacctgatcgttcgagacccgttccacctctcaatcgggcagccggttgactctctccagcctctgtatatccatcttcatatatgtcatcttctgagcttccctctggcctcctccgcttgttaaacctactctggtcctgaacgccaacactccgacttttctcacgtccctgtcttagactcttcgaccgacgactccctctgactcgcgcgtcctcttgctcgtcatcgctatggttagatccaagatccgcgactggtccgaccggccgagctacatagcttcgattcttgagaagaacgacatggctatgatcagtctgacgaagaaagtaggcgaactggtaggtatcttgaggagagaataagccgatgatgtcatcggccgtttccaaatcgagaacttcagcacacacgaagagaaggcaacggaaagggaaaaagaggaaaagacaagacagcttacctccccgatgaacctcgactgttgctgtgagagtggatttgctactgctggagttggtattggcagagatgctggcttcggagacaagtttaggaataattctgtgcaagtgtgattggtagtagggattcggatgggaagagagtgaacatcgatatcatgctcgagacgtgttcgtatacaacagagagtgagatcaatcaagaaaatcacctgggtcggagatcttctaatacattctgaagagttatgtccgtcatccaataaacatgggcagggtcaaggtctataacaggccaagaagagagaacgttcccaagcggttagccgacaagaacgaagaagatgactcttcgatgaagccagactcacagacatagagctgaaggacggtattatcacttatgcgaagatagtatgcgttcctagttttaaatcccatccttctttgctggatgtctggatgaatgaacagatgaacagatgaacagacggatggatggatggatgtagaacggttgaagcgaatgaattgaaacgaaattcttcttctgacatccacacaacatagacaacacacacacattgcatcgcacataaaggccacaagtttgtatatacactcggataggatagaacaggatacacgctaggataccaggatggacgattcatcttctagattcattgaggaccatcctcttgctcccatccgagcgattccttcttgctcactgctgagtatagaatatccaggctatattatctcccctgccgctgctggccgagcaatctctactctaggcggccctgctcagattgagcgactctgctctctatccctctctggtagagattctctaaaggataatgacgcgtttcgaccggaactcaactttggccggacaggcgaggggactcacgtagagagcaggtggaagcgaccgatcaacggagcgttcatgcaaggcgacaagctcgtcttgcgcgtaagaaagcgaaccaaagtaaaggtctatgtggatgcggaggggactaagcggaagatcaagcttgacaagggagaattcatggtggatgtggtcggaccggtagcaaagacgatcaagtttcgaggtgagcaatcagcttgctgtttgtttgatatcacaaatgggctaacctcctcctctgcttctctgtttagccatcgccgaccatcagtatagaccggatcctacaacgtcggagtccaaactaagagatgccttgacctctcttgactgtatggtcgtctgtttttgctctcttgaatgtgaaaaccgaactgatatcgtttgttcaaatggtcttctcctgcgttagataaaatgcttgccaaattcgaatggccagccgagactgaaacatatacccaaccaaagacaaaagatccagacgatatggacgcaacctctggtgaggatggagactattcatccgacgaaaccgacagagcgcgaacggcttacgaggagaagaatacggtgagcgtgtgccacttgttccctccaccattgttcacctcccagatcgcaccccacaaataccagtacgtatatatcgtttcctttcttccctcgatagcatatgccaatcttctccacccgatcccaaaggacttgttcattgaaggtgcactgacgccaacacaaattttctcattgatcggatccaaacagctacaaagccaatccaatgtcgacaatcacccgagcagaacacgacgaaactaggctgatcaataagacccggaagaagccgctatacgtgacgagtgttaactggaagctagaccagccagtcagttcttcaccttccctcttctttgttcaccatcctgatctgattccaggcatgttcgttctgatgttgatctggtcggattttgttcgttcatctagacacctacacatcctcctgcaggtttatcaaagatcgacaaggcgctggttgataggattaccaaggtccgtcgccttccaccctcaacactctccttcccctctcttctcccttatgatctgtacattccttgtcttcctactacaaattgctatctctttcttgtctctttggcgttacgtacattactgactgaatggaatgtatctttctccaacggaaacaagctctttgcggatgagggaacatacccaggtatcgtgtcgcggccggcctggtcaagaatcgcgcttgctaatcagctatcagacctaggaaccgaccacgcagtcagaaccatgtaagacttcaacttcccaaccttgcaccccctcttgcatgacacggtcgcttatatctgctctttcttgtacatctctgtcggtgttatgccgacgctgaatcttcaagactcaagccgcttctaccattcatagcctacactttctccggtggggctttccgagatttgttcatccggtttggatacgatcctcgaaaaatcccggaatctaaaatgtaagcctgatcaggttttcttgttctacctcaccagtagacacaacagaatgaactcatttaagaacccacttcgacaattgcattacctttcccgttcgtttagataccagagtgcgcggttgcgagtaggaagcgaaagtcgatccagagcaaccagatcgttgaagactcatcctaaccaacgagcgctcactgttgctggcaagacggcgggagttttacaaggcggggactctcggttcgttcttcttttccttccacttgttttcatatcgtttctgtcgtcaccagatcttgaccaaactaacgcatcgcctcctcctaggaaaacacacattttcgatggacagaagctccacaaagactggtcaaacttccaattatgcgatataaccgacccagaactcgtcaaactcattcatgatcccgctggggtcagagaaaaatgttatgttcgtcgctgtcctcttttccctcccctttgtaactacccaaaattcaacttggctctccatgtctgcaaaacaaacaaataaatgaacaaataagggggacgacggatggtacaagccgatcagacaacgacttatccgagaagtggttcgtatgaagttttcctcacttctcaaacgaggcgtcccgttaccccccggagcatgcgatcaaatgattgaaggtggtctagctgaagagagagcgtcaaatatcaaagctcgtgagaaacgaggtcggggcgaacttgaagatgaggaagaagaagaccatcactatcaacatgcttatcatcatttgaaccatgaatatgatggagacgatcatgatgaagactctgattctgacgctggtggagatgatgatgatgacgatggacatgaggatggaggggagggtaccgtcggccactatggaaaaagttcttccgattctagatatgccttcttgagccttactaggaagaagggcacttccaaatcacgacatatctaccatgggagaaatgataaagagatcatggtttgttttcttcttccttctctctcgtttcatcgttaccgtctattgcttcacttgagctaatcattgacgagcgcttcttactcattacaggctgctcggcttaggaaagctttgggtaactcgactcaacgggagccatgatttacacatttcaatagcgtacatgcaaaacgaaggaatgactcatatatatgatagtcaaatcacgatgttgaatagcgcacgcgttacaagacactgatgacttgacccatgctttggacaaatatagttacagggcgatagcttagtgcgaggtacagtagtcaagagtcatatctgagaaactaggtgtataagtaagaataaggaagaaaaaaacatgaataaaattaaaaagtaccagtacattgatcagataggacaagctatcattcagttataacgttctcagcaggtagactgaagaggtacgatacccattcctccattcttgtgatagaaaaggaggaaaagaaaaaacgaaaaacatcaagaagccagagaaagatcggcaaacgcttcagtatgatagagatcgatgactattcatatccataatctcgaaggcgagatggagaaggatggagagaaaaaaacggtatgaagacgtactcaaaaccttccggtgctgcgttccatagacctgtcgtggagtcgttcaaggttctgttcgaacctatcgatgacggcctgtcctgtccgcctgtcccatttctattaatctcttgtactacataggctaatttctgaccctgaacatcatttccggatgaactcatttgactagagctaggctgaagatcacctgagccatctgacttccacgaatttaatgagaccgtcgaactaagcatagacggacggacatcatgggtaggctgacagtcatcaacggcaggcaatgagcgcatttctgatgtgtctggattgtgcgtcgaaaggggtaaactgaatatcacctgctgaatttgtggctgctgctggtagtgttggtaatgcgattgtaagtacaggggatcaaccggagacaaatattgcgaagatgactgttgagaatattgcagcggaggccccggagttaccggctgaatttgttgcagtgggtattgcagccgcaactgtagtatcgattgaagtcgcgactgggcttgcgattgatgttgtggttgatacagattatactgagcttcggaggaggtatttgtcataggatccagcattgcgttgaagtcggatggaggagattgaataacctcagatgagtcggattgaccgttatacctctcgaagccatcggcgtctgacagaaaaggcatgggttccgaagcctctccgttcgtgcgtacatctggagcagacaggcactgttgttgttgttgttcttgtccttgtccttgtcggtgatattggtaacgatgatcatgacgagagtggtcatgtccaagcggagagagagtaggaagagactcagagaaagctatcggcctttgagtaagtgtcatatcttgaaggttattgaccggcagttctgatattggtggcactctggtcttgtccagagtcgggctttttgttgaaggtggcaacttggaagagctagacgcgggaggaacataaccatctcgtgtttttaccaagtcgtctcgatttcgtttgattgacgagttgaccctcttcaatacgtgggcatgttcgaccagtcccattcaaacgtctctgttagcgttcgtcaatccaagattggtacgtgagtgagcatacacctgagcagacaagcatcatgaagacgaaggctcttcttacttgtaacatccagccaccatccacgtcttctcgtagacagtgaacatctcaatgatcttggagatgtcgttcagtct

SEQ ID NO: 1095 - DNA, 568 bp, Xanthophyllomyces dendrorhous
cacacacacacacacacacgtcagtctcgatgttgcctgcttctgacgcgcaagaaggcagagagcagagagcagaccgacctgggcagagtagtaggcaacatagatatgtgcgctctggaggaaccacatatcatccttcctgtgcggatcccatctgggcagacagaggaaggcgaggaaggcaaggagggcaggcagatacgacgcaaggagccagcatcagaaagcaagaagcagcgatcagcactctgcactctgcactctgcactctgcactctgcactctgcactctgcactctgcactctgcactcagcggtgtccattctgcactctgcactcacctcagatggtccggcagctgctgcacccagttgttcagactcgagtcgatctcggccacgatgctgagctgtgcttcgagcgagtggaagtctttgatgaccttggacttgttgatcgcatactgtgtttgcataggccgtcgtcagacaagtagcacatcagacacagcacactacacacactacacacactacacacactacacacactacacacactaca

SEQ ID NO: 1096 - DNA, 25244 bp, Xanthophyllomyces dendrorhous
tctgcgccagcttcagcagctggatgaaccccccgatcttcgacggcttgccctccggctgccggaacgccagccccggctcctcctcgttctcccagtactcgtcgtccacatcgatcgggtagtcgacatcgatgtcctcgtcgtggatcgccagcggccggcccgtgctcccacagagctcccggtcggccaggtagagcgcccagaacgcccgcttcagcatctcgccctccgcctttggcttggaccgaacgacatgcttcctgtggacgcccatgtcgacggccgtgcggatgcccatgccgatacacatccaggccacctggtggtggctacacgagccgacaaacatagcggctatctttattgttcagggcacacaaaaaaaaagatcaggccaggttgaatcagaaatccacggcgcaatacaggatgtattgaaagaaattggcatatacactggtagcttgtaagctgctaacaccaggagcttcgagaattctggggcttcctaagacatactggaagaatggacggtcgacgaccgacaagaagatgttcagatgcacgaacaagaatgtggcggagaaactaaaccatattcagaacaaggatcatacttcaccaatgtaatcccatccctttccaaacctgtgaaaagaagaaccgtgatcaaacagagcagtgagtcacctggttcacttaaagtcatatttagctatcatgtgatacgacaagtcaccatatactgacatttttttcctatcgtcctcggttaaatccctatcatcttttgcagtgatcgcttcatcatctgcatcatacagacatctactggcacaagcaaataccactaagcacagcatcttgaactcgatatctgtcgtgtacagaccatcagcaaactcgcgctcgaatgttggtcgatgaacaactgtaacgataaatgaggcttgctcaaagaatgtatcgatcaagagtcgagcgtgctcagcagaaggccaagtggaggcatacttgggagcggtagagtggtaatctgggaattcccaatgggcggtgttccagtagattgctacgatgaacgatatggagaaatagagcacatgagtggaacggattactctaatacactttcatatgatgagcagatgggctgagggagaaaggtcctgacatctttgacttgcattcaggtccatatcaaacgtgtcctttccagtgtgcgacattttctgcgcgcgtacctgattaaacaaactgaaaccggacgactagttgttcaggagaagacttcaagaggtcataacacgctttttaaaacttagctggacgaacaagctttactcgcgcgcgtgattttcctatcgaaatttgacaaacctttccccagaaagcctcctgactaggcttagtgggcagcttcatgatcttcattttttgaagcgaattgagcatgtacgcctcatcctcatctatctcttcttcttcttcttcttcgttgcctctttcccatggtttgatagcttccagagggttgtagttgccgatagatggaccagccgatgattctctactgtccgaactgccccgaacaggcattgtgcttagctgggggagagtagacgtcggttccccgacggctagagatgattgagagatcggaggagatactccgtgcatcgttctgggatcagatagcaacagagtcgagcctgaagccgcggaagtgccctgttagtcattgaatgaataaaacagaacgatacacgaccagatagcagggaaagcgaaaggaagaaaggatggatgagcgctctctttaggttggttccgtgaagcagaaccaaagaaatagcaatgactgagattcgggtgacgatgacaaatactcacttgaagaatcaatgctccatctgtttaagccgagattccatggactcgacatacgccttcgggggtcctcgtttcctcgcattctcgacgtatgaacactgaatcccggccagtatacaattctcacattctatacctgtgtttgtgaagccatcgcatcttatctaagagttgaagtagtgatttttggatcataggtgagagaggacggtgaaattacatggaaatccagtcagatcgccaaaacgtccgaaaatggctgtgtctgaagagattcttgaaagcgaagcaggtatgagaaagaggcggaccttttttcgtcggcaggcatcacctttttcttattaagcaaggaaatcccggatggaacgatcaagtcaagaccgaagccacaatcagtatttgcgatttgtatcgaacaaagcaaagaggagtaatccttcccctactctgttatactggatgggattttgagatttattaaaccggatgcactcacaagctcgttgggttttcctcctctttccagtcgaatcgacatctgatttggacatgactatatcctgatggcagttggacttggatggtcttgatggataacaatcgaggaatggctcgagggaggtgatgctcaatcgaaggaccgatcaaatgatgagacgatcgaggcagcgcgggagaatgaagtagataacgggggaaaagccgggggtttcactatgtcagagatcaggattaggtaatatatatactcagtgtgtagctacttctcttgacctaccgttcatcatgccttcccatcccatcatgctccttctcttcattctatgcgcttgatgatcctttctcgttctcatttctctcgattggtgatacccttgcttagtgttctgatggttggcaatctgtttcttcatcatcactctgcttgacaatgttatgtttgataattctgtcgtttaataaacgcgtggcaaccaggttgccacctcttcctgggtgaaatgacatgaagggaaacgcttgctcgcttgtcttgatgaggtccttcagattaggatcctttgtagactatatccaataagctatccctgctattcaataagtttgccgttgtcccctgagatctggaggcctagacttccgcgctcgcactttccttgctagtttcagtgacccccttataacttccataaccccagccccttacacacaaagcatcggatatcagggatgtgacttgagtattactccccggtaaccttctcctgcctctgttgcttctcctgtttctctatcccttatgctatatcactgcatcaacatgcaggtatatagtcccttagcgcaggtgctactccatagcatagtttctcaagcctggatctttggtcactcctttgttgctccctagtactcttgctccctgtattatatcaatcttaatcttcaaatttcttcaccttgcgcccttgtcacaaccactcaaagcgaaagagcttgaacttcctccttgccagctacatttcctgtctggctacgaccttcataacttttccgttacccctccccgaaccctagatccttgccagatccaagggtgcctcacgtaactgattaaaactcaaaatattcattcaagtattttaacaatttgcatctgccttgctcttgagattgcagttcgtttgcgtgtgcttaaatcagggggtgaattcttctttccttcttggaacaagacaacaagaaacgcgattaatgtctcccacatgtggacaaagcgaaataagattgatgaaaatagattgaacaagagtcatggatgagatcgtagaaaagaagatacacaacttcctacatcaacccagcggcagcggccgcttccaaagcctttgcgttgatctcctggtaacctctcagtcggatcctttttattatattttaattttaccataaacatgtttcaaaatggtaggagaggtcagatcgagaaatgataaacacagtaggtcacacaatatgataaagatgtcaacgaacaagtttcgctgaagcatggcaatggtgagctttccgacggcagggatgtatatgctagcctgcagaggataggaagaagacagggagagaaagcgttcagcctaggaaaataaacaacacgcaatagtctacaagacctaccttgttcaatacatccgtatcaaagttcttttcgccagcgatatcgacacaaacaaccccatccttcaaccacccagtctggactttgaactttccaccgggcaccgcgctgatcaccacgtcactcatcgcgagcgccgcttggagagtaagatccgttggggtcgtcacatgggagggcttgtacttgaaaggggacgagcctggctcggtggccgtcgaaggagtggtagaagtggaaggtcgtttggaaaactcgagaataccattgatatctgccgagagaactcgagctccatcgtttgctgaagtttgatcaaattgctcaagagatttagttcacgctatttgaagtaaaatgataggcagaaggccaatgaacagaccgagcaaagcagccaatggtcgaccgacaacttccgatcggttgatcaccgtgatggttcgacctctggctctatctccataaggcaagagggggttgtaaatgttggtgtattctagtgtcttgacctgataggacagaaacggcaaacaagatccaagttcaacaatctttctaatgtacaagagctattaacaacgagcgcggaaaacgtacgatggccaaaggtgtgcaaggaagaatggacttgaggagaccagcaggaggagtatcgagagaattgcttgtagccggtgaggcgaggaactttttagtaggcttgaaagtcagcggagaaatgtatcgaatgcttgagacgggaacacagcggacagagttaacaactgatttgtgtgtagagaaaataagaacaataaaggatgtgatctcacttatggtacaggttgaacacaaattggtgattcaaaccctcgacatccttgagaggagagacaacctgttgaagatattggtcctcttcaggaaagaacaataacgaagcaggaaaggaggtaaggaaagtggaaagtagacaggtcagtttcaaggtcttcgatcttaactcaaaggaggtaagagtatagcgtacgggttcctccgaagatagggtagtaaacctggtgaaaataaaccaatgtgtttataaatctgatccatatctcaaagctaaatgtaccaaaccgagctcgaagcgcaccatgagacctccaacatcgtcgtcattgttagcagagacgatagcctcttctacaccctcgccggcaacgacagaggaatcgatggcctgaccaacaagtcgaagctcaaacgtaatacccaaagcctcgcacgatcgttttgtgaactgtttgagagaacgaaagacaatgacatgcatatgatatcaagcaaataagataaagcttaagccaaagacgagatgaggataaaacgggtccaagactgacctcggcatatgtcttagcgtcctctttggccgttccaaggataccaacgagcttgagctgaccgccgttagctttgatctgttcgatcgccgaggtgagctccttcttgaacggcgggtacatcttgaccgcagtaagggtgatgccttgtccttccatggttgctagatagttcgaggaagcgttctggataaggttgtgaacgagatatatatcagagtatgttggcgcgctcaaaggaggatgctttgagaaaggaaaaaataaaaatgaaaaataaattcgagcgactgcgcgtttccagtccaaataatttccttggccaatgtgtcgggcagcctagggttgagttgactatacgcggctatgtctatctatgttgtggatctcttcccagaggcgatagtgttgtatagtgctcgatggatggagtagtatacagcagatcgatagaggaacatgcaagagagtaattgatgggaaggctcgagaaacagttatttccatattgactttgctcagaacaggacaacagtgtggtacttctgctgtctgttcaaaagggttgacgttctaactatttggatcgccttctttcttcctatctaagcctaacgcatcctgctcgttgtgaaccttctgtctagatctttcactttgttctgcattaggaggcgctgctatccctactactgctatcactactactgctactatccctactactgctactatcactactactgctactatccctactactgctactatcactgtcataaccaccaccaccaccagtcgtagccatgtcgactgttacgaacgtggatggaaaaaacgtgaccaaaagctgtacagatcgcacctgtcagggatgtgacctgagtgttacaccccggtaaccttccttcaattctagttctcctcctgcctcgttactccttatgctttcttattgtttcgacatgcaggtatatagtctggtagcgcaggtgcttctagcacatcttatgatctgttctcttatgcataaccgttggagtctgaggacgaaatatgatacgaaactacttcgccactcatagcttagtctcccaagtctgaatcttctgttaatcttgatccttgtcttttgctcttgctcttgtccttgttcttgttcttgttcttgttcttgttcttgttcttgtccttgtacttagccttatcattgtccttcgtgatcctatccatcctatttttcagtcctgagggcctgaatttcccctttgaatcctaagagtctggtgtggtcacaacttccgtaacctcgtcgttaccctccaaacctgaatcataacagcaccgctcgtgtcatcccacgtgccgccaatgaaagtacgcccttttgattacattttttttccatcctcctttcttgttcccttcaggatactttcactcccttcccaatccactcaacacttcctcccttcctcctttctttctccgtttctttcctcctccctcttctcctcctccctcctctccttctcctccttccctcttccgtttttttcttcggttgaaatcccggttccttctccttctttctactcaggtttcattcaataatgtccgattctgctatccccgagatcctcgtcgccctatcggctgccaaggatgccactcaggccaagggcaaaggttagttttcgcttgttttatctcagccatcaagtttgctttccttcgttccgtcacggtcagtttcctcgtgaagcgtgcctaaagtgacgtggcgggagctcaaaacggtctgtaggcgttggccgaggcgtaaagaaaaacaaagggtggaaaattaaagacacaaaaattatattaaagaaaaaattatcactcttctttcctttgctgacttggcctctgctcatccctttcctcgtatacagccgacgagctttctctcgccatcaagaggtctaacattgagaccctatctacctacgatgttcttcccaccattcagaggtgggccacttctaagaacgctgctgagcgagaagtcgccccggtcgcgttcgcccggttgatcgtcaaccttggcgtcggttccgagcctgtgtttatcccgtaccttcctaccttgttcaacttgctcatggagaagaccgccgccatccgaacttctgctcagtccgctcttaacgcattcatcaagctctgccctcccgagtcgatccgacaggttatgcaggccctcagagtgtgcctcgaggaggtcaagggatggaagggtcagatcggtgtgctcaaggccatggagaacttggtcagggaggagtcccaggagcaggtcgctgccgagttgggagctaccattcctttggtcgagcatgctatgcacgacaccaagaccgaggttggtccacattttttcttgggctgtttgagtttttacagccgcctgacaactgttcattcttaatgcttaggtcgccaccgctgctcgaaaatgcggacgagctcttaccggaacgctttacaaccctgacctgaagcctcatttggacaagttggttgacgctatggcttctcccaccgccgttccctccaccatcaaggctttgtcgtccaccacctttgtctccgaggtaactgcacctgtgttggccgttttggtcccactccttatccgagctcttaaagagcgatccaccgataccacccgaatgacctgtatcgttgtctccaacttggtcaagcttgttcgagatcccaaggtcgccgccacctacctttccgtcttggttcctggtgtcacgaacgtcgccgagggtgccgccttccctgaggtttgtcatctgtgtctgtataaatgctttcctcagaaaactgactacattttcgtcacacttttcaaatagctccgagcattcggaaagaccgctcaggagaccttggccaacgctggtgcctccgctgacgctgttcttcctgccctccgagacgttaaggcatctaccatcttggccctcaacaccctccttcccgttctgcctatcgccaaccttccaacttcgatcaccgagcttcctctcgccaaatatctgcctaacgatccgatcaaggctactatcttggagtacgccggtggtatccttgccgatctggctgacgagcgattgttcgacaagtctctttgggaagaacgagcccttggaaactatctcaggttctttgttggtggtaaggaggacggtcgacaagtcgccgcccaggttcttgacgtcttcattgaggccgacaaggtaagttttttcccttaaactcactgtttacaaaaaaataacaaaaaaaacataaaggtcttctattttgtctgtctaagttgctgactttcttcgttaactttcgtctttctctctagaaacggttcgcccccgatgaggaagatgacggtacccaaggagagcttttgtgcaacatcatgttctctcttgcctacggaggtcttctcttgctgaaccacaccaacttgaagctttaccgaggacaccgatatggtatctgtgccggaaacggaaaaggtaaatctaccttgatgaaggccatccgagatggaaaggttgagggtttccctcctcaagatcagttgagaacgatcatggtcgagcacgccctccagggcgaggacaccggaagttcgatcatcaacttcatcgcctccgattccaatcttgcctctactcctcgagagaagattgccgccgctcttcttgaggtcggattttctgaggagaagcagggcgatcctgtcggctctctctccggaggatggaagatgaagcttgagcttgctcgagctatgcttatcggagccgatatcttgttgctcgatgagcctactaaccacttgggtatgttcttcctatcttctctcgttagatgtttctgagttgctgatcattccgatacaatcttctctactcttcatagatgttggatccgttgcttggttggagaagtacctttgctctcagacccagatcacttgcttgatcgtctcccacgactctggcttcttggacaacgtctgcactgatattgtgagtttggatctttggtttattctgaatctgtttccatttttcgttctgagaaaccaaccgttaacccttctctcgccacgtctgtcagatgcactacgagaacaagaagctggcctactacaagggtaacctctcaaagttcgtcgagcgagttcctgaggccaggtcttactacaccctggcagctacctccatcaagttcacgttccctccccctggatcattgatgggagttcgatcaaacactcgttcgatcatgaaagtctcccactgtacgttcacctacccaggtgccgcccggccgtcgttgcacgatgtttcttgcgctttgacactttcgtcccgagtgggtatccttggaccgaatggagctggaaagtctactttgatcaagttgttgacgggagagacgattccccaagagggaaaggtcgagaagcaccctgctctacgagtcggttacgtcgcccagcacgctttccatcacttggagcaacacttggaaaagaccccggttgcctacatccagtggcgattccaggacgggcacgatcgtgaggtgttggagaaagccactcgagttctttccgaggaggacaagctccagatggagaagccgatggttggaaagaacggtgaggagcgaaagatcgagttgttgctcggtcgacaaaagctcaagaagactttccagtacgaggtcaaatggcgaggattgagccacaagtccaacacttgggtcggtcgaatggagctcatcgaggccggtttcggaaagatcgtccagcagttcgacgatatcgagtcttctcgagagggagctggttcgcgagacaacgcagcccacttgatcaagaagcatctcgaggacgtcggtctcgagggtgaccacgcgatgtactctgagatcagcggtctttctggtggtcagaaggtcaaggttgtcattgctgctacgttgtggaacaacccgcaggtgttgatcttggatgagcctaccaacttcttggacagagaggcgcttggtggactttctgtcgctatcagggattggggaggtgccgtctgcatcatctctcacaacatggagttcgtcaacgctctttgccctgagatctggcacgtcgatgccggtcgattgacccaccaaggaaaggtcgccttggtcgaggacgccttcgcggatggtgcttccaccgcgtcttccgcggtgccatccaggttggcttccagggctagctccaagccgagttcggtcgccacgacgcccgctggaagtgatgccgagggcaacggagagattccagctgctcctaggatcaagaagaagaagatgacgagaaacgacgtcaaagcccagcaggtcaggcgagctcagcgaaagctcaactggttgacatacggtggagagcgagagcctgataccgatgacgagtagatctttttcttcctctttgttatgactacaataaaagcatactccccgatcttgttcacctatctttgtcttctcataactctttctcgatttcttaatatcttgaactacctacctacttcaatcgtttaaacttccgtggcttgtcttttgtatccagtgtgttgcatccccctccgtaccgaaacggccccttttcttttgttttcttgttccaccttagactttcttcctctctcttttttggtctatcatcttttctgagtgctctctttatcttttttgtcctattctctttgtgtctactagtagtgttcatctttaagccttcagtcgattgaaaaacagagacaaaaaaggagcataaggtaaccgacacgaactggaagaccagcgacatgagtcacgagaacatatcggagggtgtgagacctccgaacatggtgaaccttgtactctggaaaacatgttcaggatggttcgaggaaggaacatgatatcaaatacttcacgtgtttgctaaaacgagatctacatggagacccctcccgggcatcatgactcgcatggccgagagaaacaggagaaagaaagaccacgatcttcacagaacaaaaaagaaacaacaacaacaaaaaacaaacaaacaaaggggggctatagaggacaaagagaatgaaaagagaacctcctcggtcatagcgaacgaagaggggtgaggagagccgcaagacgaggttgaatcaggaagaaggaatagaaaaaaaggaaaagaagaactaacacagctgaaaactacacaaaaatggacagtaggtctcaatccatcgctaaatatgaaggatttctatcaggttatattcgcttaccgactggaaaatcgtcgctgttcacatgtttatcttcatctagatctcccattcttttttaatttattaatatgtcgaccagcgctggattagttgatcttgaaatgaaaagtcagctgtacatcagcttgcttttgataaacaaaaaaagatggatgtgcaaggaaacagaaccgtagaacaggaaaaaaaaacgaaaactttgagcacgaacaaagacaaatctgatgcagtcagcaacatccgagttcaggaagaagtggttgtgtcaggaaggtaacgtacatgtgaatttcgttgtccgtcataagtatgacgttttctgccttcgattccacgtgagagaagcgtggtgaggggccgaatgatagtatcagaatgaaaggattggcgactcgaaagaaacagtcccctaagaaaacagaccccaagaggaaggcaagacagatatagagctcggctaagacgatgtgatctgggaaaaatatttagaaggatgtcttggctttctttccttcttctctaattgatcgaccatatacatgaacatagacatatacgcagaggcggagaattgagggattttctctggatgtatgctcccccacagatcggaagatcacggaggcggaaaagacacagacttgacgatattcatgacaaaatacgaagagttcaagaaaaaccatcggtggctgagaattctccgatcgaaggccgaagcagagatcgagagtaatccaggcaccggacggaagggtttgaggttaaataaagaaacgatcgagaatccctcgtcgatcgcttctgcatgcctccatcttccggctgttccacccgggccaattaccccggtccgagagtacatatcgggctgaggctaaagcagccagggtgggcgaagcgatctcttcgaatgagatcagagatcgacaagcttaggacagcggcagaagagccaaggaagcaaccagcgcagcaagaaatttcaagtgcctttgatcaagtaccctcaaagatcttcatccgacggaagcaaaagcttagcgtcccgttgatctcgaccggtttatcttctttgatggtttcgttttatttattgttcatccccgcgcccaatctttccatccggtttgtttacactaactcttttcattttggttcttttcctctttccctcccattgtttcgtccaatcctttcgttttccgctttcttccgtctcgttcccccttccttcacggccgcgttaaaaaagaaaactttgtatttacgtcgtcttcgttcccgttcccttacgcctgcgcctcctgctttcttctctctttcgttcacccccctaatcattgtttgtcatctttatctttcggccgcaagtgaaaagaatgggaatgcaaaaatcacagtggaagcagcaaggagacgagaaggaagaaaatttcatgggttgtcacatgctgccgctcaaaggactggtttgagtctcttgctctcctcctccttctccaccttattccgcatctctgcctgctcccttccgcttaacgctggtcatcgagccgacaacgctgatgacggaaaaatgaaaatgaaaaccggacatgcttggctgatggaagactgatcgttataaagaccaagtgctacacttggcaaaaaggatcttttacttctctcccctccggactgtaaatcccttaaagaccacttctgtcttcctgttcctgaatctgttcctcattattcacatcccgtcaccttcatccagttttcggttttcttcttccaactcatcttgatttcacctcccacccttctttttcacttgggatattaaatcatctcttcattcaagaggccgatttttgtcttttcattttcacaagactctttcgcttcctcatcataggcctcgtatgggtcataacttgacggacagtccgtcagtgtcggacacaccatcaaaaataccagcgtatcctcggacgattgtctccctcgcttccagctatccgtactcgaaggcaagttcaaaatcagaaaccccgactgggtcgcctacagaacgtctcaagaagtccgtcctcgcatgcaatcactgtagacaaaagtacgtcttgtcttgttcgcaattgtagtcacagaaccccttgtggctgaatgtttctgagatccttctcaaactttctcttctcttttctctctgcaaacagaaaaacaaaatgcagtagtcacaggccgtcttgtgttagctgtctgaggtcaaacagaacatgcgtatatgcgtccactccctctgaccgggcggccggcagcagagagaaacggccagaagcctcacctgtactacctgaatcagatcccatcctaggcccgaattttacatcaactctcggcgtcgcgttggccaggcctcgaccaagaaaacgagcaagaacagatagtcagttaggtggaccaaagactcgacagcgaggtagtcacacagttagtgaaagtactttgaccaatgacccagaaacgtctcgatgggtcccatcaattgtgagtcttctttctctcttctctgtttgttctgtcacatgggtgccgtctgacttgggtatcaatcatctctacctggttatttttaactccttcagtcttgtgcaccctcgcctgtgtcacaatctccttctgaagcgatgacgtctctttcgccattgttctctcgctcagtaatgccatccacgtcttcgtgtcccagttcaagcacgatgtcgacgatgtcgacgatgtcgattcctacgccacaaggcgatcatgctacctgcgactctgtcgagaacccttcatcctcggccatcgttgactatcaagagctggcttacaattccagggtttggtcatcgacaccggcctggctggagcaaccatcgtcttcagtcattcccaaaagtccggttagtgcggtctaccatccaatcccgatgtacccctctttctcttggccagtaccggcggctacaacgtcggagatatcaccaaccatcaccaccgctaccagcctggcgctcgacaaccctttggacccatacgtatatactcctccgtcgacagcggcgtcggtcgcttcgacttgcactaatatatctaacggagaccacttgttcaactacccctatccattccagttctcatcagaactgccattctcgcttccagaacaccctttttcatctgtcgggccggaggaatcattcttttcgatcccggcttactctgcgcatcatgatctccctctcgaaccggtcgaattagaccgtacggcgatcacaaaggtggagaccgagccagagatggaacctgaatggggttatcctcacacgttgcattccctccatcaatcattggcgattcatgtgaatcctccgatgaggaagcgagtgagcgacttgtggaacgtgcagagtctcgaaaatccagtggtcgatccgttgagcgcttggagctagctatatgaagagtctcgataggctcctcttttctttactttttatcttctgcttgtctgcttgctgtgaactcaatgcatatacccttctttcaacccttctctttttgtgctatatcctttctcttcgttccttgctcttgccattttgccccaaaccattctctatccctcgtcacttgtcgctcttctccttcgtttcttgtattatgtatagctgtatacatacgcacactcttcttctgactttcgtacgacccaaaagaacacaaaagaaaacacaggcagtctcttgcttgcttcttctcttctcttctttatcttcttcactttttgccttcatctttttcttttctttctctttcttcttttaaggaaaacgttatcttatcttctttagctttcaactatttcattgtcttttataccatatctttcatactgcccttcacttgtataaccccttttgcctgttgatcttcttctctattttcgctgttcttccattctgctcttcctccagcctgtttgttctaaaacggcctacgaagaaacagaacgaaggagaatgaataagttgagctcagtcggccttcgaatcctatcctatcaatttcattttaaatctgcagatatgttctttttctttttcttctttttttttctttctcgatatcaatagacatagacgtagacgtagacatacatctttactatacaagacctttctagaactaaatgtaagaaccaaggtaacgggagaagaaacgaaaacaaacaacgtgaagtacgaagagtgacaaacaatgaaatagacagtaattttaattttttaaaaggaaagagaaaagaaaagaaagaaagaagaagaagaagacgatgtctgagatgaactgactgaacaatcgatcggctagccggatgaaaccaaacagaaatgtgaagaaaacgcgaactgacgcaggaacaagagggggttgcatgtgatcctagaatggttcatcgaaggaatcaagtttcgatagccgacggatcgtatcttgccaatcttgggagatcttcgtggtactcgggcatcgagcttattaaaagtgaatccggtttgccccatgcaaaacaagagataacagcacaaaagagagaagaagagaacaggaacagaaacagggtgcaacgccgagagcgaaggatgcagatcgcaaatgaggacggagaatgggtccggacgggaaggaggcaaaaaaaggaaaagagcaagatggcggataagtaaagggaacgccataatgcacatgcatcgaatcattcctcgacgcccgaaaataaacatatcggagggaaaaagaaatcttcggagtcgaagtggcggaagaaatcggaaaagacaaagttatgagggagatagggcagacgtacataaaacagcgagaacgtccctcaaatgatccttcttccgtccagcgacaataccgggaccaaaacgggggcttgtcgaggcatgaatgatcggagggggcgttagggttgacgtgtgcgtcgtcgacttgttgatccccgacaatgttctaaatccgtgcaaaagtgtttgattccggaagaagaaaaagaagacgaatcaacaccagagaagacaaccaagttatttttgtttctccgcgagatgagatgtcaaaatgactgatcaggtattcgggaacaaaagtctatgatgcgcatgtatgcgaaacagtctttactgtttcggatatggtagacatgtcggagaggtaaaaggaagtaaaaggaagtgaatgaatgaaagactaacgctcgatcagctccaaacatatttccactgccgatcgatccgacagccaagtcctctaataattcctcgaccttttcgacgtttccttgttctgccaaccgcttagcataagttcccagatacgaagcatattcatccaccggcactcctaaggcctgactggcatgcaatctggattcaagatggccgagtgtgatcgcttgggtaaaagaaatgggtgaacttggaccatcatttgctgaactttctacctgtcgaacgactctccctgcctctttgagattctcatcgtccacaccatcagtctccgaatcttgctgattgatgagcgcaccgatagaagcctcgagttgtgggatgactcgttttgaatgaacgatcgttgaagttctggacgtacggtcggatgaggattcccaatgatcagagcctctcgaccaccatctactcgaaaggacgatccaacaagccaaatgttgacagaatgtcaaagctcggccgttcgagaggacgaacacatgggcgtggttggaacggagactggatcggaaaattgttggtcttttcgtgctcgttgaggtgagtggtcggaggatggtggagatattgggttgagctgatgcgtaaatagcggtcttggtcttgatattcctatatatgggcaaaggcagagatcgatcaacatgaaatacaacttgtctataagaccaaaaaggaacaaagaaagaaaagaaaaaacaaatggacagaccaattgtacatcgttcccagagcagtcacagcggaaaggcccgtcttggaagcctcgaggatcgaacatggcccgtcaaggaaaagggtgggcaagattcgtcttccctgaagagaatatacggtgagagtaccatcttcgcaggataatgcggcaaagaacatggtagcaacaacagagatgaccgggctggacagataatctgaccagatgattttgtttgacgaacgcgctgaaatttcgattgggcctaaactcaaacatcattttagtaaaaattcaactttcaggggaaaaaaaagggagaaaaatctggcacacgacaagaggaaagggaagaaagcaaactgaccggtatttgtattacgaacttcaatttttggagagtccgcattgtcggagaacttggcagataagagcgccttgatagacggtattgggagcacgttcccacccgttcgggtttgatctaaattgacaaacgacatttctggtcgcgccgatcgcagatctctctcgagatcatcacctcccatcatcgtcctcgtcctcgctttcaattcagataaatctccagaagcttttcgtttcccgttcagcgatagtccagactgctcgacgtccgttcgcatctctatgtctctcattcctggattagccgaactggttgagggcatctgtggaggaaccccgagtgtggaagatgaggacgatatggctggcggggcctgtgagtttccgaagactgcctggttgacaccgacgatggaagaaccggtctgaagcatcgtcggttggatccgtttctttccgtttttcatcgtgatcgtctgtgtcaacggaacgggtacagggaccggtagagtggacgatatcggattactctgttcagccaacgaggtcttgcccgtcatacggggtatgagcgtcttgacggccgtggtaataggagccggtgtacgagagaccacttggctgacaggatccgtctttgattgagaatgttttctgaaatgctcgtatgtgctcaaaacgaccttgtgtgagagagagggagaaggagtcagcggtcagaaagaggaacgcactcggccgtatgatatgcagagcgaggaaagccgggttacctcgagagcgccctcttgtgcaaatccgctaatttcttttttggtgaaatcgaaacaagcgatacttccatccgaagagcaagcgtacaacgttcggccttgtgttgtcctttgaaacgagaaaacgagagcgaaaagaagaattcgctacaagatcagaagagaagaaagagacagagaaagaaaaatagcggcaacgtcgacctaccatgatagatcccaaatctttccatcgaaacattcggtaaccaccaggagcggtgacggctcgttgttcttccaaatactaatcgaccgatcatccgatcccttatgagcacaaaatgaaattcaaaaacatctcagcccaaggccagagaaaagaagcagaggaagaaaatagtaaacaaagagagaggtacggaccaaagcaaccatgcacgatgtcctattccgcgtaagtttctctcctttagggatgaacacccgagggttgaacgcctacaatcatcgtcaataaaagaggaaaaggtcaaggagaaattcaagatccacatcagcaatattcggccatctgtctatctccctccttcgaaagaaggtatcgatacgaacggtcacttccaccgtattttcatgtcccacaaagcagatatcttgtttccatccatgccgttggatgacggccgccgtgaagaccgctctgttcattgcgtttgacgaggcgatgaacgcaccatcaggcgaccaacttgaagaagaatgagaatgaagaatttttttaaaggggagtagagtaagtcgcaattgcttcgaccggaacctactgccaaacaaatcagggaaagaagatgacgaagagaaactcacctgagccttcggaaaaaggttgaacctggagaattcacgaaaggctctttgatcgtttgttggagtgtccaatctgatgttttccagatcttgacagatttgtcatcggactaaaccaactcgaccaaatccagccgtccgtttcgtttgaaaggggaacaagagcaagaggtcggttcatcagtggtgatcaattgaatatatatatatccataattgatgaaaagacagacctgtgtagccagatattcaccaacagggtcccaacaaactcctttcacgaagtcctcatgttgagcgatctttttgatgatttcttattgaccaacgacccgttattgaaatgaaattcaatgagtttatctcaaaccctcaggcagactagcacgcgcaaagaaaaaaaaacgcttctgaggaagagagaaaagaaatgaggggtacgtacgaaaagttgcggtgttccaaacatagaccatactatccaaaccgacagtggctagcattgcatcatcccttgaccacgcgagatcgaccacatctagttttaacccccattcatgataacgaacgaagaaaagcggtccatgtcggaagcagcgttcgcgatgtgatcgaccattcatcaagcacaaacaaaagaagaagaaaaaagagaaaagagctaaaaggcaaacaaaaagaacggaccactggaatgaccgacgagtcgctggaggggcttccaagtctcgacgttgacgtctgtcgatccaaaaattcgacctcctccgacgctgttcaaagaaagacaagatggagggaggcgaaaataagaaccgctgacacgaaggaaattttagagacacaagagtcagaaatcaaagaaacgaacggatccagatcccctgtggaacgcgacgcgacgcgacgaagaaagaaacagacgcgtcagttatatgcctcaaagacaagaaagaaagaaacgaaaagagcatacagatcacaacaattttgtcatccgaaccggaagccaggaaacgcccgtgatgagcccatctgacgcacaataccggtcctgaaagtcccaagcccgaaattaagaccaagatgcatacagaatcccgtaagccaagatagttcagtgaaaccctcttcgttcgctctcaaacgaagtcactgagagaaaagagctcggattgcaaagagaagaagaagaagagagagcaagtagaacagaccatcatgttgagtcatcgtgcacagtaacctcgggtttgactcgttcttctcaacctcttcatccaatattggaagtgtcgaccaaatccttatcttgccgtctaaacatgttcccaaaacaagtcgagtcattagttaaaatcagactcggcattactcttgaccttcccaagcgctaagtctcaagcgtcagtgagagtgaacggcagaaagaggaacggaccaagactaccggtagccaatctagaaccatctggatgaacgctgaccgaatagataggcaacctccctcgtttgccttccgactttgcgtctgttggtcttgcccgaatgcatgcgcgatagagggtacgagtaagtcaagacgattgatagaaacaaaggatccaaaccagcgaggcggaagagaaagaaagggggagaagatcagagcagagtgaagatagtcagcgctactgtagatcatccacaaatcgttcgtctgttattccaatctccatgtcctcagcctgactaaatgtgacagtagcgacgcagatggctgaggttgtatcgtcatctggttaacacatttgtcaagatggttgcccagccgaacatatgatgtatcgtctggattggttgctgaaacctcagtattcaatccttccgaggatctccagcggacctcgagagggtatccagaaagagagacagagagaggaatcgggaaagaaaaacagaaagagaaacaggaagaaaaagaaaacgaggaagaatcatcaagcgtaccctcatgtttcacccaagctggtttgatcaatttcattctcgccctcttcgttcaagatcagctctccgattctacgtgttttcggattttgaagctaacttcgatgtcgggtttcaatatcgatctcaatatcaacgtccaggtttccaagatctatagttcaactccaaagtgaacgatttgatgtggtcaaaaagaggaaagagcgaacgataggaaggcgaagagacagaatgatctataggaattgttttgttgcatcatccgcgtcgcttgggcctggcacgagcattgggttagcacagcccggagtgtaaacacgtgacaatgtatttactttttcatagtatatattttttatttttttttgaaagaataatgaagatctaggcaaaaggagattatttggagagcagagaaaaacaccggggagaccgaggaaaggaaatgatagaaagaggagtgtatatgaagcaaaccgggatgggatagataattgattgtacgagcaaggaaagggattgatggagactatagaacagagacatacacaatgatatgttttttttctctttgtttttagaagttttctgttaattacaaaaaccatctacttcaagttgccaaaagcttagagcttgggttcttcctcatcggcgagcttcttggaagtctcgttaccgaacgtcgggacggcaagctcactgttggatccgaccgaatctgtgagctcatcgaaagtgccaaagacgtcggcgtcgtcgacctggccgacgcccggaggacgatcaatcttgttaaggacgagccagaggaaagtcgcgatagcaaaaccgagtggccacgccaagtaggacaacctgaccagtttgagggagaccacgaccttgcccttggtgacggtagatatgaaaccagggagagacggtccaatagagcaggcccagacgaaaggtgccttgaggttgactccatggaagaaccaatagtcggacgagtagttgggggtgtacaggtgggataacctgaccttctgtcgacgaaggacgaagtagtcggcaaacatgataccggcaagagggccgaggaagatggagtaaccggagaggacggagaggaaggtggtggccgtattgacgagctgccaggggttgatggcgaaaccgacgacggcgacgacggcagatcctcgcttgacatcgatatacctggggaacatggtggccaagtcaattccacccacaacaccacaggtgacgacgttgatgcaaagctgactgcagatgaaggagagcgagaggaagaacaaggcggcccggcaaccggaggtggggttgtgttgttggatggcttggatcatcttgtacggttgccagagcagtccagattcaggatacaatccagctccgcaactagtgatgatcaatccgatgactgaggtgccgatcaaagaggctgggacgatgaatgcctgaccccaaactgaaagtagcgagaggaaagggaagaggaagaaaacacacgcgcacattagcgatcaacgaaacatagtatgactgtaagagttggatacttactttgatctccaggctttcgggcgtatcgagaaaagtctattgggcgagacgtgagcgaaacgatgagatcgtgagttgattgaagggaggactagagcggaaggatagattgaggaacctaccggcagcatagatgatagcaccggaccaggctccgatctttgcggtaattcctctggtcatggcccaaccaagctgaacgctggtgagaggctttattttgagcaacttggaggtatcatagataagtggtccggcatttccttgcttggcaacaacgtaggccaacagggcgatcgtcgcgatggacacacagaacgacgagacaacggctgggattcggtatctttccggtcggacgaacagtagagggaacgcaagacaccagaagatgacgtagcagatgaagtcattggttttcatgtttgccgaggcggggaagtggttcttcatggtgtaaaacccgggccagaaggtggcgatcaagtttttgacaagctgaccaccgaaccagccttggtaaccgtaccaaacgaaactgagaataagcctgttggcgacgacgaaccaggctcctcggactccccaaggagctctatttccgacggcgaagggaatgtgccagctgaggcggatgaaagacgataggaagtgaacaaggaaaaacaaaggatgtgaagagagggtttagtctaccggagacggaggctagagaaggcgcgcaagcaaatagaagagagatgactcacgttccaccttgcataccgttggcgactagagcggcggtaatgatgagatcagcaatgacggtcgctagaatggactgccacacgttctgtaaaggagaatgaagggaacggataaaaaaagaagaaaaaaaacgaatagaggaaagattagataagagcgctgtaccaaaccagactgcatacgctagggagtgaaactatatcagcaacttacaagaccgagagaaagtagggtggacgacccagcaagatcagacacattgatagctggaggcgtgattggtacattcggttgtggatacgaacgtatgtgcgcacgtggaaggtcaattaggaatcatcagctgacaagaaaaattgaagaaaaagaagaagaagaaaataaggatgaaactgactggtagcgagccagaaccagaagaaagtggtctttgtccaagttctccttgaaggaggcaaaggtttgatgtcttcgttgatctgacaaaggaatggattgaccgaaggaatgataagaacattgacaacgatagcaacaagggcaaaacaagacgttgatacatacataaggcgatgggtcaccgacgacttctgcaaacctgaacgtcctcctgaagacactcatgctctgatagggcgagggcgagaacgccgatgttgaggctgatgtctccatttgcaaagaagcttggtatgacaagaacgatcgagagggagagaatgaagggatgtacgagagcaggagagaagagaccggaattgataacgatggatgatctactttatagtgttcgtcctcccggaagtttttctcgctttgcaatccttcacgtttctttttagtctacactggaagccagctcgatcgaagagcaaagattggaaagcaaaagaagcaatgaggaaaaaatgtcaacaaaggcaggaccaaagtttggattaaaaaaaaatgcttggggataggctgacaacgggcgagtcaaggcaagacgaggcaagactagaggaaaggaaatacaatgggaaagaccaaaaaaaaaaaaaaa

SEQ ID NO: 1097 - DNA, 29922 bp, Xanthophyllomyces dendrorhous
  misc_feature (1555)..(1564): n is a, c, g, or t
acccacacaaccatacaccctcgcacaaacatatcttcaaggatgataccggaacagaaggcagtagagaatttttagagaggagaacccgatcggcgttcgatcagtcgagggagaaagtcagtgagtgagtgaggaagtgtctgtgtgtgggtgcgtgggtgtgtgcctggatgcctgtgtgcgtgtatgcgaacatgcatgctcactctagcctctcccccaacagaccggggacaggcggctagtgacgtcttgtcgagacggtcgatcctcgtttctgtagtctttcctctccttcccttcccgagcccctttctgttttccctttcatttcccaacaggaacactcaaaaggctcacttacccggatgatcaatagaagaagaggggggggggcagtgacagagacagggcgatcacagacaaacacacggctgatggaggcgcgggcacggcggcaagagagattgataggtgatagggagaggaagacggacagagaagctccttctttcttttttctttcatctacctttctttctcttcttttttaatttttattttaaaatcatataacaatgaggcgcctgaacgaagaatgaaaagagaaaaaatgctcatcggatcaatcgctttccggtagcagaacgttaccaaagcgtcctctctctggatgcatgcctgtttggctgatcgtccagttcgattaccccaacaaagtcgagagggagagcaaggacagtgtcgagagggagggggaaagtgatcgactgtgtttgtttatgtggaatgtttacttggctgcactttctcggggccgtctagatttatcatcggcgtcagacgtccgataaggaaggaaagacgaccttctgttgcgtgtgggtgtgtatggctggtaagaccgcgtgtaggtcgtgcgcgactgcgcgtgttgtcttccccattagattcgtgcccactcgttctgacacacccacgtgccttcggacgaaatcggacaccgtttggattcacgacatccgttacaagtcaaccccctcgttctccccccaacgttacaaacccactctcatccaccgtcatccactgtcatggcttacccgtcaatctccgtgacttacgtagccactccgccttgtaaccatgccgcccggccgtcgagccgaccggcccggggccgattgaagccgtgcacagccactgcggaagcacaaaaaatgacgataaaaactaaaataacgataaacacggagttttagcctgcatgccctggttaccgaccgtaaccaagaccgacagcaccgcgctctcctggcgccctgccctcttttgtcccctctcctctcctcgcctctcgctcctcccaacttcccatttgatcgtttttttttcttcttgtcttttcttttcttttcctttccatgaaggtcgttctgttggttctctttctgggtctttttctttttgttgcgtgtgtgtctgtgttctgtgtgttcgtgcatctctcaaacgagtgtgtcttacattgtgtgtgtgtgtgtgtgtgtgnnnnnnnnnntaagtgtgtgtgtgtatagccatcgtatccatcggtttccctattgtggcccaaccttcggttcttcctccctccttctctctcccccggggcccggctcaatccacacccgcgtcgccttatcgtcaactttgtcacccacttgacgtgttcatcgatccaaccctctcttctttctttgcctcgttcccttcgcctcttcatatatacatacacacatcgccttctttcactacccaacacccatcagacccatatcgtcaagcaaagaaagactcagacaccatggcctcatcaaaacagaccaggtacagacggcccttgtttgtgtttatcatcttgctcgccatctttctcgtcggtaccgtcatcgtgctttcctcggtcacctggttctttggtgttcccaattggtcgcttctctccgagcgagacgttccctatgcgcccggtgaggtctggaaagggttggatcggtcgaacgatgggaacgcctcttgggcagcagacaactggtccggacatgttcaattaaccgaggattggaccaggttggagcacatcaagccgttgtaggtgtcccttcttgattcttgttttcttttgcttctttcttcctctctttcttgttctgctgttcttcttctcttgtcgtcaacgctcatgctctattcatctttgatccttcggtcaacagggaaggcgaacggatccctcgaatcattcatcaaacttggatgaacgatgagttacccttgaaatggagggtcagtgctttctttccttccatgttcaatccttccggtcctttctctatcctttcctcttcttccggtccatcatctcttccaccctcttcttccagccacgtcctcgtccttctagctgttccactctgccctcgtctcttttcaattccttcttggtgcttccccagactcacctcgcttccactctttccccacattccctcttgaaccatacaggacgtctacaaagaatgcagacgaggtctcccaaactatacctaccatctatggacagactcggcctcgagagccttcatcgttgcccactatccctccttcctggcgacgttcgactcgtatcagtacccaatccagagagcagatgccatccgatactttgtcctttatcactttggtggtatctacatggacctcgatgtcggctgcaaacgagacctcggcccgctcctcaaaggtgattgggacgttgtccttgccaaaaccatccctgtaagtctgtccttctcttcttttcctttcgacactctttgtttctcaagcttgctgacgtctttgccttcgacctggttcttgcttttccgtcaggtcggtgtctccaacgatatcatgctctcctccaaaagatccgctttcatggagatgaccatccatgggctcatcacattcaaccatgactacatcacaaactaccctaccgtcatgttttccacagggtaatcatcttatttgttctcctttttttccctctgttgtatgaaagagcgcagtaaaaaaacttacacgacccctcttctttcatccagcccaatgttcctctcggcacagtactcgctttacacttcgtcccatccgttgagcccagtaaacccaacgttggagatcagagtcatgccaaagtctctctatggaaagaacgcctctcctgaagaagctccacacgcctttttctcccacttttacggctcatcctggcacgccgacgactctggtttcatcatcttccttggccgtagaggcaagtggctcatgcgtctgggcgtcctcgtggtgacactcggtagcatctggctcatctggatgcgtggcagaggagccgtcagaaagtcttccggcggcctccgcagactagtcttctctctcggcgatactgcagccgggatggccgggcctgctgccgccggtggaacgtaccagcttttgtccttccttccctcatcctcgtcctcggatacatcctcggcacacacatcgccgttgacgtccccgacggttcccctgccgtctcccctccttccgttctctttagacatgtccactccgtcttcgaccgcccattcggccggtcttggctctagaccgtccagcccaacgccgagctcggcgatcgcacacgccttccgccgagcggccaacacatactccatccccgccatctttttctccaccgtgtcatccacttcgtccccttctgcgctcgggtcgaggagaccctccttccaagggctccccacagtggcctcgtcggcttcctaccctggctcatactcttccaggcggacccagcccaaacggggcgtcctgtttttccttcctgccttcttgacacctgttcaacagagccaaagcccgagtccgtactcgagtgttccttcctcctccacatcctcttccgcggctacaccgaggacgtcgatgcagacttcataccaccaacagtccacactgcacgatctggctgacggcaacaacagcagtagtagtaccgctaccatcaccaccgagtctgctcattttctagtgccgccattgtcggaaaaacaagagccgggtgagttgatcagaggaaagaccccgccgccgtcatacgagcggacagatacgaggcctctaggttccagagagaaggccgtcacaaaacgggtcgatgacgagtgggacgattgggcggaggaggatgaagaccggacgccttaaggcctgggagacgacttccttttttttttaaaaaaatctctttctctttcttctcctctttctttttcttcttctgcatcttttttctggtttcgggcttaatattttcttttgctgccgcgcttcatctttttcttttctagcatgttcaatctacatctcataatgcgagcttcctacctccattcgttcttccgtttcggtctcacacctccatgtctgcctttcttattaccctttttttacgttatgcactcttaaggcatacctaaataggtcaaaaaaattatccatacatacactgttcactgatggaggaaaagaacaagattcttaacactctttttacacactcttttcgtctcgttttcattctcattctcattgatgatgaaatagatttatatctagaacacgttcgtttctttcttaaatcaagatatctcctctttttcctcttgtgttcgttatctatggtgccttcttttctctgcctctttctgtccttcagctgcttttttttcttcttccatgaaaacctctggacgagcagcctctccttcttcatttctcgtttgattttcgatctttgatctttttgtctttttttatttccttcttgttcttttttctcttgtccggttttgctccctggataacatgcaagcagcgctcggctcgctcactaatcttttaggcttatcggtctggcgattcagtagctagctgaattccgaccgtcacacacaactgaccgattatacgttcactcgaacgacgttccacggacgcctcggctttcacccagagtgaactgatctcaattcagatcttctctcctttttcttgccgtcctctacgatcatctctctggtcattttcagaaaaggatcttaaagtgaaaataggagagcgcgcgcgcaggagggaagaaaaaaaataaaaacgatcagtcttgggctcttgtcgttcgtttcttgacctgttcactttttctctttgtaccttgtagagcgtacgagtgtctggaagtctgaacgtcttgatgtgtcaatgaagtttttttttgttcatcgacctctctggaaacacacacacaaacacacacatacacacagagcacacattcattcagataaagtgacgttcaaagccatcaagaccaagtttgcccgttcctgtctggattccctctctttctttgtcgtctcgtcttctacttgttccggatcggtcggctccggtcctggctcggcctcctcggcttcttctgccgtctgttcggcatcttctgatgttgatgtcgacgcgggaagttctgtcggaggaggcgaggcaagagtgcgggcttgttggatgagatgctagcagtcatcggtcgaccggtccatccaagtcaagtcagtgacacacacacacacacacgtatgtgaacaatttagggtgaggatagaatgggaaaactcacctctcggctgccacccttgactgtcttcaaatactccaacacggtctctaatgatgaatcaggaatctaaccaggcgagacagtcacacacgatgagccattaacagaaaattccagtttccaatcgtccctaaatagtcggttcggctctggtgaacgtcgcgtactgagagaacactcacctcgatggcggaaaagacgttgcgcatgagccaaccttgtttggctttagcaaacttgaacgctggcgttccaatcgtctttgcgtattcaattgctgcatccaacccaagcatgaaatattcagtcatctgaattcgagtcgtctctgagccatcttgacgagcaagacagagagaaatcggatgatggacagacctttggtggcctgagcggagagggtaggttcagaagacgacgtctcgtccatggaagctggtacatccgagatatccagctggggaggaagtgatgtcgttggctttttctcgttcttgtcctttttatctttcttgctcttcttgaccttcttggtctcggcttcggccgcgggagtctcctcatcctcctcggccctgctctcagctaacggttcggatcctaccacggtcacagttccttcctgagactctgtctgtttggccttcttggacttcttctccttaacattctctccctcggttctcgatctcttggacttctttgtcttctccaaaggagctggctggctatctgtatccgacatgaccgaggtaagaactggtgagttatatggaaggtcggggtggatacgatcaagcgtggggtgcataatttggaggggaactccgagcctggcgtcaggctgggaggatgttggaaaaataggcagagcgaatttgagatttcccattttcctcttttttttggacatcgaaccaccatcaaacccgacggaccgaacggaagaccgtctgtttccttttcttgactgctttcccagccctgccttcttcgccctcgctccttcgtcctcccagacccatccgtgctcgcttgcgtgtcatcccatcgaaacctctcataatgtcaagcaacccgacgaaacaggcggtgaaatcaaacctgaccgccacggcaaccccgttcgtgccctctggccgaaacgtctctgggccatcggccggagcagcgaacaactcgctggcggacgttatcatgaagaacgacacccagacggagaacggagtcaattcagacccgactccttcgtcatcgtcttcctctgccaacaacaccaacaccacggaccgaccgacaaaaccgctgccaccacgatcaaacccgaccatggtcccccaacaggcctcggttccgaagacacctgtccagaaggaaaatgctagacggctgatcgtcgtgctggagagtgcgtgtctcgaggtgtacaggatctctgctgggagtggaggaagggatggaaagggtggaaaggacgcaaagtacgcgttgttgaactgtgacgaccaccagggtatcctcgccaagactgggagagatatcgccgacgccaggccagatatcacccaccaggttagctctcatctcccttccctgtcggctttctttctgttcccaatctctttacctcaatcttacatcccgatatccgtggtcttggttcgcgtataaacagtgtttgctcaccctcctagattcgccgctcaacaaggccgggcgactgcaagtctacattcacaccgcaaaaggtgtcctcatagaagtcaacccgcatgtccgaattcctcgtactttcaagcgtttctccggactcatgggtatgtctctggtcagattcccttgcggtctcttcgtccatccactatgcttatctatgctcgccgtcctactcttcttcggtttccataaaacaatagtccaactgttacacaaactttccatccgaggaatgaacggttcagaaaagcttcttaaagtcgtcaaggtgagcacatcacatacatgtattcctcactcccttctctgtccacctctgaactgtttacttcgatttgtactttgtccgtcccacaagaacccggtgaccgaccacttccctaccaacaccatcaaattgactctctcaggagacgtgcccaccgtgaggttgtccaagttcttgccgaccctaccggaaacgcatagtatagccgtctttgtaggagctatggctcgagggtcagtcttctcttctttctcttttcttatccatatatcagttcgttaaaccttttgggtcttttttttttgtcgtaaaacagagaggataactttgcggacggcgtgatcgaccagaaggtttctatctcagagtactcgcttagtgccagtgtggcttgtggaaagttctgctgtgccatggttcgtcccactttgattgttgtgttccttgtgtcgtgaagaactgctgactgactttatgaacgattgtttgccccgacttcctctccttctctttctctttctcccctgctgtgctttgcggccgttaggaggagatctgggatatcatctaatttattgacggatccctttctctttttcttgtcatcagttctctccctctcctcgctcctatctgttaaattctcaaaatctaaaaaaacgtcgatactgatacatagaatctcccgaccttgccggcgtccaattccatttactgttttcttgtttcttgtcagtcttatgacatccgcccttccccttgtcaagagcgagggaacgtctgttctttccagccttccttgcttcctccatcccttcctccattctgaaccatgtctccttgaaagtactctcgatcaatcttacgtatacggccttgtcttctccgtcgatcttcgatcttcctcatccttccctctcccgcctacccgctttttgtcttcctggtttcattggtttcttggtttttctgaactcttcaacgagtacacacatacaaacacatgcacacacaaacaaacatattctccttcctcccttctcccttcctattttacagtatcgtatttagggataaacaacccttctctttttctttctcgaaacctatatcttctttgttcttgtataattcaatgactcgtttcttcgtcttgatgaaccacttcacgttgatatctctgtcaggcgccctctcgactgatgtctgaatggaggacgtctagacaaaggctgatgttgagtttggctaggaatctctcgattcatttttgacttaatctttatttttgaacttcatgatcatatggataagggagacagaccatgtaccaaagagaagaatacaagttggcaagatatatttaagtaagtgagaaaaagaaaagcagagaaacgtggaaagattgtcaagaaatttcaaaaagaaaaattaagcgaaactgttctccagatccgcatcatcatcaccttcaagctgggcaaacgacaagaaggcggccggtcgatgaatttcgtcccaaaaaggtttgggcgttccaagcgaaaccgaataaggcattgtaggtgagaacaattgagaaagtccgataccgtagttccaaacgtctccagtggggacaagagtggaacccagaatcctgtccgagagtaacagctgcacccggttggccatcgaggcggagaacccagtgatgttcccactcaggtcggtctgtttccttccccattcgaatccggcaggagtgagctcccaagcggagagagagatcgatccgggggtaaacgatgcagtcaaacagatcgaagtaggcgcccattcagggttggccgacataatctttgcctgagcgctcacgtccaaaggtccaaggtgttgagcctcggcagactgagtcttgcaccaaccaagaggctccaaaccctgcagcaagaactcgtgttgaggaagtagggtaggaagctcgacagcagtattgcttcctcgctggggcacgtacacaacagccttgatctccttgacctgggggttgtcggcaggactagatccatataagtagcaagccacttgggttcgaagatcggcattgacgatgaacgttcgaagaatgtttttcggcatcacaaacgtcagactggcagcgtcatccttaacatcgtcgttcgaaacgaaaatgtgctgaactcgaagcggcaagttggtagcagagatagctcggactcgccagtcagatttcgatgagaacacctggttctcgtagttcgtcgtcgtcaccgtttggatctcatctccgtggatgttggtcgtcttggtctggatcgaagtgatctgagcctgagcctcggtcgacttctcaatctcagccatctgctgtcgctggatggaaggagcggcgatctccatacccaagatgatatctcggatttcactggccgtcaaggaggcaacgttgacactgttcctctttccgaaatcggtcaagatcaaatccttcaaggcaacttcgaccttcatccaatcctcgtcactaagagacggccagatgtggtgagtctcggtgataaccgacttgtcaggcctcaagatgatctttgccttctcgttgttgacgtgaagagctcggaggatcaagatcaatcgagagaaagcggtgtacgaggaaatagatttaagccagtcatcgtagagagagaagagtaccatttgaggttgggtagctcgctggatagacgaagaaagattgcgtgtcagtgtttatgagtaggtaacggaaaggacacatattcagtacttacaagaatgagatctccgaacttctccatcttcatcgtcgcttggaaaggaagctgaagctcactacccttgatgacgatgttggggaaatcgagcaagtgaacctcgagaggatccaacataccctttcgggtgacaatgacctgcttaggctgctcctcaactggaagcgatcgaatcaacgcagctacttcttctgcagttttccatttggctagctgtccgagacgtttctgaccagcccaaacggaggtatgaatgatcttcaagaacaactgtccggttcgaggattgaaaatgaagatagctccgttgatgggttttgtcgtcaagttaccctcaaacgtcttgtggatggtgactcggtaaacgttggtatcgtcgacgaaccagatgatctggttactaaacaactccgaatagttctgagagttcaggtaaggctccgtcggctcggacgagtagagctgaagaccctttcgaattcgctctcgaagaacataaagtgcaggattggccttcataatcttacccatcgcctgctggatcaagggcttcattccagggaaccagtttccgtaagctgagtgcaagttgtaggccaaatcgatagcgatcaggactccggtgggagatgggtagatcgacatcgaatcggaagtgtagtcgaggaacttagatcgagtgtatcgctcaatatcgtgcgagtcgaaatctccccatcggagctgaacatcacaccaccacttgttagaggtcgtaccatccaatacatccttggtgtcggtcaacaaggaaggtcgagagatgttccatttgtaggccgagaagagaagtatatctccagcagacgagttcatcttgtaggactttcggggatggatcgtctctttctgaacagtctcgatctgtaaagcctcgagctcttgatcgaatacctgacacaaatccatgacaacagattcatgaatcttttgccacaaatgcgctcggaagatctggatgagagaaatcttcaaagtagggatctttcccatcatgaagattccagtcaaatcgagttggacctggaaaccgacatagacattggctctgttgatagtaggactccaccaaagagtgaatcttcggttgggaatctggttcaaaccagaacgctgggcgtttgtgagctttttgaacttcatcgagtcctcgaaaccactggccttctcccagaagagaccttcccaagtagggaagtacgttcccttgaacaaagtgtgctcaaggatactttctactcctccgagagcagcgatcacatcaactcggtagttattcagttgccaaagctttccatcgtgtcgttgagaagtccaccagaaaggattgtgcttcaggagctggtattgcttccagtcggttcgaacacgccatcccttatcgtaagccaaggtgtgtcggtctttctggaagagagtattgattcgagggattcctcgatcccaactatcctccaaatcttcaagtgtcaaccttcggttctgggcggcagcctccttcctcttcatcgagtactcactccagactcgagcagagtccaagaattcagcctcccagggttgaaggtatcggaacaaattggggataagctgatcctcagtcgaggtcataccagatcggaagtgggtgataccgccaacatccgtctgcttggaccaccgaagatcggactgagggatcaatacgtgacccatggacaacatacccagacctcccaactccttcggggaatagaagaccacaggagggaaacgagaaggcatcttggaattcaatccaatcttaactcgagtctgaatcttgttctcagccttgaccaaagaatcaagaagctcgttggtatgaacaacggcctctcggtagtaggtcattaatccaatgatcgcagtgttccatttctgcaatagaagagaaaatatcaataccaatcttgtcatacgtttgaatagagacgggaagaatgagaaatactcacgttgacaatcttggagaaagtagtggaaccagatgacatgagaacttgtcggattcggttgttgaattgctgaacaccttcatcggagacccgaaggaaagcctgagcagttcgctccttcgtctgctcgttgttcaagttccaaacactatctttgagggagaaactctcggtaagcgttcggatcttgggcaagattcgaacttcgaatccacacatcgagaacaagatctgagggttatctttcgagtagacagagacaatggagtcgtccttgagagcaaacagataaacacaatcgttagggaaagatctcaagtatcttcttacttcattccaaagaagagttaacgtacccagttgatagtagtcaatgacataggcaacgagttcttgacgttccaaaacacggctcgtccgagatttacatcgtgcttgacaagtcgcatcctgcaatctcgtggccagcatctcttggtgttgaacccaatgacgttctcattattagggtcaggattggccgagagatatcgctggatcaagtctcgagattcatccgcctcgaatctaaagaagatatgaattctatcaacgtatcgagtgtagagacggatggggtgtcgagtctcggtggccgtgtctctaaactgcaagaagttgttgggaagctgaggaggaccagccatctcgctagctcgttgcaaaccaagaataagaagatcctacacaaacccattggacatcaagccatcgtggttagtctccgcaacactaatgacatctcagagctctgtttgaggactagtacgtaccaagaccaaaccgtaatactggaaaacgaaagcggagaactgaagacctcgaatcataccgaacgtgttaacatgagacatgtctttgtacgtcaatacaggattgttcttggcagtgatgtagtctgccaagttgtgatcgaggatcaaccgcaacaacctgttgaggagggtaagatccatcttttcatacactttagcaaggacggtctccatcatgacgttggcttgtccttcacttgtctcccatacatcggtctgttcaaccagatacagagaaagctggttagatatgaatgctctcgagattgtgagagtgaaatgacaagaagtcataccaagttgttgactccttgagccatcttgtagacaagaagcggcgggggctcagtatcagcaggcttgatccaggcagggaaaagaccacgcttgtcggcctcaaagaacaagaactgatccagataggcatcggtaatcttctccacaggctcgatatcgtaacaagggatcagcttgtcatatgtgtcgctgagtttgcacaaacgaagaacgtaagcccctagactagatcaagctccgacaggacaaaaacttacaagaactcgattccagcctccttgaaggctcgctgagtaaggagcaatcgcttgattcgagaaagacactcgtgtgggttatcactatggtagcaagaaagacgagccatcgatcagagagcattctagtcattaaggttgagaagagaacgacttactaagcctgctcaatcaaagccaattcctctcgttgagatgcattgagtcgaccttgaacactataggcctccttcaacttctcaagagccaaaaccaaaagcttggtatcatgcttatacgagagaggactagtttcagcagaattaggaagtagaatggttagataaaggttggtctgcagatgaaatgtctgctattcgatgtgaagataagacttacgggaaggggattggagctgtagttccgagataaaccatagctgatcagtatcatatcaggttcgaacgagcagaacgaagggacgtaccgaattttcgactttcgagccagtgaacgaccgaagagtagatagcaacagcctcttcacttgaaatgtaaggcccgtctttgagatacgagtgttgtcgttcttgctcagccttaagatagagacgagtgagtcgacccaagttcttcttgaccctgtcctcacacacaagcaaaaaaagaaataatgattggcgttgattcatcttgaccaaatcgtccacagggcgaccagaaatgcttacacagccttgtcgacagtagctcctcggcgaattcgctctcggttgtagtgcgcgaccgaagtccaccaatcagacttggacttgatgtatcgaaggatgatgttctcgatggccgtgggcattccaggaaccttccaagggatattggccttccactgtgttgaaatagagatgaatgcgaaacaagtcagaacaaaactggtacacattggcagggagaatagagagaaaaaatacgcacgcatcgccaggcctcggacaagtgctgcaagatagtcttggctttgttctgcttgatcgactcgggcctaaaagaagggaaaagaaggtaagcaactgctggaaagaacgtagtggacaggaccagagagatactcacatcatatcaagaatgtcgtgcatgacggccgctcgtaattcaagatcaaagtgctgaggaaataaatgaattcagtaattagactttacgttactgatgtcgatggcaggttacaactcacagactcgacacgctgcttagtgacactgtcgatgtaaagaagcaagattagcacgcatcgccaaagacacgactaaaagaggagatattaaactgacgtcttagcaacacccttggcgtttcgactagaaaaccccagaacacaattgtatcagtattacatcgtgtatgggtattagagatagaaacgactgacccctcgaattgacgggccaacaaattgtttagccaccgctcgagcagaggaactatacctctcatgaagaacaaccaaactctccatccaggctgccagaaaccaactccaggaccctttccaacagggccggtattgaaacggtaatatatcaaatgcttgagatctttacacatcctgatctgtctcatgagcttgtacttatatcggtacactatcgatgaagaaattataaaaactagtcagcgtcatacagattatttatcgatgtgttcgaacgacacgtacttccggtaagctgcccaacatgagcgaacatatactgcaaaccatcagcaagctggaaggcatcaatgtttccaagacggaactgaacgtgaacatcgacgatgagtttggtaagtcgaaggatttctcggcaaagatggactagaacacaaattggtagtagagtcagatcgcaatcagtcaccgcctagaaaacatgtacggacagaggaagatttacatacaggcatttccaaatcgagacttctttcgctctttagtagtgagcgtcttaaccggcttcaagttcaagttctacaagacaaatcgcagataacaccggcgatggtcaataaaagtttgtgaaaatcatacttggcgaaagaataactcacataatccaaatgcagatagttcaagttctttcggtgaataagaaggttcaacatattgtaaccttgtctgcagacctgaagaccagcctcaacccaatcaagtgtagtggattggaagcttatgaaatacaagccagtcaactttgtatgcatgtggaaagagctttctaggggtatacactcacaacttggtgttctttaatgacctgaacaagttacgcttggtttgaggcttggggtgtcgtcggtgcaaagcgttcaacacatatattttaagctaatgtgataaattaaaggagaatcaagtcagtcaaacagcgagctcgagatactagctcctggtgagaaaaaggcaagggagggcttacaagcttttggtacgacaccctgaccttgacaggctggttaggagggcaatgctccaaataccaatccttgaccaaaccaacgtcctgcgctcgtcgtgtcctgccacttctcttatcgtatggataaggtgcccaccaaagagcgatagcatcggccgtgtcatcgttgctaagatcctgatcattcaagaacggcacgcattcttcaggaagttcaaagtcgtcttcatcctctccgtaggggaacacagtgtcctcgtgagagattgtaggaaggttagcggcttcaactgctcgggaagagatgggctgaggaggtagtataagatcaagagtagtcaagcttagttttaagaaatacgaccagactctgatagatggtgaacatataaaagactaacgttaatcaagggatcaaagtagaacgcgggaagatcgggatcctctgttcggatgtaaacgttcttgggctcgtgataaacaccgatgtggacagatcgaggaagagagttataaagatgcgggaaagcgaccttgtactccgttcggatctggtttcgaataacaaccttgttgacatcattgaactcgttccaatcctcatcaaacgaatccatatctcggtacaaaggctcgaacttgggtccaccaggaatagccatgttcaaagccttagcagtgtagaagctcttgaggtcaaacaggtagaacgcgttcttgtctgcaaaatcactgagcagcgtccttcccaatcggtataagttggccgcctgggggagtgtcaaagaaaagcttcggtaactgcttccattgatgtgaggggtgtcaagcaatggtttggcgtcgtagaaccaattgagaacaggagcgtcttcctcatcgtccaactccaactgaataccctccaacggctccacatcaagaacgttgtctccataatcaagaggaggttcttcatcatcaaatgggggaaaccgaagtcgcttgaagtgtcgtcgatctcgcttctctctcctcatagcaatccacatggtggcccattgggcatggtactgttgggattaaagaagagcaaaaaagacgcgttcaatatgacaaccttgaatgcaagtaataggaaagaccacggtggcaaatcgacacttacaataggctctaccactcgagggacttcattcacgaatgtgatggctccagaaatatgatacaatactggtacttctctgacctgttcccaagggttagggatgttttcaagtaacttcatgaccgcgtgggggacatatttgagagctcctaagtgaacacgcttatcgtttcggaactttcgagcagacatatccccatgatccttcataatctttcgaaggtgctcaggagggaggtcctagagagtcgaaggaaatcatcattaatgagcacacgatcaacatcgaaaagaaggaaaaaaacgaggcgagaggaaaaaaaaccgtcgccaccaacgacaaaatcacgttgcgactaatcctcgatcggatctcaacacgtcttgaaaccccacatttgctactcccaactgttctatacttcaagaggtcttcgatgaaaccatagctatctagtagagtgtgaaaaacaacttacttgcttgccaccatcgacaccaccaccaccaccagctcttcgcttatcaccccatcgctttgcctgggtctgcaaccattttctcttcttcgcctcgatctgttcaggagtgagagaagagtatgagggtccagcaccgttggcatctacaaacagctgaggttgaggaggaggctgagaggcgaatccaggaggaggaggcatagcagccgagttgaaaccaggaggaggaagagacatttttccaacaggggtttgtgatattcacgaaagatcctctttttccttgccgctagataaaacgaaagaaggaagatcgagagcgaaaaaaagatgtagagcaaagagtagaagctctttgtccctcttgaaaatgtcctacgtgctgtacttgctaaagtaagaacagaaccaccaggacgggagatgggattgaggaaaggaagagtggaagaaacaggccagagcaaggagaaggttgaggtcgaaaaagaacaaggtattcatggttacggctgtggctgtaaggcacggagtttgaggtgtgaccaagttacaaaacttgtgacaaggactggcacttcgacttttcggcgcgagtctcaagaatgtttgtagtgattaaagcagaccggattattaataagagagttgaataagaggttctaacagagataatcagcttgaagaaaccttgcgtgtgagaaggtgtgagagcatcctcttgtgtatcggaaccccccgcgcatctggtctgtaactaggtaaaatacatatgatggaactggagtgactcgcgatcacgagagccgaagaaaacgaagcatgagccatgcaaaaaacacggtgagagtgatctcaaccgatggtagtcgatacatggcccttttagactgggatgacctcggaccacaaaccaccgagatcccatgggtcatgggtcaagtttgccctcgtcgataggacagcggcagcggcaagagcagcagaagcagcagtggtaaacactagcaccactggtgagtgttcaacgcggacgagtgtcctctttagccgatttctatatgttttcaagctgtcgagattgattcctctttgtttgcagaaaacttctctaattaactcgactgaccgtcgatgatgatgagcaacgtcatgatggctctacaacttatagataaaggcatgaacatataaagagacagggcaacaaagcaacaaggcaacctctaccgatggtggttggtacacaatccttctgggcttgggtggccttcagattgaaccagaacgaagaaaccgtctacagtctaaatcaacaagaaagagcacaaactacaaattacaatggctagaaaagcagaaaaaagcaaaataacagagagaaaactaatcaaactttctctgaggagacagccctctttttggctttcaaatggaaccagaacgaggaagccatgcaaacaacggtgaatccaaggggtaccttgtaaccaaccctgtaacgtggtgcttcgcgggccgggtaaactaacacgttcaaccagctatccactacataggagagcgtcaccgctactccaacaatgatcgatcgaacctccggagagggagatagatcggccatccaagcaaccaagataggaccaacaccgttcgagagccaaagcagatagtatccaaccatcttagctgagaatgctttcggccagatctaccatcatcaaacataaccgaacggaaacacatggtcagcttgaaccccagacggaaaaaaaacaggttggagaaaagaaacgaacaacgaggatgatcagtcccaccaacatggtcaacatctgaccaaagatccaaagccatcttttcccagtccttccactcccccaggcacagcctaccatagcaaccatctggatagcataaccaatgatagggatcatgttgagttgggaaataccaaatcgcttggttccgtcagcgttcttctcggctttaaggaagagcacgatccatgaattggagttttgagcccacgaccaagtgctgaacaataaatagcaggaagattcaatactgagttcaaatagcgaaacaagaggaagagacaaagaaacttacctgtaagccaagcaaaagacatataaaacccagttggtgaagatctttttgacgatactccagctcagtctggttgggggcagtttttcaacctcattcattcgaagcaaagctatgcgcttctcctcgtcgttcaaccaacgcaccctcgtagtcaccggatcgtcggggatcatgaagtgtccaaagagagcgacgacggcagtcatcaacgcgttgaacacgaacctgcaggaaggatgacgggtcacgtcaagatcggtttatacatcaaatagagaagagaagatctacttacagccatctccatccggatagcccggcgacaccgttcatgttggtatgcaaagcggcttgcatgaaaccgacaaacatgttagccgcagggtaactcgttccaaagatggcaattcgagcagcgagctccctcggagtgctattcgagaaaataggtaccatgcactggatgagtttacagacattcaaagaagagcgtctagggacactagttgacttactaccacgagcaaagtacacagatgactgtagagatagcattgttgaacgaaacagtcagcgcacgcggttctaagggcttgccgaagtaaagggacaactcacttccaggataggcactggcctcaaaaagtccgataaagaaccggagggcatacatgccatgaacgttatgacaagcagccatgagaccggtcatgagtccccagagaagctccgccccaggcaaccacatactcggtctgactttggtcaagataatttgagaaggtatgaccctttgtgaatgatcgaatggaattgaggaagaagaatagaaggtcagcatcagcgcagacgatatttgatctgagcaaactagagacgaacatgatggcatagccgattcgataggtagtgtccataaagttgagttcgaggccgtacatgctgagctgaagtttttaaagaggggtgtacaagaagagttagtctacatgctgcacaagctacaacagactcagtttgaatcccttacatcctccttcattccacttgcataggcagtcttgtagttggctccatccatgatctatcgatgaagagtaaatccaaccgcgaaaagtagatgagaacattaatgggaggcggatagatagatatgagagaagtgaatctggccctcaccttgatcacgtacgtggaccaagcccaggcgatgaggcagaggtcgagctttcggaggaatcgtctctccaccttggatcttttctttataaattctgaagttgactcgtggccaagggatgcgacctcatacattgacccatcaagcgatcgttttcctttgtcgtcgaacgagttctttttatcatcttcgagtttgccgccgtcggagtgggcatgagtgggctcgacacagattcccatatgctcttgataggtttgggatgccggagtggtggaggacatcatgcggtagagcaaggagagagaaggtaagcccagctggaagacgcgttttctttggtgacaatgaagaaaaacgagaagagaacatattcgagaggcaactcagaaggcgtttttaacaaaagagagaaacagaggtttgaatatccagaaagacgactgacgaccggagaaagacatgagcgaagttggccgaacagaagacgagcaactcgacaacagagccaagagaatttatcaaatttaatcgagttccgcccagtctctttttccacttatactcaaattcacaatcgttagctcttcactttctgtcactgttcacctgtatataggagtgaacagataccaagcatcgtggacgaaacagtcttcagtgtactagaatccagaatcagtgttacagagtgagaatattgatttcaagaattgagccaatattttcccgagctgtcgccgcctccctttaaaccataccacgacacctactgcatttcttgactgcgaagatcaaacattgggagtggatgcaatattcttactgacaaaaaaggaggacgaagtcgttcgggtagcggtttgtttgtatatttacctagtgcaaaaagcatggtgagagtgatctcaaccgatggtagtcgatacatggcccttttagactgggatgacctcggaccacagaccaccgagatcccatgggtcatgggtcaagtttgccctcgtcgataggacagcctcagcctcagcctcagcctcagtatcaacttcacggtgagcttcagcggcagggtcgaatacaagcatactcattcccgcattgtccttctgatgaagggtcaggtacaatatgttatgcaacgcattgacatctctattccaccaagtctgagagcaatcagagagatcagtgaaaattatcagtatttgacaccccatcctgagacactatcctgagatgtacagagtacgcgatttactcgacagacgcttcgacactatttcagcgcccacactttgcccttcccgagaactcgccatggcatgtggatcacattctcggcgtccagaaccccaaaccttacgagcctggagcagcaggaatgctttcagcttgaagagcagcgtcttcattgggccaggatcatgtctatgggaagtcgatgagaaggtaccgtctcctgacgccagaagggcatgtgagcgtcctcttgatgagaaggttgctagctcgtggtacgttttctctcggctgatgtctgcacctcagcggaggcatctccaccgtcgagcaggtagaaacatggaaaatcgtcaacgagactcaaaatagatgcgagagcagcgcggagaacatcgagattggcagctctgaatgaaggaacacctgaagaagaaaaccgaagcaagacaatgaggcaagaaaattagtctgcagtgttagcaaggcagtttgcacagtcagagtgagtgtgaaaggcactcgtaatgaagatctgatgaagagactatgtcgtaggtgggaaaggatgcccgtgttgtatatgattctcaagctacaaaggtaccgaacaaagacggtgttcccaccagacaaaccgcgcggaaggcttgcacgcaagaagggatcgtgagatgtgtcaggagcgcatgtgccatacagctacatgcaactatatgcaactacatgcaactacatacagctacatacagctacatacttgcaagctgagtatgggttgtcttcagtgttctggtggtgtgcgatcctgaggatgacagaatcccagaggaccacgtgccagccgagctcagttagggttgccctcgcgcagcacaaggttcgcgatctttgcctagttatcgccaatcggcggcttacattattgacaacctctccaaccaagcgtgaatcaatgatcaattgaatgacgatgggttgttgtcctggaatctgtcctctgtcttctcttcgtcctacaagttttgttcattgctcacactctacctaggttcacttttaccttatatttttgtctctttatctattcatgtctttgtctttgtctttgtctgaggacggtagagccttcaccaggtcgttcatcatgaccgacagccagtcgaactgatcaaaggggaaaccggtcaaaggagattttctgcaaacaagcagacatcaatcccaacagcttataagacacaacgaactcgagacgatcagagcgctcttctatatcagaacatctcttcatatcagaacacttctccataccagaacactcatcagttgctttgaggagtgccgctcctcttgtgttcgacatgaagcgcaagaggacggttcaggcctcgacaaagtcttcccttgcggctaacactaccgctactactaccgctactactactactactactactgccacatgctcagcctgcggtcagattgggcactctatgcgatctaatcacctctgcccgttttacatccctcgtcagagggtggaaatccgcgctaagtcagcggtccctatggtgtcagggacagtaaagataggctttggttctttactcgcctttaagccactggctggcccgatcgagtccgccgttgcccggctaggaaagataacattcgacgcgtctcgccttctcaatatccacatgtcaaaggtctgcgcggatggaggggagataccaaaccttcccaatataatgcggctctatcttcaggctgttggctttaacaagcgtggaggaaatctgcaccaaggagcgccaacactgaacgaagggatcaaccacatccgggacacctctttccctgctgagcaccagttcacagactcaaagcgagtgatctctttggcaatgacaatggtaatggtgatgcagctggctgcgaacagggactgactgatttgctgctttcatagattcctgagcagaatgatcggcgccaaagccctgttgtagaccacggcctgccagaaccatgtcgccctgaacatgccgcgccgggcttctcggctcatctcttagtggctggagacaaacgttggagaagcgatccagagtcggatcagtatcagccaggtaaggaagacaagtcatctgaggagatatctgaataaaggctgcagcgatgactgacctatctgacctatccgatacatctgttcgttcttagcgcactgccctctcccatcaactctaggagcaactgtcccctctcccacctcgaggaggaggagagggtgaagaaagagaagagggagaagaggatagagaggaggagccaccacaagctgctacatccttggcggcctcgccctggctactcaaactcctccttcctgaccagcgcacggtgatggaggcgcatctccgagtgttgttcgacttcctcacagatgacatctttggaggtttgcctctgacgggtgaggccatcaagacctcgtggcgattatatctccgccctctgtaccggatactgaccatctttgaggaacatggcccccaagatgcggctacaagacggaccactcgtcgccgggggcatggcctccgcctgttctcgcttctgccgctctcgtctcaccggtcgtcctatgtctttgtagacaccatgatactctacgacctttggtgccagctcaaatcggaggacgcggatatgggatatatgcgcggggtgactcaggtgtccttccgggatgactctgacacttggtggaagaggtcgttccatatatccaaagtcaagaccagaaagcgacagttcgccatgtcgctcagcacggacggcatcggcgtgtctgccggaatgctgagacccatgtcgtcttcatctggcatcgacgcctacggatggagatgggagggcgaagaaaaggaccgtcaccgagtagagtatgtgccgtggggtgtgcggccagaggacgaggtcgtggggctggacccaggccgtcggacgctgctctcgacaaccgcaggagggatcgacatgtctctggacaacggcggtctggccgagcacggcacgcagtggtcgctctctctcaagtaatggaggcaccttgcggggatggaccgagacgctcggaaacagcggctgtggatgaagaaccatgcggaagtgtcaaccactatccatggtgagtgcctctcacgctcacacccacgttcaagctgactgtatgaacagccttactgaccttgcaaactgtcttgcccacctcggtgtcgtgcttcggcttctttcttcggtgtctttctccagatcttccttcgttcagatctgccagtctcgatcgtctccgcgctgctctcgtcatacactctcagtcctactcctggctcgcgaccttcttcgctgctcgaaggtggagacgtcttcgctggggcgcgcacatcagccgcgaacaagcgtaccacaaggtggcgctccgtctgtcggcaggaagtccaagcaccttcttggccttcggcgacggcgccttctcgtcgtcttctcgtgggcatgcacctggtcctgtgaagacgatgtatgccaagctgagggcctctccgctgctccattttcgcacagtccgggggtatcggacgtcgagagtgtgcttcaagtgtcatggcgagttctctgggaggaacaaagcgtgggcgatcaaggaatgtcggagcgtctgtcgagtaagtgccgtgtgttacatacttatgatagtgtctcgatgactgaccgttctctgtgcttgctcattgatttctatgctttctctctgctctctctcagactttgtggaacagagatgtgaacacgtcgcgcgacatgctgcacctagcccttcaccaggacgagaacgaaggggcgagaatgctggcgtttgacaccgctgctgctagtgaggctgatgttgagactgaggctggcactgaggctggcagaaactaaacccataacccatgggaaccttggtgattcgtggtccgaggtcatcccagtccaagaggatcatgtatcgaccaccatcggttaagatcactctcaccatgctttttgcatgtatttattatacaaaatttgaagaaaacatgacatcattcacactcaagcgagctggagagtcttcttagcatctttcaagccgataacctctccatcctcgagctcgtaagtatcatacaactttaaagcctccttggcggcctgaagagagaaaattatacaactatgtcagttgtggaagctagataaagcccagcgtgctaagaagagaagagaccgcacctttgctccggacatgagcatcgctccaaaggtagctcccattcggttggacccatcaagctcagagagctccatacctccagtgatcaatccgggaacaatttctcgagtgttgttgacgatgtaatcctcggcgtttctcatatcgagacctctcatgtttcccaactgttcgaccaagccgatggagacacatcgtttggcggcgaacccaccaaacggtccgtcgtggccacagaacgagcacacgatcggggccgtgatggtctgagggtccatgcacgactgcaagccatgagcaagagtgacgagagtgtagttggaaaccacccccgatactcggagcccgccgtttcccaaagcgtccggtcgagtgatcaaatcctcagcggccgtagcgttgtaaagctttacgtttggaaactgaagaaccttggaaaggatggtagatgtgaacaaggcagcgtgtttgacgacgacaaagtcaccttcgtcttcaaagtcaactcccaactctcgcaaaaaagcatccgcgggctttctgatcaccatcgccgacatgagctggccgccaacccaggcacctccacctagagacagagaccatggaaaaaaggaattgcttagtcatatacgagatgcatgatgaggagagaaaagtgttctgaccaggggcaacaccagcctcaagaatggtaattttgaggtcgggtcgttctttggccaacacatatgcacaagacaaaccggcacttccggcaccaagaatgatgacatctatagaaaaaggtgagaagagattatgaattttgagttagataaggagacaaactatatatgagatggacaaatatcgatgtagagtaaaagaataatcaccagagatagcactcttcatgagatcgtcgtaatacctcgaggtcatggcccgagaaaccatatattccttgactgtaaagaggccaaggatgatagatgaatatatcagatacgatagattataaaattaacgatcaggaaagattgaaacgtactgggagcgaaccgatagttcccgttgaagtcctcgacaggacctttgattgagtttgcggcctgagcgtccgcctcgtcagaagacgcgactgagagagtcttcttgacggaagaagggggtgacaatggcagaaccgaaggggcgctatcaagcttggtttgcataggggcgagtcgagtggccacgattgaagatttgaaagagtccatgatgtgtagtttggaaaaaggatggatttgaggtggatgaagccgattatgggtttgagaacaggaagagtaagggggagtggtctgaaaaaatgaaggtaaaatgcagaaagagagatgggagactgttcgcgcctgtttttatagtcgaaaataggggcggagaaggatcgagaaggtgcggcacccgtgttcatgtcacgcatggatgccggatttacttctggggcggagaagagaagagcggaacgttcgagttcgtcacgagcggtcgttgtgttatctaatgattgctatgagaatgacctatagatagctactataggcgacagtcgccagataaataaattgatgggcaaggagacggacctccgtgcttccgtcccatgtgattggggggaaaaagtcggacgcgattggaatattcgtctttattcaatttatcgagagaaaaaattcctcctttgaattaaaaaaaaaaagaaaggaaaaaaagaaaaaggaaagagcctttctagacaatgacaagcctgatgaggcaactgagccaccaggtagtcttcatagggacgaatagagactattgatgaagtctgatatgtccagggaaaaattagcttggatagagaccgagagacggttccatcacgattgagctgacaagcccatctgatgagatgtctttgttttttttttgttttttgttttttacattttttttacattttttttgccacagtaagtctcagaagaggagtgcaacgctgtaggtcttttcggaagcctaggttagtgaatttttgggtttgaccaagacatctcggttagtgaaatcgagaactagctacgacctcgagtcaatggtttctccaaagcacattcgcgtcgcacgaattaccgtgatccgctattgaccgtatgttctcagcccgtgaaggcaccggttttgctttggaagacaagaaaaggtagtataatatgatataatatggtatagtagggtattcattgaatcaaagcatagtagactacaagatacagaaacaggaaagaggagaacgggaaagagaagataaaaaggaaaaaaggaaagaaatcaggatgaagaagagatgaagaagaagaaaagaaaagaagaactcaagacgaatgccgtttaatactctggcaagatggttacggtcatgtaacaccggcgttgcatccgcagcaacctttcctcacgtggcgcacaggtccgatcaaaacaacaacaatcacttgtcttcttatttatacagactaatctgaagatgagatctatcctttctccttcttgtgtttctttccctccgttcagtctatcgcatccttctacccacactcgttcactctagttgtcctttgggctgctcaaaagtggcctgtttccttcattgtcggtcttttactcatgctctccttttcgcaggcgcgcaagctgataactatctcgtggcttattacagagtcccttttagacctttcacccgcctccctctgatgaagttccttgcttctcttttccttttggcctcctcggtcacggccgccgtactcaatccttccgatactgctaattctattcctgtgtgtattatgttgtatcgtgtgatttcctatgcgcgaaagtcatcttccatatgcttcgtgtttgtacatcggctgacgacataggaaacatgtgaactatattctttgttgcgtttttattaattgctttattattactattattactacta

SEQ ID NO: 1098 - DNA, 19450 bp, Xanthophyllomyces dendrorhous
ctattattactactattattattattattattattattattattattataggaaacctatgttcctaacaaatggatagttgagtattcctctggagtcgtcagtagtaagcgatccatggtaagtcttctcgtgccgtgtatcatctgcctcatgcgcactgaacaaatcatgcctcatctactttgcttgatcgcgcgctttgctacgcaggaccctcatgaagcttttagctctcatatggaaaagaggggtattcttcacgacgtccttcgagtatttagcagccagggtctcttcactggagctactattgctgttgccgatgccgttcgtacttttcccaatcttcttcaaacatatcgttagccagacacttgctctagtcatgctgaccctttcaagttccattggtgatgttcgggcgcacacattcaacgacaggatattctatcagtccaatctatccctggcgtcatccgggcttatccggtcagactcatccctcgacctgatttctccccccaacccggctcgctggctggaatcgatacctagttgagcctttcgttatctcctttcatcgaatttgtagcctagtgactgatttcgataatcgcgcatcggttatgaatttaccttcatctcatatcttctaaactaaatcaaaaaaccagcactcctcacaagatgacgaacgtgagccaacttcacaatttaggcatcaaaggcaagggtgtccaggtagccatcatcgattccggagtggattacaatcatcctgctctcggaggatgtttcggaacgggatgcaaggtcgtgaaggttcggcttgttctctccgtcttcgtttccgtattagatttgatctaattgttactgaagcacatcgtcttcccttgccaatgacatcccttgaatcaaaacagggctatgactttgtgcgttgcttacaatgattcactctgtactccccttggttctgaatctgatgtcttccttttgatatatcaggtcggaaatgcttatactggaggaacgtccactcccgtcgaaggtaccaatccgatcgactgttctggccatggaacccatgtcgccggtatctttggagcaaatgataatgtcaacaacttgtatgttcaacggatatatggcgctcgatgcgaataacaagagtctgaatgctctggatctgattaaatacagtactggagttgctccagaagctacgatcgctgcgtacaaagtgttcggatgcacgggaagtgctagcaacgatgtgatcattgctgctatgctccgagctgcttccgaggtgaggactatattcatgatatcaattcgaaggaagtcatgactctatcactcaccatgccttcgttcttcgtctttctgctgttcatcatagggatctcaaattatctccatgtcgttgggtggcgcgagtggttggagcgaagatgctgtctctgtcgtagcctcgagaattattgcacagggaattatcatcgtgagttatcgagagacgtgtcctcacaacagcaaaccgtcaatgactgaagtagattttatgacgccttcatacagactgccgctgaaggaaattccggtgccgaaggtctcttctatccttccttccctggtacgggtaacggtgtgatctccgttggcgctgttgacaagtaagttcatcggcattgcccgctctgtctattcatcgacgtatgccaaccaataaattcgcaaactcaactttaatggtacttcctagcctcgtgactcccggtcgatacactcttctctcgaccaccccacctacacccatcttctatgacggaaccgccgctatcaacgtgtcgagctcgactcaataccctatctatctagcttccaattcgacaagtactgattctcaaggatgcacaccgttcacagttgatcttacgggcaaggtcacggtaatcaagtaagtaaagacctgttctctaaattcgtttaggaaccaccaaggtatatgtgctagacaaactagctgacacgtgactgttgttcaaaagacgagggatctgcacatttacagttaaagctcaaaacgtgtacaatgctggtggacgaatcgttcttttctacaacgtgagccgatcttgccctctctttcctctatcaaaagctcaattcaactaagttactttccctgtcgcgaccattagaccgctaacaccgcgctcagtgagtatcaatttgttctataaattcgttaacacctcctatgtggataatgactgatgatcaagaaccactattgacgggcatcttgtctttctcgtttcagctgcaactgtcaacggagtagccgttcagtctggcactttgactctcactggcggaacaaacctcgtcaatgctgtggtcgccaatcccgcgctgacagtatcgttccctacgggattctacaacttcccaaaccctactactggtggcttggtctccacgtacgattcctcttgccgtttaagcatctttttaaatagagttggtcttatccaaattacgtctgcatttttatcaaaggctttcttcttggggacctacgttcgatctgaagatcaaacccacaatagccgctccgggagggaacattctgagtaccttgccattgagccagggtgcgtatggtgttcagtctggaactagcgtaagtttcctttgagccgaataccatacatgaaatgctctgtagacactgatgtatcttcaaatgattatctgttcgcatcagatgtcttgccccttcatctgtgagtagatctcttggcacacaagtctagagtgacgtgactgattggctcaccaagatgaattctatccatagccggagtcatcgctctctacattcaaaaaaacggacgcattgctcctgatactatcacctcgaagttaatcacgagctcccatcctgtctccactactgtcaatggcaccttaattcagcctgtcattcagcaaggaggaggcttggtagatgcctatgcggctgtattctcgaagactgttgtgtctccttctggatttgctttaaatgatacaacgcacgctgtgacaaagtcgactttcaagatccaaaacttaggactccttcccaagatttaccagatttctcatgtacctgctcaaacagcttctaccttttctagcgtatgttcttcaaatacacactactcaaagagctgactgatatcagaaagtcgctaaattagttcgatacttatttcctaaacagagctccgttcagcctagtctctctcctgctttcgctcagaaccccgctcaggtaaccttctcgagtacctcggtcttggtctggggtctcttgtcatcacaagtgactgttaagttcacagctcccgtttcgacacctggaaacgttcctgtgtattctgtaggtctattttaaccgacctgtcttactgattgttgtaacaattcagcttgataactgatccttctcacattgtctcgacaggggtacatccaaatcaagtccagtggtgaggtgtatactattccttacgctggtgtggccactagcatgcatgacaacttccctatcctcgacacgtacgcgcttgtttgattttcgttccgatctggctagattgacctgatacaacgttgtctcccaacctttcctcatgattttcttcttctagtaccaactactactttggaagtaaccttcctgccctctctgatgccaaaggcgcctttgtcactgcacctagaacattcacttttgtcaacggcggtgcgctcagtttctcagtcgtttcttgttgttcccatttctcaactgatcagtcttcgttgtgttgtcgctgtacctatatagacgttccgtctgtgatacttcggtatgtttgattcttatctaaaaaaagtcttcatcgaaataaaattgagaaaaaaaagttaacaaacctgacgtgtatattttctagactgatcggaggaactgctaagctcctcattgatcttgtcgctgcgaataccaccttcactccgaccatcgctaagcgagacggaggcgttaatggtcgaatgacccacgtagccaagcgagctgcgcctgctgctcccatcagtctcgctcctctcgtccaggtaggtttcgtctgcgttacgaactgccgttcagactcattttgctcaccccatctgacaacatatgtatagtactcgtacaactatcgtaacgttcctgattctacggcgaatggagttggatgtacgcagtctttgccttgtctgtttcgattcactttttgttcgggcgaatactgacaagatcattcacgatctttgatagatcaaaaatacgccctctcgacgagtaacacttcgttcacttatgtcacctccgacggaaccactgtacgtgtacccgatggaagctaccgcgttttaatccggggtctgaagatctttggagatgagactattgagagcgattatggtgcgcctttccataaattgttgcttgattgatcaggcttctggacttattccccaatcaatttcgtatcgtctacagaatcttggctcagccctattatcacaatcgcgcaacaaggcacttcaagtgcttcctccgttgcctcatcatctgcttcctcttccgcgtcttcatcctctcttgcctcttcggctgtggtttctgcctctgtctctgtatctacctcaacctctacctccacctccgcctctacctctgcctctgcctcgtcgtcatccgctgcctctgcctcctcggtttctatcgttactaccacgcagagttccagttcaatagtttcttcgtccgcctctgctacgctgactgtggctcgtcgagcctctcacaagcggcagcattaagtcgaggtcgtgatatgctgtatcttgctctactaatctttctacatctgatattctacctcaatgccattcgtttttttttcttgctcccttagtataccctaataggtttatgtctctatattcttcaatctctttcttcttcgtttcgctttctctccaagttgaatactatctaatctgtctgtgctgagagcaggtgaatttgtagatatcttgtagtgccatttctaacttgcttttactcactccttcgaagctaatgattcatcgatccatcgatcttcttcctctcgtcgtgcgaagaaacaagtataaaaacatgccataagatacattccagtcgtctgagacgtacaaccatagtttagcaaactttgagcccaactctttctcactcctgcatagccttgagagtatcttcgacagttcggaggaagatcgccatctcttcgtgaccaaagatcaacatcggtcgcaatcggacctatttattaatggaaaggaacacgtgtgtggtcagcacagatgtgacgaacggcctgggtgtgctctcttcaggaccagcatgagagaacaagaggaaggagaaggagtgacgcacagcagcatctccgcaaccacccatcaagacacctcgttctctcatcatctttacgaacgtatctctcttctgtccgttctcgaaatcccaagccaagaaagttccccttccctttcctctcaggcttctcggcccatcgtactttttgaataatttctcgagggactcgtagagctcggtaccgatagcagcggtgtgaactgtgagatcatgggtgttgataaagtcgatgatggtgttagattgaagaagggtggagggggagcccatccaggtgttgtacattcggtatccatgagacggtcgggtctctcgacggtgatagaacctgtgacggatgagcaacaatcaagtcaacaacctcgtctcttgttccatgttcatcggattcgaagagagaacgacattaaaataaaaaacttacccggcagcctgagccttcttactgaatgtgacaaagtcggggaactcatctttgccttcgaccaggccccaggcgtcgtgagcccagaactgaccagtcgctccgaacccggtttggacttcatccgcgatgaagaacgcgccgtgttgatgggcgagtttgatgagcgatctgaagaaggcaggggaggcgtgtctgtccccgcctttatgtgatcaatttataagaagtaagaaaagccatcgacgtcaatgccgagttgaagcaggatgtaagcgttgaataataacgaaccttcagagaggatgggctctacgatcaccgcagccacaggggacttctccttcctgctcaatcacaatttactgttcagccttctcgatttctttaaatatttaaataaaaatgattcagatgaaaacgaaccactggatcaaaatctcctcagtcgccttgaggcaccgatcttcttctctctggttttcttcaacgtgatcctcgagaggatacttgatttctgggaatggagcggccggccagtcaaacgccggaatatcaagctagtgaatgtcacgaacccgaaaagagatcagttgaccatcgagtgttgtgctcgaaactaagaacgcagcgagaacccaccttgtgtatagccttggatctggtggctgaaagacttccgaacgtccttccatggaagccagaggtgaaagaaagtacagacagctgtggagcgccgggagattgattgttcattaccgattctatatcatgtcgcatgagtgggtcggctctcgtgagtggaacgaacagatctagagtaacagaagagatagaagtcgttcttacccatctcttcggcggtaaagtcgggctgagagttattggctctctctcgagcccggtaagacatgcatgccacctggaaagaacagaacatgactcgatcagtttcaattttgaatacaatgcaacggtcaagtacaaagggtcggaccttgaaagcgttctcgactgcactacttccacagagcatcatcgcgatctggtccaagccgcccttaggctgaactttgagaagtccttctttgagccaggtagagtattggtaaggagggaaagaccccagtgctggtctggatgaagcggccacttggaattcgcgctgagatggataatagccagaagagatgggtcagcgcttgactttctgctcttgtcgggattaaagggtcaacaagacatactgtggaggccaacttcaaaagctccgggttgttgtaaccgactgcgatactggcgatttgctatagtacgagaatgtcccaaagcttttttgttcattcagctaacgatgttctaagcaaaatgagatgcaacgaatgggattactgacggcaaagacgtccaagtatttgtttccatccacatcaacaagatagtttcccagagatttgtcatagtctaccataacctggtaggttctaggatcgatagtatcatctgcgtcggcgagctaacgagttgtgtttcaaaagggttggtcagctattgatgccaagtttacgtagagagcgttcaaagcatagactgacagcccttttggccttgggacccatgaaactcccgtcaatcaacgtgacggagggctctttgggttgctccggaaaggcattcttggatgcctggaaggcagcggcgagcctggcagaagagccatggatcaaacgcctggagagaccaacgaacggaccgagagggatgagtgactttcgggctacagagatagaggccatcatgttgggtgtcactagattgagactgagggcacaagatggtggattggagagaaaagaacaggcagatggaggaccaagattggatctgtgaaccaaaagagagaagctgcgatggaagcagaagagaaagagctgaaagagacgagatagaaggtaaagaaagtgaagaagagagaagttccgacttgaccgcaacggattttagaacaaacagcgatggattcttatagattagatcgcaatttaagcgattatctaggccgagtcacttatttcagggcccggttaataaccggtatgggacttaaatataatcatctatcattcaaaaaccgagataacgtcacgtgcgggagctcggttggacccagtggcaacctgatcatagtggcaaccgtttccatcttgacgttcatcatacacacatatcataccatcctacgcacaccacatagcacatacctagtcggacgaagatgacgacgatacgatcgttccaatcagagatcgaggttggtctctggcttcgatggtcggtggtccatggtccatctcgatcactcagttgactgaccatctttctgcccttcccgcgttcatacccgatggtttgtttgtaggaaattcatgatcgtcatgtcgctcaacaaagagagcatgccaaggaacttcaggctaagcagcaagagttgaaggcatccaagggttctctcggagcaaaggacaagaagattcagttgaccgatcccttagctgcgtcaggtctaaaagcagtgaagaataaggtagagatcgtagctggaggaccctcacaggtcaaaccgatagacatccacgaaggagggaataaagaagagcctgacatcgaggccgatcttaaggtccgtccaagtctttaaactgtgaccgatctcttactttcaatattgactcagtctttctactgttcgcgaaatgcaacaaatagactcttctgcttcttcctacatcggacctgacgacatcctccatcaaggcgcacttagctcctcggctactccgcgcgcatggagagttgatagtcccatttggaaagcatcaagacctgaataagctgtatcatgagaacaaggcgctgagtgatgaagaagcaggctacgtaggtgacgagttggagggcggagagaaggatctggagaggatatcgagcagactgatagaggttgtcaaagatatggaagttgaggtttgtttaggatttctcgtttttgtcattctcctacataatcacagcaatattaaccccggctcttggtgtcgacattctataaatctaatttgaaaggccgtagtattggataaaagtcttactccctttccgcattgtactatgcttatccgtacaaatccttcttccatagagcagatcagtcagtcctgcgttctttttcaacattggtagctttgattacttatcagtgtcctaatcaaacaacagccgagcttcggatggctgtgattggcaacgttgatgcagggaaaagtacgatgcttggagttctcacccgaggagggcttgatgacggaagaggtaaagcacgagtaaatctgttcaggcataagcatgagattgaaagcggacgaacaagcagtgtcgggatggaggtatgggcgcactttactattctgacttcgcgcgcgtactttgtaattgatgttgatattcctcctcgatgcttatcaaacaaacgtatctcaaccagatccttggatttacttcaacaggtcaagcggtcatcccctcatcacatacgtctgtcgctcagatagctgccgaagaatctggtttcataccttcgaccggcacgagcgcaagaagagaaaagctttcctgggatgaaatctgcaaacggagcgcaaaggttgtgtcgtttatcgatctagctggacatgagagatacctgaaggtcagcggtcaaaccgtatagtcagcatcgactgagaaggcatagctatgtctacgatgaactgaccttgggttctttacacattgcagactacgatctgtgtgtatactcctctcttctatcctaagtacttttcctcgatactgaaatttcaatatttattcgcgttgcgaccccacttatagttggtatgactggatgttcaccagtaagaactaaatgtatctgttagctctttctctgtgtagttaacgctcttgatcgttccacgcgtggctctatcaggactatgccatcttgatggtcggtggaaatgctggtttgattggaatgagcaaagagcacttggtgtgtggattggtttcatttttttttatctcgtcatctacgtatagcttcgcccgatcaaacatgcacacgcatacttaatgtgttgttatggcgtcacaggcggtcacgttagcgctaaacgttcctgtgatagtttgcatcacgaaggtatgttctctcgatgtttcctcttcgttgccacaagtggcacgcacatttcgttcgtcaaatttcaaagtcttacgctttgtcttaactcggatttgttctcacacgtagatcgatatgactccaccacaagttctggagacaactaaaaaacaattgaccaagattttaaagtctcctggttgtcggtaagttcctgcgctgagacggccttgtttttgcaatgttttcgatagatagtgatgcatattgtctccccgttccacagacgaactcctgtgtttgttgagtcagaacgagacgtcattgcgctttctcaaaacttcgtaaaggaaaggtacgcctctcatttctgttttacctctcatcaacaatgtctacagctcatctttcgactctatgtgatcatattcttcaatcaggttctgcccagtgttctgtatatcaaacgtgaccggtgccggccttccccacttacgatcgttcctcaacttactaccttcgagttcgtctcaaggccattacgaagtagatgctccgctggagtactcgatcagtgatgtcttttcggttccgtttggtgagttttgcgaaatgttgggatacatgtatttttatatactcttactgaggagtagtgatgttctgtctacctttggaaatcaagttggaacggtcgtggtgggtatatttttcttctttttggaaacactacgctctttagattctgatttcactgtatcaattttttatctctgaagagcggagtgattcacagtggtgttgtcaaaacaggggatactgtacttctaggacccgattctgtgggccagtacgtgacgactgccgtcaagagtatacagcgtaaacgagcttctgttgaaagtgctgaagctggccagagcgtcaggtaagcctattgattcgtttgcggtgactattgatatcagttatggtgttcaacccttgtctgtttatatcatttccaaagctttgcattgaaacgagtcaggagagcagccgttcgcaaaggtgtgtgtccattccactcttttcttcttagcgtgttgggttgcttatccagcgccctcaaattttccaaggaatggtcatcctggccaagacggaagaagctcccaaggctgtaagaaggtttgagggccagatcttagtactatagtacgttgcattcactattttaccgatatcggtactatttttttttgttttcagaaccgattttcttttcaacagctggttgattgatatgcttattgcttatcacagtcacaatacaacaattcaaccgagataccaggctgtaatgcattgcggtagtataaggcatgttctatatctcttgttttcttgttcggccattggctgacagattgttctttgtttctttccaacgtcagacaaactgctcgaatcctttctttgtaggtctctttgtcttttcttcctattgcagaacatcatgtgttcaatatgcatcttgactgactttttacttctatgcagggaccatccacgagggcttctccgaacaggtgatcgagcgaatgtaacgtttgagctagtgtcaagtcctgaatacctaaaggaggggatgaagctcttgttcagagagggaaagacgaagggtctcggagtcataacaaaaatattgtagggataattctcaatggtgcaatagaccggttatctctaccttctctttctttttagcatggtgatgtttgtactcaattgtaaacatattgcatgtacattctgcccagatttggttgttcctttattccgctcttgcgcaaatagtcgtgaacttgaatgtgtggacttagtctcttgcttggttttttttaatagaggaattgtagatgcatgagaataagacgactggttgaatgatgcttatgctgttgatcgaatcgaaaactcgggagtcgatagtttaatactaagaatagtgtataggtaagtgtcggattcagacgaatttcaagtaagcaaaggaaagaaactgacgaggtagggaataatccgggacttgacgatctcgcagtactgtagatgttggtcggtttcatttgcgtacggacgcacatcgaataataagcaaagatccaacatgtgaaaaaggaggggcgattaaagaagatgaacatactcgatcccagtccttgccatacttcttcttgcaggcatcgtcgtcccgacgctgtcgatgaacgagaaggattgcaaaatagatgacgtagaagtaggtgaacggagtatcaaatccagtagggaggcaccatgcccaactaaaaagggatgttccgtcattgttgcgagacaggaaaacacgaagatagatgaaagcaacatgagctgaattgatcatttgagtgggagtaacaaagcacaagaacgtatgagaacacatacgccatcgtccaatctattcagaaaatacagagttcagggagcagtaacgatgaaaagtcaggctgaattcatcttaggtgaagtatatcaggaaactgaagaaatggagaaagagttacctcctaggtagttgggatgcctcgatcgcccccaccagcctgaagtaagcaatgcagttccacgctcggttttcatcgaggtcaagtctataccggatttttcaatcgagaaaacacaagtatgcgaatgtccaaattcaagtcaatcattctgtcctctgtttgtgccctcgacccatcggtgagggatgaggtaactatgccaggaaaagaagacacatactcctagggttctttcctgctctaaaccactctttctccaagttggccgcccggaagatgtagtagcctccaacctcaagtccaatgattgccagcacggccaaggtcgagagttcggtcgggtggaaagcgaggtatcttgcctgaagcgaatacgtgaatggaacccaggcgagatcaccgagagacagcatgaaaccaaagccatcggtggtgatatccatctgggtaaagatcgcagtctagattgaggaaaggaaatgagatgatgtatatcaaaaatatgaacacaacgtcaacgatgtcaaacagaaagcgcgaacctcgttgtaaagcgcatcaatgacgtagattgagtggaacacgacaacgaggatcatggaagcagcgaggtatccatcgcgggtgtactgctcacaagccatcgagatatcaatgatcatccaaagaatgagtcctggccgaagctcgttgaaagtcttgatatcgaatgaaccaatggagggattgagttcccgacccatccagaactgttgtcccatggcatgtacatgtgatatgaaagtgttcagctatcaactgagctaacagtgacgaacagcgttggagagaagaggcaaaaaccttacgtcgtagaaaaatcgacctgaatttccagcaagggccatcaatcgctcgtccgtgttccaatagctgacagcctgacagtacagtgcttgggcgattgacattgccaaagacgcggtaatgaggccaagataatgatcgtagatgaaagtgaaggattggggaccggcatgaatgattcgaccgaggacaaggccgagagagaggagaagggttgaaaaccctggattgggatcaatgagagttgaggtcggagggagaagatcgatctatcagctccttctcaattttgtgcgcgatcatgaaagaacggcaaaatttgagagcacaaacataccattgagcttgtagagcttcttcttcccgtccctcatagcagctccctcgacccattcgcctggcaagatataccaacacgcgactgtgaacgcgtaccaagcggcgtaggccttgaacgcctgagcgtcgaagagttcgtccaaccacgatccggccagaaacctaccgaaccaggtagacaatgggggtggacatccagagtgggccgaagtagtaaagtaaaggaagtatatagcaaacggagtgatgaagttgaggccgaatgtaccgatgtgacctccgaactaatggatggtttgtgagggatgcaagaaaaaaaacacgtataagtacttgatcggaagagacgagaacagaggcaagaaagattgaccgacctcaagatcatgatgaggagtcaccgggttcagcaccttggtgtccttggaatcgatatcagccatccagaaaacaacaaagaggaagatgaaaacgaaagatcgagatcgtcgttgctttcaaacaagaagagacaagatgtggaaagtgaaaaatgacaacgatatttaatcgaaccacttttcagccatccaccatcatcaacgataacgacgacaacaagaacgacgacgatgacgacggcaacaacatcagcatctttatcagctgcgtcttctatcactgccaacaggcaggctggttcttccttgcagcccaaaccagccggtcatcagatgcgaatcgcttctcaaggaacgctcaagaactatgttacctttgctgttaattttctcaaagtatgtctacctccctcttttcctctcttctgacatgttctgatgggattacgctcatcgggttcatttgctcgtcgtccacgttatcaacattattttttctggcgcttgagcaggaacacccaacccgatctctgactctccatactctcccgttcgttcctccttcgaaagattcggtcgattccgcctcttcgtccgaatcacggaccacgccttcgaatcgtcaagcgagcgcctcgtcgattcctcagttgatctcagttgtagaactcgttaagcggacgttcctttccctcttgtcgcctcttcttgatggctctgatgcctcttctggtgagaaagtcgaccgatgggtagaacaggcaagagaaaggggcctgtggcagtacaatgagacgggcatccttgaggatatcgagcatgaatttgtcttccagccacaagacaagaaggctggtgaagaaacagatgaggcagagcaagctttagagaagctgaagcacatattgggaggaaagacagggtatgtcttcttccgtctctctgcacatcgtttcctgtttgattttggaaaaacatactggtttctacgcttacatcgcccacatctgccccctcgttgctcgaaccaaagtcctaaaatgatacacacgccatatatgaagattacactctccactgttcccattccttctcttgcctctcgaaaggaagtaacgtaagttgttctctctcagcagccattacacttgctcgctcatatgtattcacatcactaacgagagaacaaaacaatacatcttatccatgcacttatttctcaatcttcactaacaaacaaaaaaagctgccaatccattattctgcctccacgagttaaaaagtcgaaaaacaaaggtcgacaagcccgacgacaaaagcttaaacaggccctgtgtaggaaaaccgatgaatccaatacgatctccgctcaaacgaatattactacccctctgtctgcactcgctgctgtttctgaagattcttctgctgagggatacgcggcagggactaaacgaactagcagtcagacagatggggagaagggggtagttggagggaagaaaaggcgaaaagtcctggcttagaggggacttttcgaaactctcttttctcgtcccaaaggcagagaacagaaacgcgtctgtatgagagagtgggaagggtagtaaaaggaaggagggagataccgactgtatccctcaacacaaatcgtgatcacacgccaaataccgctctgacctcttcctctaaatctctctcattcaagcttgccccccagccgtcgaatccactatcgttgtaatgaacaccgccagcaataaacttggcacttctctcggctcgaagggtgagatcgccaatcaataatcgggcgggtgttggtccaagaatgtcgtgtactgtcttcctggatagaaagacgggcgtaggatactggaagatagggaactgtgtgtgaagcagactttggtatattcgtgaaacagataaatgaatttccggtggacactcgtcagctttattctatgtctgaatggaaataaatgcatgtttgagaagatatgagtgaaggaacaggcttacgtcgctagttccgaggcaagtgatagatgggtcttcgatgcgggaccggtaaagtaaagttcacccctttgaggatcctcatgggttgactcggtattgtcaaagtcatccagatgatggttgttgtatctgttgagaggggccatgttcgatgggagtgatcttgaaatcgccgcctctacctctgtcgccgtcatcgtcatcgtcgacccggttgtcatattctgggacatgttggtcggactgacagcagccgtggccgtcgctgtagcagcatacatatcatctctcgtttcaaagatgctgcccttccgagctgtcttgttgacaggaacggaagaccgtcgctgcttggcaagagaggaaagagaaggtcgaggttgaagttggaaagcaaacggtcgatcgagtggtaccggtggggttgtgtgcatcaggacacaagtcaggaaactgacgagcgatcgaatgtggatagttgggtagtctagttttgtgcagcgaggggcaaaggaagagtaaattgttgaaaaaagagacccaaggaaagcttcttgagcaaagacaaccgactaaagtctgagagaaagagaaagattcaaaagacttacgacccgagccgtcgcctaccaggccaactctacccatggtaagggcaaggttgatcaatcgagggatcccactccctattctagtaacccccggaagatgaccgtagatgagcccagcagcaacaacgatcgtttggatcgaatgcgagtttgactcgagggccctagattcgttgaatattcaaaagtatcagtcaaagataaacagaataaacagataggtaggtcagactagatgaatctatcaaaagagaacgatatatagcgaatatgatcagtgacgaaccaacgaatgataggagttgatggatgactcggagatagatgcgacatcacgtctggatccgtatcctgttgtcatatcaagccgtcgtccgaattccaagatcgtaaagcaaaaccaatgtcaggtcgactggattataactcagctcagaggatctgagccccactcgagatgaagagaatcaaacttgcgtcgagttgcagccgtcccgtattttgccctttgactcgcaacttgagctcctcttcctctgtaggaacgaacgcgtcaacgccggtcaaatggatcaacaccggccttctcctcccccgtctctgttcaacccgggtggtcatgccttcgagcacacccgacatgaggattgggcaatctgagtttgcgagagagagcacgatatcaacatccgagctaacctgagcgatgaacgtccggtccatcaaatcaccccggagaggaaagactcgaggatgaatcatgtaagaagggaccctgtggtgtacaatgaaaaaacgttcaatagctcgctcggatcagagccaagcgcgatgcaagagaaaagaagaaggaaaacaaaaccaacgaggatgaccgatgaacagcgacgatctcgtatccattgagagaggccaattgagataccaagaaggatgaaccgacgtaaccagtagatcccaactaggtagtcgagcagattatcgcgaggaaagcgcaaaaattttcatcataaagatcagtaaaagtaaactggatgatcctgaaaccaagatatgctaaagctgaaaagagctcaccaagagaatcctgggtttgatatccatttggagggtcagactgagagacgtgttgggttgttgggttgtagggttgtagggttgttgggtcgaatagatgtttgaaagaatggtttggtctttgataggtttcactaagcttctgatgtagatgtgcgcagaagcatgactgtctctatccgagcgagaagagattgaagtgaaggaagcaaagggagtagagggagtgaagggagtaaaggagaggaagagcgagcgagatggacagaagagtcaagacagagaacaagaacgaggcgaatctgtgagcaagggtgaagaaggaggagaagtaagtcagcaagacccgttcggtctcttttctatgtacaaagaggagcacacgaaatcattgaatggttcggagccggaaagatgacaaatcgaaataaagtgagttgacttttttttttcctctttctttatttttctgcttttccgatgttgttccattcgaccaagcatgttgatctcgtcctgtttccatctatagtcagcactggacatgaatatatacacatcgatgcagcacacatgcgttccctctttacccagacttgtacagatcagctcttctgttgggtatctgcgaggtgtgagtgagaatgagggagcgcgtgcgcataatctagccatcaggcagcttgcctcgccgcgatttctctcatgcttatattcatccggcccgatttcggaccgttcaagtgacaaatcacaatatcagatttcaccattggtttcgtcatatgtcatcgtcaataaacagaaaatctatacagaacaagccggaaggagtcaatacaggcgaacgtatccgacagaaacgtctcgtgggcaagaggaagaaaaggaagagctggaagataagaagacagtcgttaagagtataactaaaagtgaaagatgcattccaggatctatgtctccctcgcatggaccgggcaacttctccctcgagagagccaagcgctgagacagttgtcatcgaacgtacacaaacagttcaatcgggccaccttcgatcctggctcaaactcttccaaacagatcacacattccatcccgatcaacgtcgagtctggtgcaagctcgtacactgccatagccctcaacacagatcagttcgggtagatctaaacatgaatccgtgatggaagagatgcacgacgaaccaagatatctcccggtctgaacgaccgtttcgccctcgagacactcctggacatgtctttcttgagcacccacgtctccaaattcggctagtggcttcaaacatactggacagctatgacacccagacaacatacacacacatatggacttatggatcagtcctctctacgcaagtagcttctgagcggtgaaacaaattgatatatatatatat

SEQ ID NO: 1099 - DNA, 6207 bp, Xanthophyllomyces dendrorhous
cacatactctgctagatcactcctcgacgaactgatcgtggcccctgccacactgcctcccgctgtttgaccagttcgatccctcccttggccttcgccgcctttgttaaaagactggccgatccttcctaaaggcaggatcatctcggtaaagcacgggtcgcatactcggtggggcacatgtatctgatctgagatcatcgagaatgccatcgatggatccaacacaatctccgccggcaagagtcgtgtcgtccgacgttgggaacacgagtgacacacgatctgaccacatcttctgcaatgatgttttcgtaggaaaaagttgaaacctcggttgcatcgtctgcaggccgacacgtcttcgtccctctcccatacaggaccttatcgaaagaaaatcaaagaaaaatccgaacgtcagcccctcgccatacttcacttttcccttcctctctacgtcgttttcatgaggaagaaaactcacgatttactattggatttaaccccaggccaacgccattccttctgaacggtataccagcctccgtctgagggacaacgaacgttgcgctctcagaaagctgggtttcgatccctggggactcgtcggttacctgatagaattctgttgagagtgaaaccgaggaagatcgagtcgagcctcgcccttggggtgaacagatcgaaggcgataccgaggccgattcgcctggaacgaggaacccggacgtttcagatccagaatcacacatctcggtttcttctacatctgagcattgagagttggatttaacatattgtcaacaataaatcaaagacgatttgtgtttgagctcgcccctgtcaaaggccataagcacataaaaggatctaaccttcggggtgggctgattcagagacgacgagccggagcgcatccaactctatgtgaagtgaattcaacaacccttgggctgcttccgctctgacctcatccgagtcccctgtgatcgcagcaaaagaaagagagtaaagtatacggacctcaacgctcatgcaaagcatattcgtcgaagggaataggaaaaacatacgttcaatcccaaccctcaacccactcaccgctctctccaacttgcctaacgttatcttcaaggtagccggcgttcgctcatccgtgctccttccaggggttgtcccgccacttcctcttcttcgtccacccgccaaatatctcgccctcgctagatagtcctccgtcttattcatctcaagttccattcctctaacggaagactcttgctcgactggaagtgcactagccgaatccaaactttcattcttcctgttactcctgactcgcgaaccgtccagattgaatccgggagtgctcaaaccgtctggttcgagaaacggcaatgcgggcacgtctaaccgacgtttcgaaattctgacccaaacccgacgacggacccacttggcggcgccttgttcctcgattgaacttgtattcggtagggggatagacagagacgacggagagggaagaagtgaggaatgtaacactggggatcgaccggtgagtgccgaacttagttcggcgggtggatgagggagccattgatctgcaggtgtagagaacgtaggagcatacatccagccggtatgaggatcacatcgagggtttgactacgattatatataaatccatatagaaacagtgatgacaatgagacaccgaattgaaaataaaaataaaaataaaaaaccaagaaaacaagaaccacagaccagatcaacttcgaactggctcagccagaaccagccttcctcttcctctacctctcgagttcccggaagaggcatcacaaagggtctttccaacgaaggcaggttgatatcctctagctcttctattggcacgacaccctcccaatcacccggcttaccaatcgtgtcgaatgaacctgtcggaacccttaactcccagggagatcgtctgcctttcttacccaggccagaactagagaatcggggccggccggttgacatggcgagagtcttcaagcgcgcgtcgagtctgagaatggtttcaagtccgaattccaaatgagcaatgagaggcaactctgggaggaaactcgaaaacatgctgaatattacctttggttctcatacaccacaatctatcctcgctcgaaacgaatgcttagtacggtggaaacttgtgcgttctcgacagagctgagtcacgtacaggaacgctactgtgtactgctaatacattgtatggctccgcccgaggtacaaccatgtccggccatcgttcagcttcgaattgttgcaatgcctaagtttaccgtcgtcatgtgaaagaaaagaagaggtaattatcagtacgttacctccaacctaggcgggatgacatcatcataagaatgcctacatacctcgcagataaagacctcaaacacaccagcacaaacatcaaaagctgtctctccaaaatgatttctcatcagtggatccgccctccattttgtgactaaatagaggacgactgggaggtgtccgttcgcgcaggcacacactatagatcaatgtcacaacgcatatttagcattcagtaaggtcggaatcaagagatggaacagacaactcactgagcggtgtccaacctcctttggatcgtttgtcaacccctttcgttctttcttgaccaccatctacagcttcagccgggttatacgtagcagcagacgaattggcacactgtattcacaacaaagaacatgttcacttgttcaggagaacttcttttgaaagcaggcagaagtgaagagaacgaaccaaaaactgaacgatatccaagtatcctctggaacaggcgtcatggagcgcagtaaatccttcagaatctcgagcgtgcggatcaactttcttctcttcaatgaggtaagcgatgatatctaagtggcccttcagagaagctttatgaagtgccgtctatcatcgcatgcgaagaatcgttgaaacaaaaagatactttctatatcagtcttgccagagaataacaaggaatatcagccaaacagacaatagtcagaaagacaaacctccccttctgcgtcctgtacatctacggccgcgccctcctcaatcagatattttaatatgtccagcttgccatgcgaggaggctagatggacaggcatgataagtgtatgaggtgtaagcggctcgtttgctagagtgttgttagaagtctgtgtgtcctcgtcagccatgacatcaaacaaagacaacggcattgaggacccattcgacgtcagaaatatcgttcaactggttgtctacctcagatccagatcaggggagacgagtaagcgtacagggaccgatgagaatattctctgaaccttgtagagctctcccgcggtaatagcgaatataagctcaggtttgacatccctgaccggctcttcattgtctttttgagaaattgacggagcacctaacagcgatgttcgaggagaaacgggtgactgagtgattctagatacggacacatctggaacgggatttgacgatgacgaaggtaaatacgagaaggtaggttgagtggagggctcagaaggatgctcgaacgagccattcggagaccctaaagagcttggttcgcccgtctgttcatctgccttcttcttttccttgatgatcttatcgtctccatcctgtttcttggtcttgtcattcactctgctatccccttgttttaaggttatgttggaagaattagcagatgtggatccaacatcctctccttcctctttgaccagtaggtcctgctcgtcctctggttttactatcttctctagccgtctagaatcaccttgaacggatccatccttcttgttttcaggggaagcaggcgatacagaaggaggaagggttgatagtcgatttaatccccaaatagcctcggctgagtctatctctgctggaggaaggtcactaccaagatttgtgagggatgctttgaatctatcgacagaagagaaccgccagaagaaacagaggtcagtgaccagatggttatctacaagatcatgcacaatatcaaaaacccacgctggaacaaagggttttgagtgtggattcagacccatctcagagctacgagcgatacagtcttggcgtgaatgttcaaatgagataaaaagtaagtgagcaagggtgtgaagtctattcgaaggtcaatatcaagcagttcttcctcacacgatctctccagacatcgatgataacattggttagtcacctttcgtgtcaggatttgcgttatcttttgtcgttaaagaatttactcatgttctcggtaggacgtgtatcatccgttcatagctctactatcatggatcgtctctactgttctgtttctctagagtacaaatgcagacaacccactcattgagccccaattttaactcaaacaaacggatgaatctctttaaaccccctttttctgattatgcgagctcgaggtatctctcgacctcccaactcgtcaccgcttgcttccatacgttgacctcatgctctctaaagataaaagatgtaagcaagagtcgtacaggtcttcgtcagatgatcagaaagtctttaaggatgagaagagaggagagaaggaaaaacggacctggtacccgcaaagtggtcgacaaactcgtccccgaaacattctcgagcgatacttccctctcgcttgaaggcctggacagccgcatctaaatcggtggccaatttaggaagtgtttgaggagtcaccccaggggcgcctactggtccgtaaggtagcgtcagcttttgctcaatcttgaattgtataaatagcgaggagaaagatgagtcagtcagagcgagaagaacgaaagagacgacaaagatacatactcctctgagacccaaagcaaatacggcgccaagagcgaagaagggattcatctatttgaatgatggaatagtgagatgttcagttacggaacgtagatataaaactgaggtggatcacttacgtcggctccaggaacccgaacctcgacttttcattataaagtgcaacaccacacataaactgttagtctggcaaggcgaaagagaagaaaggaagaggaaacctatctccctcttcattgtatgggtaaacaaaaaagaggagaaacgtacatctagttgcttcaggtgctacgccaggaggaccaatgattcgaatggaggccgctcgagagtcgtatctgatttgaccagaacacagcctagatcagcatttattctagaatagatgtactagctagacagaagcagtagaagcggacagcaacgatcgcaagacgtacccataggatgccatattgggggcccagaaggcttcgccagcgaccaaccgcttgtacgagttgatcgtaggacacaacattggcattatatctggcaaccctcgaacgacaccagccaggaactgttcacctaattcggacagatacttagtgtccttgaaggccgcatcagaccgcccttcgggacaggcgaacagattgacgccttctggagaacgaagggagacgtggatatggctgaggtcagaataaatgagagatataagaaacggaacaaaagttagccgatgaatctgaaaagggtgggtctgaaacatagggtgcgcacccagagcaaccggggagctgaacagacgaatgatgatatcagcaaggtgatccaaaaaccgtcgcactatgtagaccgaacaacaaactcacgtttccatatggcttggccatgaaacttgggataattcccttattcactccagccgttttagcaagcagcttgaagagaatagcgttatctgaaactctgagcgcgttggtgtatgccaacgcggtttcgaaaactccaggtccagtctcggtgtctgagagtgatagcgttatgataggcgcgttcaaagtgagtacgggtaacatgtatagaccgaattagcggtacgtacggtgggcctcgatttgaatgccaaacgcctctgccttgttgtgtagatcgtggaagtactcattattcaaaagcggccggagaacggagtaaccgtgacctgtcaagacgcaaattttgggcgtcagattgtggttctctagccaagtctaaataaaagttgatgcagcttaagat

SEQ ID NO: 1100 - DNA, 12109 bp, Xanthophyllomyces dendrorhous
gatgcagcttaagatatacccacgtccaggcgtcaaagcagtcaaaccggtccactgcttcttttccaatgattccggggtctctttaaactgaaagtactcatattctactccggctaatccatccgctccgtcgactagttttcggaccttgtccattgttcggcctagaaggcccctaggacatgctgagaccggttctttggtgtctgggtcaaggaatgtaagcaaaaagaacggtagattatactcgaacggaaggcggcggctaaagaaacgaaagataggacaggattagaagaccgacacatatttaggatgaagataagggaggacaaactaggtcgagagatctattctggcaaggatatcccggtatccgttcttgataagaacaaatcggtaaaacgatattttagcatacaaagtagtggagatcaggacgatggatcactgcatcaaaggaattgctcggaaacataggaaaaggtagatgagtagtgaagtaaactcaccgccttgtttgagatgagaagctctctcgagtatgtctcatcatgaagatcccatccaaaaatgacactacactgttgacgacagagaagtgaaagtgaggggccgagatggtccgtcggttaaatctttgaaaagaactgctatccatcagagcattgaaacggacgtacaaagccaaaatcactcttgactgcactgaggaacttcgacttactcatatactttcctctgagaacaccatcgacttgagacgttgatgccaaacgacaaacgagtggccgatgggcgttgaagaagtagatagatagatgtcagttgtcgaattgaaggaccatgagaaactcgaccgccttcgtttgtgggacttaccgtccactccagcgaccttgaccttgatatcatccttgagtaactccttgagctcttccaggttggttggtgcattttcggtagccatgttgtctgtgtgagaggatttctgcttctgcttcttctccttttaagctttgtagatgaagaggtgagtgaagagtgatgatggttatggttatggtctgaaatgttatcttcttatcaccgcggccaatagccgatgacgctacttatcgcccgtctgctattctgaactttttcggctaacacagagatctatcatgaacatctctgtcgtcgccaacatcatcatcttcttcttcctcgttgtcatctatcatcatcaatcgctatgatgaccgctgtagaatctgcacactgaccaggttgacctaaagtcttctgaaaagtatatgaaccttttagactgatacgattcagctgaccaaaatactgaaagtcctgtatccagccgattacatccgatgctctcacatccgacgaacgagaccggaatgattcgttccggtcatggacgaacggtaggtataaaagcaagagatgaagaccgtttctcttctttcttctcttgcaccttgcaccttctttgcgcgttcaactctgatctctatcaagacccgcttacttgctcacgtacccatcacccatctatctacttacctatctacctatctattgatcatgtctggagctctttccgtcgtccctgtgagacttgattaagcttttccctggtttagagcgttaaatcagtactgatgcttctcgttcttgcctcgttctccatcaggctggtgtccttaccggagaccaaactcgaaaactattcgagcatgctcgaaccaacaaggtgcgagctttgtttccaggatgtcttagttctacaaggttttattcagttgtgtcccttcgatacctccaagacagtatgctatccccgccgttaacgtgacttcgacctcaattgtgagtacttgtactcatccacttatccagcgttctcatgatcgcaacactgatatctcgttttgaaattgagattaggtgaacgctgtgctggaagctgctcgagatgtcaactcgcccatcattctccagatgtctcaaggaggagccgcctagtgagttactgactcggattttttccactagtttttctttccttgtttacagtgcactgactctggctgtttatgacgtgtcggacgagggaatagtttcgccggtaaaggagttgataacaaagaccaaaaggcctcgattggcggggccatagctggtgctcactttatccggtccgttcagatccatactcggttatcatttaatgacccacatgaccggttgctaagacatttgcgttcacagagccgtcgcacctctgtatggagttcccgtagttcttcacaccgatcactgcgcgcacaaactgttgccttggtttgacggcatgctcgacgctgatgaggcttatcacaaggagcatggctatcctctcttttcctctcatatgttggacctttcggaagattccaaagaagacaacatcgctacgtgcgtcaagtacttttccaggatggctaagatgaaccgtaagtctcatgtcacctgatattcgatcaaatggaagtcgaatggtaacctgattacttgagtgcaataacagagtggctcgagatggaaatcggaatcaccggtggagaggaagacggcgttgataactcttcggtcgataacgcctctctttacactcagcctcccgatattgtgagatttctgttttgtcgtttatattatacactcaaagatcgttggcgtctgaccatttctttatactcgggtatcgtttactcgaatcagtatgatgtctttaccgctctcaatgctatctcacctaacttctctatcgctgctgcctttggaaacgttcatggtgtctacaaacccggaaacgtcgttctccgacccgagattcttggcaagcaccaagagtatgcggctgagcagctcaagaatggagacgataaacctctcttcctcgtcttccacggtggttggtttcttttcacttgtgtcataatatatgcctgtgcatgtaatggttctcaaattacaactttggtctttcggttccaggttccggttcctccaaagaggagatcaaagaagctgtgagcaacggggtcgtcaagatgaacgtcgataccgacactcaggttcgttttatcctgatactatccttcgactttgctcattcaactaattattatggacgactatgggttgatgtgtttatccgtcagtttgcctatttggagggaatcagagatttcatcctcaccaaggctaattatctcaagactcaagtcggaaagtgagttttagcccggcatttgacctgtcggattaaactgatcttgattcccatatctttcctcgtcaagtccggatggacctgataagcccaacaagaagatgtacgatcctcgaaattgggtccgaatgggagaggtcactcttgccaaacgggtcaaggtcgcttgcgaagatctcgggaacgtccacaggaactaggaaaaaggcaggatgtctattctagcgtagctcgcgctctgtctttcctcttgcttccactctgtgtcatatactttgtgctttatgctttgtgctatgttgcaatatgttgtactatgtggttctgatagtgcttgggtggttgcaactgtaccttgactcagattggtatgttgtaaagtgtttgatttctaacagttgagcgtctgggttgatttgttgcaaccggacaaacaatgcccttctcaagaagttaactatcaacagaattcgtcagaagaatgctagccacagcttcctttggtgtcaagcttttccatggattgttactttaccccgtacaaacgtctaggtgcatcacatccttgtccctttcggacacacacgtaagggtttccctcgtcgtcagacggattgcttgacagatagcatttcctgtcttccctattggtgatgaagcatgtacaaagacagtcagttgataaggaaacaaagaggacgactctttgtcttcaatcctatctagtttcatagagtgataaagtatggcacgaactgatatgggcacgggcactcggagggagtcggcacgcaggccagagatgacggacaaacaaacccaccacagggagctgaacaattaataagctgatagtgagtaaaaaaaagccgtatgtgtgttccaacttgagtacaagttgagcaggtaagacatactgtctttcatagcttgccaacctcgttgtccagcttgaggttgctgctgttgctgttgctgttgttgctgttgttggaacatgtgaccaaagggattaaactgcgctgtggcgacacttgcaaggatccacaagagagagagaacgaggaggcttggtgaacggctgagcatggtgtgctgttgctgctgatgatgatgatgatacgaatgtgcttcatagaagagatcgaaagaaggcatctacctgggtgacaaatctggtgccagtctgacatcaggctcatcacctgactggcactccgccactctttcatcgttttcttctctccacctccatcatcttcatctctatctcactcttccttccttctatcattctaacttgcaaagtatcgatatcttctggcggttcctttgcttctactgtccctatttatcacagctgaaagcatattcctccagagagcaatgagttctagcatgcaggtcgacgaagctaccatcgagtatgtctatctttttttccgtcctttcttcctcgtttgtctcggataggcatcatcatcggcggattcctgaccttaatcaatcttgattgaatctttagtgagggactttactctagacagctgtaagcttattctcttgctctattcatcttcacctcaggtgtctttcgagaagtcataccaacatatatatttcattggccggatacgtgtcaccctgtcagttacgtccttggacatgaaggtatggaaacctttctggacatcatatgcgacaaatctgatacgctttgaattaaccatggttttcctggtctgtactggttcatctcagctatgaagcgaatggcgctctcaaacgtcttgatcatcggcgttcagggtcttggcattgagattggtacgtagacctttcttcaatcgtcttattcagctgagaactgttccgatagctgacaatctccctgctctcttatccgaatcccaaaccatacgatagccaagaatactgtcctggccggagtcaaatctgttaccctttacgatcctacaccgaccaccattgctgacctcggaactcagtactaccttcgagcttcggatgttggcaagcctcgaggcgctgtctctgcccctcgattggcggagcttaactcctacgtgcctgtccacgacttgggaggaaaggagagagagacccttagcgaggagactttggccaaatatcaggtcatcgtgcttacttctcagggagctcaagaggaagctatcagaatcaacaagtttactcatgataacaagattgcgttcatctggacgacgaccaacggtctctttgggtacgtcatcttattttgtctgtttagtacatagatattcaggcagccagctgatcggattcaacaatgtctaccacaggtctgtcttcaacgatttcggacctgccttcacatgtgtagaccctaccggggagcaacctttgaccggtatgattgtcgaggttgaaaacgtatgtccaaccgtttcttttcctctcccccgggacgtgccgctagaatcttcctgaatgttatctatctacacttgtcaaactcgatcagggtgacgatgccatggtcacctgcttggatgagacccgacatggtttggaagatggcgattacgtcaccttcaccgaggtggttggtatggaagagctcaacggatgtgagccaaggaaggtttccgtcaaaggtacgatattgtgtcattttgtatgtacaaccgaatcgtactgatatacttggacacacctcaatatgtctccacacaggtccctacacgttcaccatcggagacaccaacggtcttggcgcctaccagagagggggaatctttactcaggttaagcagcccaaggttatccaatttgtgagtgccctctagtcgttggaagcagttttcaaatgagttctatcacgcatgtctaatcactcgtctttctgtatagaaatccctttctgagtccctggcatcccccgagttcttcttgaccgattttgccaagtttgatcgacctcagaccttgcatgtcggtttccaagcgctctcccagttccacacaaagcatagccaattacctgcccctcgaaacgcctctgatgcggcagagctcatcactctcgccaacgccatccatgcgtcttcttcggcctcagaggagaagctggatgaaaaggtgcttactttgctcgcttaccaggctcagggagatcttgctccgatgaacgccgtactcggaggattcgttgcccaggaagttctcaaggcatgtacggcaaagttccacccgatggtgcagcacatgtactttgactctgtcgagtcgcttccgagagaagaaccgactgaggccgattgccagccgaagggaactcggtatgatggccagattgcagtgtttggagagtccttccagcaaaagatttcttcgcacagacaattcctcgtcggttcgggcgcgattggttgcgagatgctcaagaactgggcaatgatgggtctggcgtccgggccggagggaaagatccacgtgaccgatctagatacaatcgaaaagagcaatctgaacagacagttcttgttccgaccgaaggatctcggcaagttcaaggctgaggcagcgggtggagcagtagtcgagatgaatcctgatcttgtcggcaaggtggaaactcaccaggaccgagttggtgctgacactgagagtaggtctttcttcttcttccgtctttgagcaatcctttagttgagtgtgttggctgacgtggttttctggtttttcctctctagacatatatggggatgagttcttcgccaagatcgatggtgtcaccaacgcgctggacaatgttatcgcccgtaagtgtcggtcgtttgggcctctgtgttcctatcttggttcggtaagactgattctcttctgctattgttttgccttctgtccgatgaaaggacaatacatggatcgacgatgcgtgttctatgagaagccgctgttggagtctggaacgttgggaacgaaggcaaacacgcaggtggtgatccctcacctgactgagtcttactcctctagtcaggatcctccggagaagagcatcccgatgtgcacgctgaaaagtttcccgaacgcgatcgagcacactattgagtgggcccgggaacggttcaacgcgttgtttgtcgacccggcgactaacgtgaacctgtacttgtcccagccaaactttgtggagacgacgttgaagaactctgggcagcacaatgagcagctgaaccagatccaggagtatctggtcaaggacaagccgctgtcgtttgaggagtgcgtgagatgggcccggctaaagtttgagaacgattacggatcagagatcaaacagttgctctacagtatgcccaaggacgcagtgacttcgacaggtgcgttgttctggtctggcccaaagcgagcgcccgatgcgctcgtgtttgacgctgagaactcggaacacttggcatacgtgatcgccgctgcgaacctgcacgcgttcaattatgggttcaagggcgagacaaaccctacggtgttcaagaaagtgttggccacgatcgaggttccagagtttgtgccaaagcaaggactcaaggttcaggtgacggacgcggagccggtggagaatgaggcggatgaggctgcagatgcgacgacgatcgctgcttcgctcccgccgccttcgtctctcgccggttataggctgtccccggtcgagtttgagaaggatgacgacacgaatttccacatcgactttatcaccgctgcgtccaacctccgagcggccaactatggaatcaccccggccgacaggcacaagactaagcagatcgccgggaagatcatccctgccatcgcgacaacgactgctttggccaccggtttggtctgtctcgagctttacaaggtaggatttgcattcgcgtctcgtatttcaagatatattttgctgacaaatgattttgttcgaaacggaacagatcattgataagaaagacaagttggaggactaccagaacggtttcgtcaacctggccttgccattctttggattctccgacccaatcgctgctagcaagaacaaggtaggctttttctctttttcctgtattcaaggttgagtgtgaaattatcttctctttcctaaccagatgttggtatatgatttctcatgtctataaagtacggtaccactgaatggacattatgggaccgattcgagtttttcaacaacccaacaatgcaggaggttgtcgactggttcaagaccgagcacaagcttgaggtcactatggtctcccaaggggtgtctatgttgtggtcggcgtttacgcctccaaagaagagccaagaacggttggccatgaagatgtctgacttggtagagagtgtgagcaagaagccgattgcgccttggacaaagaatctattggttgaggtcatgcttagcgatgaggatgatgaggacgttgaggtaaggagaggatgtgtttacatctcttcatgtttctctttcttctttgatcaattgtgaaccatcacagaaaggacgaggctgatgtccttttctctctttcgcacaggttccttttgtggtcatacatatctagacggccgaactttttgtctttgttttagccctctcgcccgtttccaatttcgaaaagcttgtatgaatgattgcttcttttctctatagacaccaggctttcggaataagaaggattctgagccgacccgcagtcgattgttggtcgggaacgactggggtggcgactgcgcccggagtcggctccctccttttctctttctcttttttataacacttttctctctactcctcgtctgaacgcgtcgctcatctgctccttcgcttctgctcatggtgcttgctgtgttttgaacagactcgcccgatgatactgatgctttgttgatcacgcctcgtgctgacgctcttttcactgacgaatggactattttctaaatttgtttcctgaattcttccctctttgactgcgggttttttttctctgtttctgctctttcttattcttcgagcaattcatgatggttattgctcaccctctctttcttgttcttacgagatctctttcaaaaggaaaggaagactgtgggaaaagaaaaagaagtactcggatgggactgtccaattcagacctctcctcttcctcccttcttcaacctgaacactcactcactcactcacctctcgaatgatggacagaggaatccatatggacggctcttggtctgcaggctcacagcccatgtacaacaacaccagtgacaacattacctcaatcactaacgatactaccagtgtccccacagccaatactagtgtcaacatcaacaccaatgccaacatcaacactaatgctgatgccaacaatgcttctaacgacatcgagcccccttcgttatcgacatcttcctcgagacagatggacgatccaacggaccgatataacgtaccttttctggccctggcacctcggacgtcccgtcggtcgttgaacaactcatcggaaaccgtctacgccatcgccgcctacctgaatggacaggcagacgtcgtgtttgactccaacctggtcgctagccattaccggacggcggtcgagaactcgtttggagggagccaacagtcggttggatctggcaattccggtctaccgccaggtgttccaaacactcaatcgatcctcccgttggcccaatcaatagagtacatcattcgtcatcccccaccgccatcggctcatgcctcctcgtcctccagcggcccttcttacccacaatcccagttgtcggtcgagatgagcagaacaaacactctgccgatgaactattcccatcaaatcaacgatcaacagctttctgccaggtccagagctgatgtcgagcatggtcgattcgatcacaataatcgacagacgggttcgtatcctacatactacgaaccgaccataggatcctattctacaatcgctaccgaccccctccttcagcctcaatctcatccgcagcctcccatcgccatcggtcaacccacctggccgttcccttcgtccggtctacctgctcatcaacaacagagacacgcgctctaccagtcttccggccaatcgcgttctcagccggattatccaaacgtattctcccaaacgttcccgttccagcccaactacactgttggatcctccgggcaaggtcttgaccccctgtcgactgaaaactccaacgccagcggccaatacggccaccaccatcactcagggttcgatccgagctcgaccaacaatgcgggcctttctaatgggcttttgcggaaaaaagggatgttatccgggccagcacttgcagctcgctcccgattggtttccgattctcttggcagggtctcctcgtcgtcggatgcagtaacaggcaaggtggtggacagaagacggagtgagggatggaccgatccgggaggatcaccggtgatgcctctggtctcgattggagaaagctctaatatgtacgtccagaagtctcgttctgttgtttctttgtagactaaggagaacagagagattttttatcttctttatatcgccttgcaagacgaaatactcaactcatgacatcccccttattcttcttctcttccctcgcctggttcaagctcgactccacaaagttcacctcaacaaggtcgccggaagagtcgaaagtctagtacgagtttaccggtcccatcaacggggacctatgtcggtcgagtggaagaaatgattccctggaacatcgaggtcaccgctagggatcctagaaagacccatgtctgcccggtctgcagaagaggctttgccaggaggtttaacctcaaagttcgtaaccctcctcctctttttttcctctctttcttctctgctcctttgtgcctataaccaggaagaaagactcaccttcgtgagacacacggcgcgaacggaaccaaacaggcacatatgtcgacacacgacccaatgagaccaaaaccgttcaaatgtcaatcttgtgataaaaggttttcaagaggacacgatcttgatcgacatcaacagagcattcatggttggttccctttctttcatattttcgttatcttccagttccatgcctctctttggcttttgaaagaaaaaatttgtctatcagcgtttttttcccgaccttgggacgagagaaatgaaagcgataaacagaaacaagctgacttgaactgaacttgatatctcgacctattagcagataccatcaaagtagaaccttccgaacacgtcaatctccaatcatctacctctgcatcaacatcgacatcaaccgtcggccaatcttcccaacctcaacctcaatctcaatcgtcttctccatcctctctgtcttcttctgaacggtctcaaggtcaaacccgaccagaagcacaagaccatggacaaggaaagagactcaagacttgatacggctggtccgtcaggaacagaagcaggaatggaaacaacctaaaccgtaaacaacctaaaacgaaacgatgtggccttactcttccttcttcttcttcttcttcagatgtttatctagttttgcccttccgtcctctttcattcgacttttcatctctttccttggtttttgttttttgtttttctttcctttttccttttccctttctttctttgcctctatgaaaaggaaacattgttgttatctgtttgtgagcttatttatggacgatcagaagttgatataaaaatagatgtcttttctttattaatt

SEQ ID NO: 1101 - DNA, 5743 bp, Xanthophyllomyces dendrorhous
ccttatactcagctcaagagaagaaaaatgtattctttttttttaaatctctaaaataaagaaaatgtggagttaagagaaacggcagacagtgaaatcgttgtgatggagcaatcagagtgagacagaaacatggataaaagaagggaataaaagtgagagagatgatgaaccgagcggacttccatcagtctatctaagtgtagaatttccggttctgtcattcagaacaaatacatgatccaatcaagtcaagaaaaataaagtcagacatcctagacttgatatcagggagagaaggagaaggaaaaagagagtgggagagatctgacctcgttcaagccaaagagatctgccctaatctcaggaagcatctttttttttgagggaggagagatttattcggtgagcgcaagacaacagagaagaaataacgtcagtaagtgtttcttgattccaagtggattgagaagagataatgaagtagaggagtctcaaagcaagaaatttcggaaccatcttggtctcctctccgtagaaagagattataaaaaattaaaaaaaagcaccttgtcttccaacaaagccaatcgctcatccaccgtgttattgaccatgattcggtttcccgctccgttcaacttgacacctccagcactctcggtcggaagttcctcatcctcatctacgttaacctcggttgttcggccagagatctcggtgtattgctttgaagctgcctcggctgccttcttggccatctctcgatcttttgctcggaccaccaaagtgcacgagggggagagcaccaggagcaatccctatgtgtttgcgagtgagaaagaaagatatcgtaaagcccaaaccgggaatgaaatggaaagaaagcgataaagccagacgtcagaatagaaccaatatgaaggatagaatgttaaagcagatgaacaaagaggcgaacctgcagaatcaagttctccatcaactgggcgtacttgccctcatcgtttgccaggtcggtgatctttcctcgggcgtcttcaaaaagatccgaaaggaactgctctcgagctcttaagattttgagtcgggacgtgttcaaagcagtggattgggcactttttttcagtttcccatcagaaaatagacggcttgtcagttaaacgtgaaggctggagatcggtatatcgacaagaggctgtgactgggagcaaagatggaacatacatcttctgtccgacctcggcttgctttcgcttcttctcgtacagagcgtcgatggcaagagactcctgtcgaacgatctttgcctataaccaacccgtccgtcgataaggtttttttggggggagggtgatttttgttccaatgtgatataagaattatcatcagttcctgattgatcatgaccatctacaataattccattttccattgacggtcctatccgagcgaagatgaaacaggacaggtgtctgaaatcaaaggaggagaaagcatataaagacataccttctcaatagcaaactcttcgtcggccttgacttgaagctctctggccttctccttggcttcttgagaaatgaacgagacctattacacgttccatcaccaccggccgaaacaaaacgtcacacccaagccgacccagacggaagccaacccgggagggaggagccaaaagaagcgtcaaatacagatcgttggtcagacacatgtatacacggacaccatttgattgtaagagatatggatagataacagaggctgaaacgatagctctctgtgagattgaaggaaagaaggaagagagaaagagaaatcgggaacgcttaccatcttgttcatctcgctgaggacctcctggtcattcaaaggtcgtggggcagacatggccgatcgtgtgtgtatgtatacttctgcgtaggtgtatgctctgtatcagagacaagaacgaaaagcaaaggagagcttgtaggtgaaggatgaacgatactctttcggctgagaaacatcgatggagaggagatgagagattgcatctggaaggatgtggttacggttttctggttatggttgatagtgtaaccactccctctcgtttgccttgtactgatagtgactacgtttggttctctgtgtgctcatcctatgaatgctttgtctatgtctcattactgtattcgaacatctcttgctccggctgcttttcacacactgggttcaaagaaagagtcggccaaaatagcaggttcgatcaacgaagagcgcaatgagggagcatgaaggcgtgtatacggattctctctcgaacgtgtcaggttgcgctcagcaaatgctacaatcactgccagaggtgtgtattgttaacatgcatgtcctttgtgtttgagcctgttccatactcggtgcttgcactttgttcaatcagggtgatagttctttcgggagtcaagatgcgtagattgaggctggcaggagttgaatggctgtatatcgaccttcaagaggcttacggcaacatgatgatctaggcggtagcagcagacggacgagcctgtcagttgtatctgttagcagatgatggtgacactgaaacaggtgatgtgactgtcctgttcgcctcaaagtaggtcatgaaagatggtagaaaactgaacgattgatccaaaaaaagccatattagacatgaagccattcgaccgcttaagcagaggcggcagcagccttcttggccttgtgggcaactcggatggccttgttggcagcggccttctcggcaactcgcttggcaacaatggtgttgtactcggcaacctgctccttctggacctcggtctttcgcttcttgatcgacctgaggtgtcttcgtcgctggagtcggaggggggtgacgagtcgctggatggaaggactgcagggcagaacggcagagaaaatagaacacagaaagattaagcgtcagaaaatagaaagcaaggtaacgagagatcaagaaaggctcaagcactcacgccttggtgtagggcttagctccctccttcttggagacgacctctcgtcggacaacgaacttcctgacgtcgtcctccttggtaaggttgaagaatcgtcggatcttggtggctcgcttgggaccgagtcgcttggggaggacctcggtggtaagaccctcgatgtcctgctctccctgcttgacgatgaccaaagagaggacggcaatgtcgtttccgacgatgcatcctcgaacagactttctcttcctctctccggttcgtcgggtcctgtagcaggagtgaccgtcggcgaggaggagtcggactcggtggggaaggaggactccctgcttcatagggaaaccctgcttgtcgtttccaccagtgatcctcaagacgtatcccttccactcatcaccaatgctattccatcatgacacccagggaaagagaaagaaaaaacaaggaaggacagggatttggagggagaaggacaacaagggcgggagatttggatgttttggtttgttggtttttgagaatgttgtcgaagaagaggattacagttgttggagcaagatgtcgttggcgatagaaaacacggatgagttttagagcaggcgggaaagattatgggcgtatatccaacggtttttttaatgaaggagacagttggcgaatcgatcacggagggagagagtagaagcacaaagggcaaagattaagcgtttctcaacttttcgtcggaaactcgagacagagacgtacgaatcggctgagacctcctgggacatcctcttgtcgtagaagactcggactcgtcgctcgtcatctgagtgggtaggaagaaagatttgtacagagtcaatctttctgtgtgactctttgaatatcccccttctccttcaaagatctacaacactccgtccgaccggctggatttttctcatcttttctcttgtgtaaacgctttcaaaaactaaccaatgtcgaggagcttctgggccccggtggcggggttggcgactgtagacagaacggaaagagagtactgttgagcgggtgggaaacctaagagtgtcctaatccggagaggtctgttgctgcttactgttaagcttcatggtcgaatcaaaagatagcctggaggtcaaacgtcaaaagaaacaagctggacgtaagtctgtgtattcttttgtaggtcattttcccctgcttccactgcttcggccgtcttttttttttctcaatttctcaattcttctcctcttgctctctgggacgtatatccctgtctgtatgtgcaccatacatcccatcacttttcagcaaaacgaactcactttcttcaactgatcttgaagttgctaacggcttgggcggctggacaagaaaaaagcgatcttccacccgagcttcagacgcgaccttctggccgagaggcccgtgcggcaaaagtcagatggcgcgggatgacttccgaaaatgaatgattgatgattatcttgtttacataagtacatgttcggccggctctaactctaaccctaggcagtaaccaatttaccgcacttggaacgccgatgtaatgatacaggcttcgcaaccaaggcagaccggaacgttaaaggttctctgaatagaaggtttctccaagctgaaccctctgttgagatctcctatccaaaaaggcgagagagcctccccgttttatatcgggacctctcgcgcatttgatctgcgactggatagatacatatgataaaatcatagagcctcacgatcacgagaaccaaagagagtgaagcatgaaccatgcgaaacagagcatgatgtcaacggaaggataagcattcgaggttgaaggaaagaacagctagcggtggtaatacaggatcccgaacacgtggtgttgaacccacatccctgacaatgagttgtttttttgtctttttgacgatctcacaagcgaaaaaccacagagtcgtactgtcgttgtacagtacctttacgatgtgacataaaccccatacattcaagagtacctgacggccggctcatccttaatacactcacgaaactcccagccggatatcttagtgtagcaatggccttgaatgcaactgagaggctcatcacttttcaacatggacaactcacagggagcaaacgggaagacccagagaatccctctgagctcgaagcaacggactcggcatgctgaccatcgagctggcagtttgagttttgatcctctacttcacatagacggatttcgcgtacagagttcgtattttggatattccaggcatcgtgcatgtgccttggcttcacccatcatccacggttttttgtctataacggatccggacgatacgcttccgctttgctctttgctatcgagcaatcctttgccagtgctgacggtggatggagcgactaagattagagtagactgttgttacaggctaggtgactaacgaccagttgaaatgaagtgcttggctgaagacaagagaggttgacccgttgtgccggactagaccaggatgtcgatccacttcaccggatatattcatcagatgtggtcctacctcatcgacttggtcacaacctcgcctcgatattctaacagacgattcaagtctttcggcgccttctggatgacagcctgttctcgcttcaacccaacttacatcggactcccgatttgagcttctgcttcccctgacccaaaacgctcggct

SEQ ID NO: 1102 - DNA, 18591 bp, Xanthophyllomyces dendrorhous
tcttggatgccgaaggaccaccaggaaatgtcatgctgggaaaagaaagtcaggatcttgtcgatctcgtcctcccgacgagtcattcgatcagggctgatagtgatgactgtgatcggtgtgctgttggtacgtctttggatgagagtgtgtcgcaggtggctacgatcatcccatgaatgcgcatgggatgatacatactcaacgaccatgaaagtcgattactggctgccgatctcgacgctctgtacaagagtcgaaaactgtctatcgacactgctcgatccagttgatacctcaagtgtactagacctcatagagaaacacacgtcactcggagggacttgtgctttgtttcgagtgtgggacattatatacgatgcgatcatgtgcgcttgcagatgtgatgaagaagatgaagacaaaggaaaggtaacattgtatcaaggatgaacttatatgggaaagctctcgagcgcacagatgagccaggagcagaagatgggcatcgacaggaacgagcgttgacaggaaagaaacaggaacagcggccgactggtgttcagccgtcaaagggaggttcgcaggcacagccggttgagttcagggcaaaactcgagcaggtacacaagcgatcgacatcttgtcctgatgacgttctctcaagcatatttagccaccacgagagaggaagtctctgagctcacagacagagcgaggaagctgacggtgcctcgctgttcctatatctctttgcctctttgcctctttggtgcttgctctcagacttgatagaacagagatgtcaatgcgtcgcgcaacatgctgcacctagcccttcaccaggagaagaacgaaggggcgagaatgctagggttcgacgctgtcactagtgaggctggggatgaggctagcagaaactaaacccatgacccacggaaaccttggtggttcgtggtctgagggcacccaagtccaaaaggatcatgtatcgatcaccatcggttgagatcactctcaccatgcctaaggcatatgttttttttgggcatatctgttgctttgattgatgattcaacttcgcgcgcttttcgcgtcgagatcacgcgtcaagaatacgtgtcgacctgactttttatgtaaacgcaaaggtcagcgaatatgaacgtaacaaatcatagtcaagtcgtaaccactgccctgagagttgagctcggacctcgcggcgttaattcagaaagatcgattttttcttctttttccgagtcggccagtttacctcaagtccctcaagaagagtacgtgtgtttgtgtttggagagaacaaacaggtttagctagcgttgcatgcgatccatcccatccgcctcttcttctttcccggtacccggtcatatgtgtggtggtgaaggcaccctccccggcgtaatcctttctttcgaaacgcaccacgacacttctcgacaaattttgggttggcgagggctgtgggaatttgtgtgattcgtgaaccgttcagctgcctcgcctgattcttgaaacgttgtccgttcgatgttgaggaaatggaagcagcttgttcggagacgccaaatacctgcaacaacggaaaatgtcgacgagtgtcgagaagaaaatggaggatggactagtaagagacttggcagacgacggcattagcaggaaaatcgaccatacacgaccctaggaccagttgaagagagaccccaacgacacggtctcccctgaaaaggaatgatctctttaaaagaagaatcgccaaggtttcgaggacgaaacctgcctcacgatctatcaccaaacttccatccctcttcgcacgcaacgctagctggacctgtggtctgtcatcatcactggccttctttttatagcaaactgacctgtccttatccaccctgatcagaactcgccatgcctacccgattctccaacacccgaaagcacagaggacacgtctctgcgttcgtagcctatcttcttttcttttttccctcctttccttctcgactagccaatttcttccctcaacagttcagaaactcaacctatctactcctatctttcttttccttgaccaccaaacagcggtcacggtcgtgtgggaaagcacagaaagcacccaggaggacgaggtcttgctggaggacagcaccaccaccgaaccaacttcgataagtaccaccctggatacttcggaaaggtcggaatgaggcacttccaccttacccgaaactcttcctggtgccctaccgtcaacattgacaagcgtatgttcttttcttttttcgcatcgtcttgtccttacaccctttgctcatgtttcctattcttgactgtacttgctatccagtctggactctcgtccccgctgaggagaagaaggacttccccaaccaggctgccgacctcgtccccgttgttgacactttggctctcggttacggcaaggttcttggcaagggtcgacttccccagatccctttaatcgtcaaggcccgattcgtttccgctcttgccgagaagaaggtcagaccatctgctttatttgaatttttgtgttcgtttgtcacctcgacaaggactgacgatgcatctcgttctatttatccttctatctacagatcaaggaggctggtggagtcgtctcccttgtcgcctaagggtttttagcttctttcgatgaatgagtcttttcgacgtggatctaaaccgtcccttaaaagaaaacagagaccacgttgtcaaaggatccagaaaagaggtcttgcaagggcctgtttggtgcgaataatgaagagagtgtatgtacactatgactcagtgaccctagggacaacagattaagaaaagaaattgcagacacatgtctttcgacgtcaatgatcatcaacaccatcagtgatggtagcaccaaaaatgagagatgttggttgaaacatcagtcgaccttctgtttgaaccattgagactagcagcctgatgacataggagccatactcattctcgagtatcccattgtttctgatggatgaaagacattgattgaacgagccaaaatgggcaagagatttctttgtatcacaaccatcacccatcagccagcatggcgaaactcgagcctgtgtcttccgttcaggatcaagcagaagcagcaaagcaaaaggttgacctcaatctgatcttttgacgtgtctgctgagcaacatgctgatcgtttctcgttcgacttgttactttcttaaagggaaacgatcactttagtatgttcccttcctaccaaccctgagtgacgttgtaaccagaagcacaagtcagcaagtagctcatgaacgattggtttccatccggcttggtcgatcttcagaaaagaaagagtatgcagagtcgataggtgagtgtgtatgtgtgggtggtgattggtcttggtagttcatcgagcatcatgttaatatctctgcttcctctgggtcaggttgttattcgcacgcacacatcctccttccttcgtcagctatctatccgttgaaccgagctcaggcatacatcaatctatccaagtgagttctctcgccagcttgtttatattcacctgcttgttctgtccattccacgctttcgctcagtgctaaagggatctttcgtccctcaggttctctgatgccgagcgcgactgttcgacctcgatctcgctagatccaaagaatccgaaagcatggtttagacgagggatcgcccggcgctcgttagcagactgggcaggatccagagcagactttacccaggtgctcatcctcgacagatccatggaggccggcgtcaagactgagcttgagaaggtcgaagtcgcggagaaagcagagaaggagaaagcaaagggcaaacaggtttgcgcatttcttctctctctgcgaacactctttctgatgtgttcttttgggcccctcggtttgatcactgacatgcctctggctgatggaccaagaacaagaagatctcagttgtctcccaaccaaaggcctcgcccgagtcgaccacgataaaaccgattgctattccgatcaagatgacctatccgacatcggactcgtctgccactgatgtgtcgtccatccctctgatctcgcccagaaatctaaggccgaattcttcaccagtgtcctcggcctcggcctcgtcttcaccttcaccttcacctcctcctgtctctttgaaatctcattcctcgacagatgatggtaccccggccttgtctggatcgaatcctccaaaagatccgacgtccgctatatttccttcttttcccactagatctaaaccgaagccggaatctgaacttgtaccgggtccgattggtaaatctggtttctcggcgctcaaggcggcgagatcatctaaaggcatcatcgccaaagtcgccggtccgactggaagggacggtctgtctctcgaaggggaagactctgaggacgacgacgacgacaaggaagaaaaagaagaggaccttccgagaccggagagtgtgcattcgttggtgagggcgttaaagagtctgaacgagagaagatcatggctggtgctcaaggtgtgtccttctccttttttttcatctcagtcaggctgttttcatcgttgttttacatctatttcaagtggtctttgctaaaatcttccttccctcgtattcgttgttgtgttcaatctattcgataataatactaaacgaaacaacagaacatgcctgtttcgcgccttccgacgctcgttggatcctcacttgaaccgccgttactcgaccacctgttcgttttgcttgaaagtaaaaaccccaaagagaagacgacaaagaaagcgctggcggaacagttgggaagcttgaagcggttcggactgaatttgtgcatgttggaaagggggtccgagcggtggaaaataattcaagagacgtatggcgcttgaactccaaaaagatgggatcggaaggtaaaagtgataatcaagaggtcaaaaaaccaaggagattaaggattgatgatgatccggatggtctcaaagaactggctcgactcgttccgctttcttatatgtcatttccttatataggtacaaagcatacaccccgaagtttcacacaaatacacatcttcactctctcttactgagagcagcgtttctaatttgaaaaagattgaaaaagattaaagaaaacctaactgttaagagtgctgctcttattttattttattttgttttattctctttctctccccctaagctgagccatctcccaagagctcttcctctccctcccatgcttcgtctgggacgtgaccttgaacctcggtcaatcctccccaatagagatagaggaaggtcgcgtttcgggtcggaggaggcgccgcttggtagcctacgggcgtggcacatcggggacacagatggatatgttgaggttcgagcaagtcgttctctctaaaaggatgtgaacgatgtgagaaaaacacgcgagtttagctcgacatgaacgatacccctcgattgaagaaggagacacagagtgagaggaaagcctttaccgtttgacgaattgtttacctccgtctaccgagttgagtttgaacactcgaggggcgaccggaggagctggctctcctgtggaagacacggttggtctagaagaggccttgcatcggacgacgatcgtattatccgtcctaagaagagggaaagaaggaaggaggatctgggttagaaaggtgtaggcagaaatgacggaacgagacggaacgaacggtctacgcggaagatgcctaacatctgtgtcaataacgagctgttatagaagttcaccagaatagaaagtgagggaagatgttgtatcatcgacgcttgtcaggatgtaggctcttgggctatcttaatctcaaaaaaacaaacaaacaaacaaacaaaaaaagtcggaagagcagaaggacataccaggaactctccacacagacagaaataggttttgaggatggcctgttgggtggcagttatcggagcatccgaggaggacgagatagctgctcgggagatgaccttgggcatggctgtacagataggcttggtggaccagaaagagtggtagtgatgatgatgatgatgataatgatgatgttcgttgttggatatgctttgaatccaaggacgaaggaaacactagacgctgaacggactgttagggttaacgcgcgtttttctttctttcccacttgtcttcttcttccccttgcggacgttcaggccgcactgatactcgctaaccagccccgagctatctgtttgtctgactgatactgagttggattcggctgaacaagatccttctgatgctgacttgcttgatttttagtttcatttattttgatagaaggaaagagagatcatggaagagaacagaaggacgcgaaacataacgatctgcttcggctctgtaggcatcaacaggctggtaggatgtgtgtgcgcttcaagctgatgatgaacatgcccaagagaaaggttgatcagggagaaacgcgtgtattcatcaaagacaccagatgatagagtagaactcgcctaggactcgaccgtacactccctgtcctatgcagcgtctgaccttctgtgtctcccggacgcgtccgagtcgagccaagagatcggaaagcgcgacgacatcgacgacatcgacatcgacatccagaccaacatccagaccaacatcgcggtcgacaccaacgcgttgcgtctgttcccagacgtccggctggttttgtcctcttctggaaacaggctgatattctctgtggatcaataacaagggcgcccgacagcagctctctctttctttgtgcattgtaccgacgagttctagaccgtgtaccttggacctgtgcacctcgtttcctgcatcctcagctgcgtccctgatcgtacagttgcactcctgtaatcgccgaggtgcgctcggcataaacattctaggctctgggcggacggatggcatgagagatggccctgggcgatcgacttgcatgatctcgagagttttccgcgatcctttcaaccttcctgttagtcctcccgctgcttggccctcgccctcgccctcgccctcgccctggccctggaacccggcactcgtactcactctcggcatcctcggcaccctccccgggagccaaacctccggccggatggtctaccggacaaaaaaacgctcagaccccgtaaattaatgccatcctttcttttgtttctccttctctcctcctccatttttcaagggtccacacagtcaacgccctccgctcttttacgcgctcatcctttgcctcgctcatagagatctcttcaaaggcatgtctaggatgatgaggagtaccaagagcacctcgtaatttttttctagggagggtccccaaactctcttgttctccgtccgttcttccgcccacttggatctcgtgttctcttctccagaaacatgttctttgccgtcggttctctataaaagacctgcccttcgcttgcttcactggctctttcgtcgttcaactcgttctcttcgcatcgctcttcgcttcggtcgacattcaagggtctttctctcgtttcttacaacacttcatccacacacacactctctccttcagcttagcttcttttgaaaagaacgccgctcgggtcatactttttgccttcctcattcttaccgaaaaagaaaagaaaacaacaaccccaagttcaacagcacccactcatacaatgctttccactcttgccctctttgctcttcctctcttggcttcttctgctcccttgaagcgaggaggtgacgccaagttcacctactagttcgttctcttctcatcctctctccctctttttgaaaatacatattccgggatcctaacagactcctccatctctttcgcgcattgtagcgatacctccgtcggacttggctcctgcggcttgctccatgccaactcggagtacaccgtcgccctcaacaccgctgactgtacgtaggatatttctctgtcgcgtctatgtaaacaagtctgatactgacattgctgggtttatctctgttacttattctcagggagctcgtacggttccggttaccctaacccggtctgtggttccgagatctggatcacctatggatccaagaccgtgaccgctaccatccaggacatgtgccctggatgcccctcgaacggactggatctgtccgaggatttgttctccgctttggcaagccaagaccttggtgtcatctacggttcttggggattcggttcgttcctcgttctctttcttctacaattctattcaggccatcttgttaaccatctttcgcgctgtctccttgcttctcctcatttataggctccgccgggtcttccaacgaggctgctaccaccgtcgctgccgctgctgccgccgttaccacctctgccgagtctgctactcctgctacctctgccacctccaccgctaccatcgttaccaccgctgctcctgctgccgagtctgaggccgccagatcgaacgcttctgtcgagtacccctggtcagctatcgatccttctgaggcttgcgtcggatctcagcttgttctctggaacgagacctccgttatctacaacggcacagtgtctgaggccgggctgaactctaccgagctttccatcgttgagtggtgcttcgatggggtcctcagtggaaacctgaccgagctcacctcgttgaacgtcagcgctagcagtgtcgccaacggcaccaccgccttctaaaacgcagagagaaactctgagagtcctcttcttcggtcctttcctttcccttcttttctttgtgtttatatctatctatttatctgtttgttctagtatcattgttggggtatcttcagttcatcacggtatctggaaaaaaaaggaaggagaagaaagaagaagaaggattgatctcatagttctttttcttttgggaccccttcctctgaatctcattctttccaattctttcccctctctttcgtttcattttcacatccgttcgtttcagatgatagatcttctttatcttttcatctttttttgtatagagaattctcatccccctcccttcattccctccattccctccattgcactcaattcacctcgcccatacatacacacatacacacatccatccatccacacattcattcactcactcactcatccatccacaaatccttagacgtatgaccatctttcccttatctataacatgcatctcatccattttatcttggatctcgctcgtctttcgttcttaccggaaccacggctctaggaaaaatgctgcacgagggagtctttgtttacaagaatggattagatcgaaatcgaaaccggaacaccaacaagaaggaaagaaagaaagaaagaaggaaggaaacacggaaagaaagatgaaaataaatggagacaaggacgacagaaaggtgagaatagaggtcgagatcaaagtcaaaggtagtagaatagtgtactatgcatatagcgatctagatgaaagacaacttgcgacctaggatttatctcagattaacgaataaatcatatgtacacaaaaaaaacaaagaggagagacttatatggcaggggcaattgaaacatatatgcaagctagataggacatatgagatataaagtaaagagagaagaaaacgagagagaagaacaatgtgatgggtacatacatgcgccaacagtcaatgttgatctgtgtctgtggaaaggcagaagggtacataaaaacgaatatacgaaagaaaggaacaaagaaaggaagaaaggaacaaagaaagaaagagaaaaagaaagagaaaaagacagaaataatcagtgggcggggtcaaagaagaaaaaaaaggtaacgtctaccgattataggacctgaggcataggttactacttatagatacgtacatatccgtttgtgctgatgataaaaagagaagagaaagaaaagcatgaacagagcttccagaacagaagaaacagaagaaaccttacggacacaaacagtcaaattaaggattcaacgtcgacaagcaaggtaggaaaaacaaggcagatgaggaatctcttgagaggaagagcagtacctagggactaccattcaagagatctcagaacatgctctcgattgtcgtacgaagtgggatcattgtactaaagaggtccaagacttgtggaacggtcatgttgggcacatccagcatctccgaatcgaccgcctgtgtactcagtttgacaagggaagaatcgaacgaataagtccaacatctaaaatcaaggaagaaagagtgaggggacgaacgacaaaagaccggggccattggacgtgctgttctttgcttgataagttctgctgatcagaagaatgccacgaatagttgacctttccgtccggttcgacagatcgatctataggatctcctttggatctgatgagcataagaagaaccgactggaagaattgggcctggcatgcgcagagatcaaacggctggaaggaggcgacctggcagtaaccttgggcggcatagagagcatccaactgcacgagataaccagaaggatgtcaatgagaatgtacaagtttgacatcgtgaaggaagagaaaagaagagattatttacaaactcagtctcgtactgagccgggagttgattgaaattctgcgacatagaggatagtcgaaatgaaaggtgtcagtatggttcactgctcgtcgccgatgagccaagatccgaagagaagaacgactaatattcacctttgctagccacaccgtcgccgaggccgtgccgatataggtaagctcgtgcatgattcccaatactgatcttatgtcctctatccctctcacgaccttaagtgcactttccacggcttgaacgaaacactttatcccagcaaagtttttcggaggcgtgaccttggattcttcgtcgtccacgagagaaagatagaacgtcggcgctttggcagatgtggcagtacttgagctgaggaataggaggtcgaagtcgaattcggcaattctggaatagtgattgatgagtatctgggaggcgggaaggagcttgtacacatgcgcctcgggatcttgatcttgaaggccagagaagaaggatatggaaggtttagcagattgatcgtcggcaaaggtgatgaccagtgacgttatctgctcgctcgtgcaaatagaaataggaagaaaagcaccaaccaagtgattcactggagtgcccccttttcgacaccttccacctttctttccagtgttccatctgatccttccctctctcgaccaggagcgttctaacttttgcatcctgtgaggagttgagagagttgagcccccagtataggttagtaagctcccagatcgaggcggtgtgttggtcgcaagggttcgaatatttcgggtggtcgacgatccaaagacaaggatctaacatcgctcttcgattgatcattccaggcctagggagcggcactaatatcagcaactgagccgtcaacaaacatgaatgatgatgggacgaacagcagatggtgaacctccaacaagttttcgaaggcagttaatgcataaaatgtccgctctctatcctgaaggaaagaaaaaaggcagagatacaagagggcagagtttgagtgtcaggtttcttgcatggatagtagaaggatgcaactatggtttgtgggtcatactagaacgagccgagcttcgagcgcgtcttcaggaagaggccggacatgctcgcgatggagaccgagttcataagctattcggatagctacattgataacaaagatcacgagtgtaagcacaacaagaagagagaaaaagggaaagcatacagcataaatggcgaggcagatagcggaagaggtcagcgacttgagtgtgtatgagcgcttgcttatcctcttctaagtcaacacacacacacacacacacgcatgaatcgctaggcccatgatacggaacatccgttgctagatatagtctagataggctgacacgagcaggagtgtgcgactcaccataaccaactaatttccagccaccaccagcgacttcgtccgttcttctccagaaaccgagcaggaataatgcttgacaaaggccaatttcacaaactccctcggcaaaggcgaggcctgagagagatttagcgaacattcggagacgggcgtgccggtcaactagggttagttgcgtcgcggccatgagaatagcagtgtacaagacagggctcgtcgagcgcgtccactcgggcgtatgcaatacggaatctctgtcgaagaacgataaggaactgtcagttcaagtgtggtgtttagataggtaggagaacagagagcaaacgcgcactgacaggagtgaacaaataggatttaatcggttcataaatctgagagaaggtatgagagtggtcagcatgcgatgtaagcgcttatcaactccactcgctctggtagacaatgatgagagaaaaaaaaggaaaggaagcacagacatacacagaaaacagtgtttttgcctccttttctgtcacaattccctcgtccaccggtgtcttccaatccttagtcgtcttgggcgcagagccagaaaagatctttttaaacgactgcttcggcctttggtccaccgatcccagcctgcctagcttttctcggtcgtctccgcccatgacgaaagacctgctgccatgtgaagctctatgagccattgaatcggtcgtacgggttgggcttgttgtcgtgtctgatgttgtatttgaggaacgggcgacaccttgactgtttcccagagactgcgtgggaaaatcttcaagcggaggagagatatacggcgggttgaacattggctgttcgttttgagagataataggtctagaagttagttccctaggagtagggaacgagtcggcctcgtacgggctggaaaagagatcgtagggatattcgacctgcggtccatctaaggagaagctaagctcctcagaatgcatctcggatggagagttatccatatacgagacgggctgctgttgtcgttgctgttgctgttgttgttgttgttgctgctgttgtgagtgcgaataagaggacggattattgtagccttcatattgatttgattgttgcatcgcgacagtgctgttttgttggtacagctgattccgcggaacgtacggatacgtcgtgtagaggccaggatctggatatgtttcagattctggactgaaagagactgagctctgagaagattggtttgcgagatgttggcgctgacgtagttgctgctgctgttcttgctgtatgtgttcttctgcttgcaggatccgttgctgccgttgctgagaggtggaaagtgatgaatcggcaaagtaagccatttcggctgactccgagctgaattcttgacaagccgaatgcaggcaattggtttgtgtttaatcgataacccgaatcttgtctttctgacaactgatcagcctaatgagcaagaagagatagagaccggcgatagtgagtggagatggggatggggatgagagtgagaaggagatggacgctgatgtgaagaagaaaaaaaatccgaagaaggcctagagaagatatgggcggcaaggaaaggaggagagaaaaaggaactgatcgaaaagaaaagagggagaaacaggaacaaggcacgcggctacaagcaagacgatgtgaaacgagtgtgcctgaggatgaagaagagcaccgtggatagacaggacgcaggaagcaacgagacttgtacgaccggcggggggcgagggagcccgcctggggagagagggggcggtcaggaattatatttactaacgttttagacaaacaaatctgtcccactctgccatccaagcctgaacacgcattagtgatcaataggataaatatcgaaattcaagtgatcggccgcagcaaattgaaccatccgatcgtgcgcctgcctgtctgacacgtgtattcttgtctcttcctcatcattcgcctccagcctgttcctcggagatacgttgttgacagataatcctttatagattaagcttcctgatctggttatgcacatattgagtcattaattatcaaagacgatcaagcacatcgtcaaagagttgggtcaggtctgaggagaggtgacatagagataccgtaaagacggaactctagtgttccggctactcgctcctcttcccatcgcgggcaaagcattgatcctttcttctaacgtggcttgtatcaaagagagagaagagtgattggaaatctttccgggtatgtcgaccggatagctccaacggccgtcttccttttcttcttctctccatgtgtttactctttctctcttcttgggcagaccgtccttcggatgaacgggcttcctcatcaccagtaatctatcgagcgatactctattattcctccacgaccgtcgaccaatctttttttcttcaacacagcccatttcttgatcctgaaacagacagatagccaagcacagtcaaccaatgatcaaacagatccattcctccgaatcaatcagctcactcgtgcactcgagcatttcttctccaattcgtcaaagagcactgaccatatgtccatcttttgtcgagaaccctgagagcccacattcactgtaggaatcatccgaggctctcctggtacggagagcgcaaaacacgtcaactctgtgaacgagctaggaggaaaaataataaaaatggaacatccggcagaaggagaagaaagaacccggatcagagttttgtctatcgttccgctgtgacgagaaaggcgatgacgaatcgagaaacttacctatgctccgaatacgggactagcgagaggggaggaagatcacatcagcgggcagaatcgttcacctccacgccgagtccccttacaccgtgcgacgccagagccacagttagcaaagtgcttgatacttacctccgtacatggtcactttgtcagaagatcctctcgatggcttgagatccctcgcgtcgaatgttgcctgttggtcccttgcgatcagcatgttcagatccgcactggcgctcatgttggttccgccatttggagtgtatctgccaagtccatatatgtctttgagccaagctgttgggaagcaagaagacaggtagacaagaggaaagcaaaatactgacgtccacccggtcggtcggaatccaatgattcgatcgaacaaggtagtgtgtttcttcagatatgccgtcaaaccttcatggctaatgtcatgcaaagagatcatatgaacttgagactagacaatattgacaggcgttaggagactgccagaacgtagagaacaatacagactgccgaatcgttctcacctgggatggattatcagtaattagctcattcagctctgggtcctctgtttggtcattcacaatcgctcgcttatatgcatcgcaatagatcctcgagccgagcgcgtgagcgatacctttcacaattctctcctttccgatcgagtacgttcctacagcgacaagcgtcctaagccctctccgacggattcgatctgcttccgtttttttctgctcctccgtatcaaacttgtggagccagtcggtcatcattgatttcgactcgccaggcgaaccggtgatggccgaccgggagtcctgcgcaatattcatcggaccaccctggaccaattcccgcgccaagagagatactgattcgatcaccgtcggctgaggcggaaagcagtactgtagtcaaagaatgaggataagaggaggaagatgcaacattcagtcctaaacgcatgccgaacacaaatctttcgtgcatccgcgcaaagcacacaccttaggattcagatacgttgtgtccaaataaatctcgtccagcttagccttcctgatggcagggtgcatgacatgctttggacaggctcggaagtctccacagtggaggtatcgataaacctttggcccgcctaatccttgggcaacgtaaggagagtcgccagcatgaaccgttcgtctaccttcaaacaagaagatggctgatcccggacctgtcaatagaatgacaacaagaaatttaagaggatgttcactgaaaattcttattgaaataggaaaaaggaaaaagaggaaaagacgggtcgaaaaagccgcaagaaaacttacaatgattcgcctcgatcatcgtacagaccactccgcccgttcccggcaactctgtcggtttatcgaattctagtggtttgacccatttagaatccacaccaagcttccgaatgatcaaattggctgtcgtttgggaacaatatatcgggccatgcttccatgttttggacagtttggtgtagtggtcagaatgagcactagacatgaagaaaaggcatataggaaccgctgtcaaatcctaagagccgttaagaagaaagatgaacggaaccacttactggcttaatagactagaaacatcaacaaaaccacatatatgtcagtttgagaatgtctaaaaagaaatcgtacagagacattctatcgagcatggtcaaactcactaagcggttacctttgggatctttccataccggaacccatcgacgcatataggcattcctgtgagaacctaccgaacgtctcaaaagtggcagtcgcattagtctttgtgcgcaccagtcaaagagaaggtagcaatccgatcgaaccttgaaaaaaggagcgcgtcgtcgttcgccagctttaatgaccttgcctcctcgtttgatcgaccggtcatcctcgacgtctttccacacgtcaaccgttttactcttggtcatcatcatcgcaaatgcgtttttcgtcggtggtggtagtgatggtttggttttgtaatcttcctcaatgctactctcatcttcgtcttcgatcatctctaccggatcctcctcttccccgtcatctcctaagccatatcgttcgtaatcctcctcttcgtcttctccaggatcgagcatgccttcctgttcatcatcatgcatcccaaacccttcatctctgtacagtccaggaagatcatcctccccgggcgcaatgtcagacatggctcgtttctcttggagtacgccagagaacgtcaggtcgatcgactcatttgccgcggcttgagacgttgtttgctcccaattcaggcaagaacgcggacgatcgttgataactagtttagacccatcagatacagtagcagctgatggcatatgttcgaatgtttcttggtctataatgatgattgaatgggagtcaggaccggtagaggattcttcagccccggtgatcttggttgatagttttgaggcggatggcggatgagaccgtcgagtggtacgaggtagggattcagaaaccagacatcgatccaagtccaaacagttctccgtcgccgctccttcaacctttgggagtcctggaggagaaaccccagaggcattcaagctaagcttgaaatcactagatgagctctcccgtttttgtcgttgtttcccaccttcccgtggttcgataagttcgacctctacgagatcctcatcagacgagtccagcaggcagacaggctcgtccaccgttccctgctctaacgaaatcttcctcttcttgatcgaacctgttactaatcgaccgggccgtctccgtccagatccatccgacaaggtatcaggtggtatccggggtttcgatggagaggacgtagtcgtcaaggtggatgtggaggccaccggttgtttctgaaagaatccaagaagactggtctgtccggccagactcgagggaggcggcggggccatacgtgagcgtgttttgactgctttatttgagggagaccggatgaagaacgggtgggcggaagggccgatggtgtttgggttgtatgttttcttggatcatccatcgctgggcgcggacgtttaaacgaccatgggatcaacgtcatcattgaggtctctgccattttggatatatcccaaaaacagagtgcgaaacgcagatatcaaacgtcaaacggtcaagacatagacagcagacaagtaaataaacgagcaagcatcagatagtcagattcacaacaaccagccggcccggctcactcattctcttgtataagtcttctttccgttccgacgcgtgtctgtcacatataccagtacatcagtttcaacccgaaatctcattcgaaacgagcacgcgtactacaaaatggcttcagatcgacgcgttatatacaaaaggaagaacgtaaacgacaacgaagagaaatgcgagggatgaactgaagaccgaactagacagacaacggagagacccagatggtagatgatagagtagagagtaaaattattagaagaaattttatatgaagaggagaaaaaagaaaggagaagaac

SEQ ID NO: 1103 - DNA, 8795 bp, Xanthophyllomyces dendrorhous
  misc_feature (7707)..(7716): n is a, c, g, or t
  misc_feature (8460)..(8469): n is a, c, g, or t
agacaaatctgtttagtgcaagagggaatttatgtttggaaagaatcggagggttattcgaatgagaatcgatagaacaagggaaactatgttgggaggaaagcgacacatgagtaaaagtcgggaggcaggaagagaggaagaacatgtatggaaattgaaaggagaaaagaaagaatccccaacaaattgtactggtaagaacgacgagaagagttaacggcaaggaggacatatgcatctaaacttgaaccaaaaaggaaagaaagaagagagagaaagaaaagaaaaaagaaaaagaaaaatgtacatctacttagatgtcttcgtcttcacatatgagaccctcaatcagggcttgcctccgtgctcagccatcaagtttgcacttagctgctgagcctctgagactctcctcgcccgctttgtcgtccctgctcctgtcccggtcgctgtggtagaaggtccggagagaccgaggccaaacccattggggtttgaatgggagaacgaggacccagacccagactcggagctagcgttctggcctgagctcgatttcggtcgattgccaacagagaccaatccagccgagctctttcgttgaagcgccgggtctttctgaccggtgatccggttacgtttcttgataacgtccgttttgagggacaacggtcggacaacgccatgaagcttatagaacaacccgcaggcgttacagagcgggtttccatccggatctcgtctccaaagaggagtgttggtggtatgacaatttgaacagatcgtcggaggctctccggcctgtccaccagtggcaccaccggtactggccgaagcggtagaggacgaaccctccggtgtgtttccttcggagtttcctccacacccaggcccaggtgttaccggtttggactggtcgcccttcggcttggaagtctgagagctcggggtggaaagtgtaccgagagtagaagaaaatcgatggatggttgccgagttgggtgaactagtcgatcgggaaagaccaacacctcgacctgcacccgagtttttccttgacggatttctcgaaccggacgcgctgtttgatgacggtggtggtcccaactgaaattgctggaacgaagagctgaccaacctggaagggccggccggtctgacggctgaagagctaccaccacctatactctgtggagaatctgccaatggggaggtgtacgctccgctagaggaatcactaagtccgttgaaactgatgctgtcgtacaagctgtcaccattgcccaacgtctgggtcgggttgatgtgtgtgaatgtggtacctccaggtccggtggtagctccagctctgactccaaccggatgggccgtggtcgggttgattggagaatgaggctgagagttgttactcgcggtgtagaacagattcatcaggttttgcatgtttacacctgaaggttcggccgatggttggcctagagaatcgtataatgatgcatccggatgatggccgcctgctggtccatagcccggggaagcatcttgagacgtaggtgtcgtcgtgatggatgtcgccaagttgaaccagtagtcctcttggggagtaccggagtctgggactttatcattcccaccgacgcccggtcgttctccaggggtggaagacgaggcagaaggatcaagctcgaaaaaggcacggtagggatcggacgaggggtattggaaggtaaatgtggaagacggaaagatagtgtctgtcgtgcccggagattcggagggagcccgggtttcgacatccggaccgtacgttgggtctcctctcggcacgaactcggccggtcgtttttgaccctttatgcgaagtgatacgcatcaagaaaaaggggagggaaagaagcctgggtcagccgtcggtcgtcgtggaagaaacaaagaaacatgagaaaagaatcctggttcgggaactaaccagtaaactactgatctgaacgtccccatcggttgttgatgtacccagcctagacgctcgtctggactcagaaccaccggagccatcataagggcttgtaccgaggcctgagccggatccggaaccagacccggtctgatcgcctctgagaaacatctgggtagggtaggcacctggtccggagaaggcgatatcacctgaagaatccaaaaaggaaaagccaccgagatcgttcccgccgaggtccagcattgatctcgggaaaaagtgttggctgtcaaacccaggttcgaacggggccatcgattggaaatggttctggccaggaataggaatcccttgggatccgactaaggacgcggttgccggttgatgggcatgagagttataggcaggagtagcgttgaggaagtccaaggcgccgaggagataatgtgaatgagcctcgttgtgttcgtattcagcgaacggggctctcgacctggatcgtgaggccgctcgccaatccatggacatcctcgatcgggatcgactctttgctcgccagtccataacatcagagtcttccagcgtgcttgattggacaagacacccgcacgcgagagatagacgcatattcaaaaaaaagcatcaatacgtatacgtatagggagcgcacatgcgcgctttgttgaaacaagagaaaagaaaaaggagtaaactcaccttgggttgggactataagcattaaatccgacgatcctggacgttcgctgtcttcttcccctagtgacctcctctgccaagacgtcttccttctttttcgcttcttcctccagactcacgttctccttaccttcctcctttaacgtttccttttgctcatccttttctttcgagagaaacgagctgccgagcgaaccgggcggtttgtgggcatccccgatcgcggcaagcgcggcgtcggagagaaggatgttcaatgagagatcagactctgtctttattggcttggcgtctacagtggtcgacccatcgggctttccggactggctagcgacggtcggcacggtcggtacgacggcggaagccgcttgggctgcagcggcctgttcggccaactctttctttctcaggttcattgccatcatcctccacgtcaagttctccatccgttggccgttcggtagctctgatttatgtttcgagtacatcttccagacctgagcagcgacaggatcggtgtgtgggttcggttcatctgttcctatcgtctgtgctgttggcgagttgagttcggacgagttttcttcctggacgggtgacgggtaagatgggtaaggtggcgaggtcgaaaggttcgggagtgaatgatataggccgccaccggatggagcggttgagccgagggaagatggggtggaaccggacaggcgtctgctgttggcagagttggttagagtggtggaattgttgctgttgttgctgttgttgttgttagtagtagtggtggtggtggtggtggtggtggaagaattggcagaagtaccggtggagccggtagcgttgctagtggtagtcaactttgtactggttgaggctgattgagaaggagaagaaactacgcttgatgcagatggctttcgagagaatatcacgtcgctcaagatgtcagacacgatcgactttttatcaaatgacttgccaagcccggagggtgaagctgtcgaggagttgagcccggtaggaccaccaccaatggatgaatccgtctgatgcatgctcgaaccactcgtccgtctgagatgttcaggtctggatagaccgacggacgatctgggtgaatccgcgagggacaaggtcgaggatgggaacaaacctatgtctccccatcctgacggatgttcactcagcgtaggcgagagcaacgctgcaggcaagttgcccatcatgtttacgttcgttctgttcttcccgtcgcctggagaaccattaaactgtccgccaagactcatcccgatacccatgcccacacggatggccatagcgagggtgtcgttcccgttggcgcctacacctgcgcctgcgtggtttccgttcagatactgggcgagtgaaaagtctgaaggtagctccggtagattcaccgtcggagttccactagagttctcggaattcatgtgagcaggtgggaaggcaaacgcggggagctgatgtgcggaaggcaacgtcgtggcgggacggggcgagggttgctgttgctgtgaaggtggattggtgcttggatttgagttggtgttggtgttggcgttgggattggaactgggattaggaagggcgtttgtcgatggtctgtgtggacgggcacgcggaaagctcgagggctaaagaaaggaagaaagcaagaacaagaagaatgttaacaagaccggatcatcaactttgtctttgcagactctgagcgaatcagaataaagggaaatcctgaaactgacgccttcgtttggactacctaattcactagagccgtcgggaccgtctgtccatctgccgttgagcggctgtttgttgccggttggtggtggagccataggtctaccggagaggtagggagatgtactaaaactggatccttggtttccgcgttgagctgagtttgacgacgacgacgacgacgacgacagcgacggcggcatattagtcgagaggggtgaacggctattggtggccgtcgacggttgttgctgctgctgctgttgttgttgttgttggagacgttgcgtcaacaaggaaggcacaggctggttggatgtgtttgtaggtcggaaaggtggctgatgctgctggttctgttggatgaatgaaggaaacccttgagtggtaggagggacgaacgcaaagggcgagggagatggtggctgagtgcttgtcggcgagacaaatgccgagctagaagcggatgcagagaacgatgaagaagcttgatgatgagccctgtacggctgatgggcggcaggatgatgctgactggattgggagcgagcaggtccggcgggtctggctggctggttggctggatcgtgttccgtaggaggtgtgcttgacggatcgagcgtggctagtgaggcgagaacggttgggtgaagaggtagggaactaaagtctaggtttgcccaatctacggacgacatccatgctgatgaggatgctgaagaaaacgatggattaccctgatctagatcgactggctgttggaccgagggagacgacacggacgagatgtttgacggaggcgagccggccatagaatttcgatctagcaagagggaaagaacgaaggaaagaaggaaggaatagggcgactttgtaatttcctatcggccgacacacacacacacacacacacacacacacacgcacacacacacctacgagaagacggctggatggacgtatactacgagctgaacgaccgggccaagatgaactggatgatgatgagaacgaggatcagaagaaggaacaagaaagaacgcgaaggaagaaccacttggattacagatgagctttaggataggaaaaggaccaacaagcgaaaggagaaagcaaaaagaaaaagaaaaaaagccagaggaagggaaaacgaaagaggcgaaggagtggaggctttttttttctcgttctctctctcgtgcgcccacggccggggcatcaggcgtgcgggcgcgggtgatgagtttggcaggcagctcacccacagagtgcggggccggctcaggtttcatagagatggttacaggagatctgagccgtttcattccgcagtaggtaaaaactccgtccgggtcactttctatagtccgtccgggcaagttttcgactgcgcagggtatgatatccgtaaccatgccatcgggcctagacaaccgacggtcttggtcgttgtctttgtctttgcctttatcttttcatctctcggatgatgtttgtttgtttccagggatctgggtatgtttgctctgttgtctgcgtgtgcttgcatgtgagtctgagtgcgcttgattgtatgtgtgtatgtgggtgagcgtggcagtgtgcgcgtgttcgttatcggatgaataatcaatggctgtcagggtccgggttcagagggtaacggagaggtcacaagaatgtaaccaggcagggaatagggctggcaagaaggaagttcaggctctctagcttggtgactgtgacgagagcgcaaggcagggaaatcgtatgaataaggttgatacaacaatggaacaagagtactagggaaccaagaaatgacaaaggattcaggcttggtagactatgctatgggtggcaaaggagacccatcttatatatcatccttagactccaacgattatgcataagagaacaggtcatagaaggtgctagaagcacctgcgctgcaaggtcatatacctgcatgttgatgtaatgagagagcataaggaataccgaggcaggagaaacaacagaaccaaaagaaggttaccgaggtgtaacactcaggtcacatccctgacaatggcagctttcaacattcacatgtcagacctttttttacattatatggctttggctactagaaagcaacctcaaccgatggtgatcgatacatgatccttttggacttgggtgccctcagaccacgaaccaccaaggtttccgtgggtcatgggtttagtttctgctagcctcatccccagcctcactagtgacagcgtcgaaccctagcattctcgccccttcgttcttctcctggtgaagggctaggtgcagcatgttgcgcgacgcattgacatctctgttctatcaagtctgagagcaagcaccaaagaggcaaagaggcaaagagatataggaacagcgaggcaccgtcagcttcctcgctctgtctgtgagctcagagacttcctctctcgtggtggctaaatatgcttgagagaacgtcatcaggacaagatgtcgatcgcttgtgtacctgctcgagttttgccctgaactcaaccggctgtgcctgcgaacctccctttgacggctgaacaccagtcggccgctgttcctgtttctttcctgtcaacgctcgttcctgtcgatgcccatcttctgctcctggctcatctgtgcgctcgagagctttcccatataagttcatccttgatacaatgttacctttcctttgtcttcatcttcttcatcacatctgcaagcgcacatgatcgcatcgtatataatgtcccacactcgaaacaaagcacaagtccctccgagtgacgtgtgtttctctatgaggtctagtacacttgaggtatcaactggatcgagcagtgtcgatagacagttttcgactcttgtacagagcgtcgagatcggcagccagtaatcgactttcatggtcgttgagtatgtatcatcccatgcgcattcatgggatgatcgtagccacctgcgacacactctcatccaaagacgtaccaacagcacaccgatcacagtcatcactatcagccctgatcgaatgactcgtcgggaggacgagatcgacaagatcctgactttcttttcccagcatgacatttcctggtggtccttcggcatccaagataaggatcaacccggactcaaggcgcggctagtccctgtcagcgcgcatgtacccgttgtacggcaacagatgtcgcatgggcgcttagcagcatcgggaacgtccaaatatnnnnnnnnnntggacttgggtgccctcagaccacgaaccaccaaggtttccgtgggtcatgggtttagtttctgctagcctcatccccagcctcactagtgacagcgtcgaaccctagcattctcgccccttcgttcttctcctggtgaagggctaggtgcagcatgttgcgcgacgcattgacatctctgttctatcaagtctgagagcaagcaccaaagaggcaaagaggcaaagagatataggaacagcgaggcaccgtcagcttcctcgctctgtctgtgagctcagagacttcctctctcgtggtggctaaatatgcttgagagaacgtcatcaggacaagatgtcgatcgcttgtgtacctgctcgagttttgccctgaactcaaccggctgtgcctgcgaacctccctttgacggctgaacaccagtcggccgctgttcctgtttctttcctgtcaacgctcgttcctgtcgatgcccatcttctgctcctggctcatctgtgcgctcgagagctttcccatataagttcatccttgatacaatgttacctttcctttgtcttcatcttcttcatcacatctgcaagcgcacatgatcgcatcgtatataatgtcccacactcgaaacaaagcacaagtccctccgagtgacgtgtgtttctctatgaggtctagtacacttgaggtatcaactggatcgagcagtgtcgatagacagttttcgactcttgtacagagcgtcgagannnnnnnnnntcatggtcgttgagtatgtatcatcccatgcgcattcatgggatgatcgtagccacctgcgacacactctcatccaaagacgtaccaacagcacaccgatcacagtcatcactatcagccctgatcgaatgactcgtcgggaggacgagatcgacaagatcctgactttcttttcccagcatgacatttcctggtggtccttcggcatccaagataaggatcaacccggactcaaggcgcggctagtccctgtcagcgcgcatgtacccgttgtacggcaacagatgtcgcatgggcgcttagcagcatcgggaacgtccaaatat

SEQ ID NO: 1104 - DNA, 664 bp, Xanthophyllomyces dendrorhous
ggtctgtttcaaccgtacggtagcgtcatacaagaagctatcaaacgtgttctcaagtgtgaacgacaactcacctgagggccacgaggatgatgacgacgacgacactgaccttggagttgaagttggagttgatcttggagttgaagttgaagttgatcttggagttgacgataaagctgatttcgagtacgaacatgaagatgagaacgatgataaagtccctcttctcgtcccactggctcctttggtcccactccctccttccaacagtccacttcaacttgccgcaacgtccaggttgcaccagttccagagttccgtccagcaccatatcgaagctcgccaaatcgagcgcgtcgtcgtgctcggccggacatctaccttctccaccaagcaagtctcgttggacgcccaagtaggtcttctacaacatatgctaggcgacttcgaaggagatacccgtatgctggagtgcaacggagtctctgcatacgagcatgactatctgctcgaagcatgcaaaagagacgagaaggtatgtttctgcctgtcctacctttatccgagtctaagcttcatgctgatctgccttccacttgatgtcgtaatccagactctggtccttgcgacctcggttgatcgcgtctgccgcaacccagct

SEQ ID NO: 1105 - DNA, 39444 bp, Xanthophyllomyces dendrorhous
gcgtctgccgcaacccagctctcatcgaagataccctcggatcactcgatgtgatgacattcatccattgtgacaccgaggcgaactgtcgaacgctcgcggatgagtggctgaacactctagacgaaagcgaccaacagacttggaggcccatcctcgagaggcaattgtctcacaccacctcagtcaagacagcagggatcactttcccatatatttggaatacaccatctgtcagccttagggagcaactcaagtctagggtaaccaaagactcagcgttctgttcctcacgaggaccctcacatcatttctcaaagcctcctctccttcctggcttggccagctacactagacgcaggattggcttcaatgacaacaggatggaactgtggaaacagatccatcaggagtacacaggatgcacgctcgacgtacactacgagaacaaaggatggacttgcgcatgccacggagatgtctgcagagacgattgcctctgtgactgcggtccttgtcagaatcgagccgcaatgggatgcgtctgtcgtcttcaagagcgttgcgattgttggatctttgacgtctgtcgatgtccgatctgtaacccggaaatacgacgacggaaagagaaagcagagcagaggagaacaagctgaaggcggagcagaaggcggaggagtggaggctgaaggcagataaatggaatcttgaggtagagaggatgcggagggaactaaaaaagcagtctcaggcgcaaaagtattccggggtccaacaaccgatggcggctgcaaagctagccgaccgacaacaggtagcggcagatatagatgcagtcgtcacggaagctgcaggtaaagtatcggccatagtgggacgcaatgaaatatacaatgcggtctatcagaggacggccatagtcgcacggcagaagatctacgagggaatatcttgtcggataaagactttcgcagagagggctgcccaacgaacgtcggatccggtcgtgcgacggcaagggattgcagtcgtgcgggacaggacgatcttagagactcccatgcggctgagtctggaggctctgaagcaggagacattggagcgaaagagactgtggagtgagatgggatggatggagaaacatatgacgtcagatgagctggatggaaaatggacagagggacaacgactgaccagactggtagcttgtgtacagatcaagcagttgctggacgaggagaagggatggagggtcgaagagacgcagttgagagagatacgtgactttttgggtgcagccgacgcaaagtcggaggcggattcggccagtgtgatgctgaaagagaaagggcgagagatgcacttgatgtcgatcaagtacagggaggaagaagaggaacggactagggagagacggcagagagaagagtacgtccaggtcgcttcattccttctactgacttggcggctgtctttttctcacttttcctacgtaggttggatgagcagctgcgtgagtcaccttggtggcggtctatccgacagaagaccacagcgaaatgtcttgagcctgaattgtaaagtctattggagattggattcgatgagtgataaagtctatgaacgagacagactgggatcagcaagaatcgagtcagtcatgatatgtttcagggataacgagacatccagccgagcgttttgggtcaggggaagcagaaacgatatcgatagccgtagtttaggtggtttgtttaaaaacatttcatcatgaagatgctgtgatgagacttcttctttctttcgaatgtttcgagcatcggtgaaccctcgttaacccttcttttcccacgtcgagtcatgcgtgggcgtaacgaagcattccaaaaaggtaaatcagccagcttgcctgaacacaacaaggaatgccccggtgaaatggttcgttccctcctcaggagccaccggccatgtgagaatcagagcatgagttgccccgtatacccatccttttgtttaccgtttaactattttttcctacgtcctcccgttcctatgctcgtgtgttggggagagatagggaaggatatcaataatgagtatcaggagagagagagagagaaagaaaaaggaaggaatattagataaaccccatatcagaaccttatccggtcaaggaagaacatgaatacaacagacaataggttccggcagcagggccatttacggatggttagaacatcaaaaagaaagcaagaaaaagaaagaaaatagagaggaggaaagcaaacgaagcacaaaaccgaagcaacctatagctttccttttcgataagggcaacccacaccgtccatcttcatgggcttgtgtccatcctcaaacgcttccttcggcgcgagctgttccacaggaacgccttctttttctgcctttttgatcaaatgggccagaccatcttccgatctatccactcctaattctaaagtacccgagtgagagccataatcagaaatcatcccatctcaacagagatcgcagaagaaaagaagaaacgaggaaggtgcagagtaaaccaacgaacctaaaagttttccaaacgcctgtgttccgtccagacacatcagccaagatgtccattgtgtcagctcttccgctgtcgctcgtaaagaaaacaaaagaaaccatcgaaccttggcaaagtcttcaaagaacacgtccttgtcctccgcgtagatttctacaaactctcggaaggccttgtcctcgatgagcgccatatcggtcgggagcatcataagttcctgtcctagtagctttgtctcgaactgtcggagatagagaggagtatccgtcagagaaaaaaagatactttgtttcaagggaaactcaacaagtaaaagaagaaagaacaggaatagcaatcccttacctggaaaggaccgtcccactttttgggagcccattttttgctgagcagtagcttgaagtactgattcgagaaccgagttggatttgtcacccacctgatggatatatgtacaaagccacaagggaagaaagtatcagacagtgtgttgacccgcatcactcagttcataattctcacactcacggtccttcaaatccacttcggtccgaatggcatctgcccaggttgtgagctccgctaagagcgacaatctctctatcagtaaaacccattcgaccaaagatctcccggatatgatctgcgcctttcgctccgtccggcagccggttcccgacctctcctcggtgactggacgctgcctgttcgtcagagtaatccgtccggcctggtgtccaaggaattttagggccgcccatagtttcgacagccgtcactccagccactgtttgattcgcaaacgaagacttatatcagcctcttcgaataaagaacgcagagaaagactagaaaacaaaatttggcacggacacgtccagagatcagagtgcgaaatccacgaatgtttagcctggacaggattgaggaaattgatggcgtggaacaacccggcatctgagaaggtatagggtcgaacgattagctcaaatatataaacctgtcaatcatgacacaaacaacaaaaagaggaggaggagaaagagacgaaactagctgggtcaacggactcgggaggaaacctatttgttcaaacaggaataaaccgccctggtcatttaaacttctgtctcctcgtatcgataccaagagagaaaaacaagcccggagcgaacctcatgcctgccccgttgcttccaccagtgtgttccactagtgaataattgccacttgcatgccaggccaatctgacgaacaccggtccagcactaccgtcatcatatcccggctggggaatgaccgatttgatatccttcttaacagctgcataatttcacattcgatatatccgccacgatgagtgcagacaggaatgagagggtccgttcagttcatcgatcagggttttcagaacaacgcacaaaatcaacttgatgaatttaccttcgtaatctccaggcttggacatgttggtctctatccttgttatctttgtgtttgtttttagtgataccagtggtgctgtcagcagcgatagttgtatagcaaaaaaaacagaacgggttggaaggtgggtgaaagagaaaaatcgaattccttcctttctgcccgcaaatcaccagcagcgtattaatatcttcggtaaaccgggtatcagatcgaaccggaggagtgtaggcactatggttacgcgcttacgtaaacgagtcgctcaaccccgtccgttatctcctcctactcgatcagagatagcagaataaacatccagtgatgaagacgtgaagagacagagacagatggaaagagaaacagaaagagacagagggatatatcgtcgagtgagacgtcagtggtagaagaacatcgggatacaatcgttgtatgaacagaacacagatcaatacagacgacgaatagacatgagcaacatgcatcatagtccgattagagagattgaccatcactatacaaacagcttcgagaggcaaacgacgcgcatacactcggctcggtggcaaacacgacgtgtgttccatccatcctcttagtcgatctgttcactttccttagtaatccaccatctcgccttccatctcaccgttggattctgtaggatagactctaatcggtcgcttctcttgtagctctatcctcgacatctgctcaatgtctaactgctctatcagatacttcatatcatcatcttctcctctcagctctcatgggccttctgaagagattccggtctccaagtgggcccttgttcctgcttctccatcaccatctgcctcgaaagatgcactaattctcctaacgctgttccagattccaacagctcttctcactttcgggctcaccgccgggtcgttctacatgttcactagatcgaaaggagcccgaggtctcacctctgccgccactacgtccgctcagcaagcggtcgcacgctcgggagagtctccccgacaaattctcctgaaacggctcgatcgactggagtcattatcgaacgagaaccagcaatggtctaggcaactcgaaggaagactagagaaaaacgtcgctctaggagtcgagtcgatcagatcggacttgagtcagattagaaggcttctgatgaaggataatgacaggttcgttccttgtttactcttcttttctcccgataggtcgttcttcctacctgttctcgtcaacttgtgacttatcacccgatgggtctgttcatcttgaccggctataactatatattttagacttcaaagcagtctgagcaggatcgaaagactactcgagcagctgcctcaatcatctactgccaatcagatgactaagatatcaagcgatgattcttctccgccatctggaggcctcacggcgccaacccaaaaggtaggaccatcacggatgtatctgcgtcaccgcatgaactttgtcgtcagaatgtttgttgatcgcctggtgatgcacttgaacgatcttgacagctcgtctcaaagcctgtaacttcaaaggaatctatttgggaggcagctagagatagctccccgttcctatacgggcagcatccttcgggcggaccggcaaaatcggtaggtctcaggcagactgtatcttttcgaaatcacctcgcgttgtgtaaattaacatgttgtctcgttctatgtcagccggccggtccgatcttgaccgatcaatcccctaaagaggaagatacacccctgaagtatacctccgcctttcgccctacagtccagtcatcagataagacccccgacaaggcagatatcgctcgatggtcctctttattcaacaagaagaaacaagagcagaacgtaaagggtgtcggctttgagtccgagatcaaggaagcccggcgcaaagccgaggaagaggaggatcgagtggctcaagaggaagaagactggaaagctcagaagagaggttgggtacgtctttgtttctgttgtgtaatatcattcttccagcgcggccgacaggactaacgtcgtgagctgatcaatcggatatagacagaggacttgaaacctactcagaagtcgtttgttctagtcaataccgacgaacccagcaacacggtcgtttccagtagcccaattgaagtcaactctgaccatcctgcctcgagttccactcgtactgacgacatccaccacgatgttctacccaaagggattgtcgaagaaaccaggccaggcgagtcgaaagaaacgcctgtgaccgagacagcgcagcctgagcctcatgtagcttcagaggctgatcctctccttgtccatcagaacaatgatagacagtttcgtagtcttgaccgttcatcgacttctcagacctcttggtcccaaaccccccgatccggttcatctaccgactcctcgtctcctgatgatgcctcgaccgctgcccgatctcagctcaagcctgaaaaggctgtcaacactgacaccaccccctctacgccctcgattactcggccttgtttcccgtttggattccagccgcactctatggcatctgcattcgcgttccactttgaaaccccccgggcattcagatatggattcacccatccgtttactagagcagaggccgctgtaaaggagaaagagaacgacaaggcgagggaacacgagggacttccgttaggagagatcaagacacacggccagggttgttcttactggacgatcatcaacggagtcagagtgaagagggtctctagctggaggagataggagggagtttctttatcatgagctattgtctttcagtgttatggccttttctttgttgtttcttattgtctcatatctttaagtcgttgtaaactccactctactcgttgtatctttctatcttgtccttcttctccacagtttctttttttccttgctctgtactcttctatctctctctctcttcatttttatggtttttgtccttttttttctctcttgtttgtaaacctgccctatcgcatctcccccccctctcatatcgattctgttttcctctccttcattgtctgttcactctatagtattacatgaaagattgcaccctatctgttgtccgctcagatggacgatcggaattggtaggtcatcatgtgatcgttgaataggaagaaataaaaggggatacaatatttaagagaatgaagaccaagacgaagatggaccgatgaagaacgaaaaggatttgaagggcggaagagatgccgtctagggatgcttcattaatgaacatattctattttcagaggaaagaggaggagaaggggaggaagcggagaagattcttaaacgaggttggatgggtaaaggaagtcgccaggagcaacaaagttttccttgatcgatcgagcggactgcgcgaaagagaatgcaagaagagagcagtcagtattctgtttgggcctgatcgtttacatctatgtttggcttcatgaaaaaagagagagagggagagaaagagaaaacagtggggacatacaacgaatcggtagaagatcgagatcgaaccggccttgtcgttagttcccgaacctcgggctcctccgaaaggctgttgaccgaccacggctcccgtgcacttgtcgttgatgtagctgtttcggacgaagaacgtgtcagagaaaagatatacacgacagcgcaaaacagagcatgggaggaggggaaagacatacaagttaccggcagagtttcggagcttctgctgggcgacgaccacggctgctcgctcgctagcgaacaccgatccggtaagggcgtagtcggtcgtgctgtcgatcaactcgcacgtctgctcgaactgatcgtcctcgtagacgtaaaccgtgatcaccggtccgaagatctcgctgaccatctggcagtccgagcaagacaaaacagcattgattagtatcatatggttgggataggatggaaaggaatggggaaaggacaagagatgagaacatacggtgacagacttgggatccttggtgacaatgacggtggggtcgacaaagtaaccggtggaggagtcagctaagtttggaagtcgagaggcgaaccataataggtcagttacacgttggctatgcttggacagaggaaagtgataaacgagacgaacaggttcctccacagaggatctcgcctccctcagccttggccttggcgatcaatccggtgatcttgtcaaacgaggcttggttgctatttcatgaagagccagtgcatgttcaaggttagctcgggaatcggataaaggctgagagcgagagaaactagacgcacataacaggtccgacaaagttggaccagtcgctgcaaggcccaaccttgattcgagagacctccttcttcatggtctctccccatccggcgtcccaaagcgatttggccacgtacactcgacccaaagctgagcacttctgtccagagtattcgaatccagatcggatggactgcaacacggtctccttgatgtctgcactcttgtggatcaggtggaagttctttcctccggtctctccaacgattcgggggtacgacctgtagaggtcgacgttgttggaaatctgcttccagagtcccttgaagacagcagtcgaaccggtgaagtgaagaccggcgaaggacttgtggtcggtgcactgcttgacgacttcaggggccggtccaggaacgaactggatgaccgatccgggcacaccagcctcaagaagaatctgctgggtgaggtagttggcgtaggtggccataggagaaggcttccagatcgtcacgtttccgacgatagcaggagcggcaacgaggttacctccgatagcagtctgtgaatgacaaagacgagcaaggtttagcttgacacatctgtgaccgaatggtacagcaagagacatacgaagttgaaaggagtactgcgattgaaagatagtaggaagaaagatttagcaacttgcgcccatggaacgcgcatctgaagattgttaaacacttacacagcaagaacgaacccctcgagaggccggaactcggttcggctgtagagatagacagagaaaacagtgagagaggttcgaaagatgtgcgcagggccgtttcaacttacttccacacgcccggagagttctcagagggctgctgagcgtaaagctgctcgacaaacttgacaccaaatcggaagaaatcggccatctagttggcgcgagagatggaagaaagagccgatcgattagcttcttttgtcagtcaggaggatgcgaatgaacagactacattactagaaaaggttaaactgacctctgcggcggcatcgatctcagcctgccaagcgttctttccttgtccaagcatggtggcagccatgagcttgtatctacgagggatagatcctttagtttagtgactcttcccaagcaaggagtgtagaggaaacatgcgcttaccggtactttccagagacaagatcggccgccttcaagaagatagcggctcggtcgttccagggaagatcctcccaagctcgctgggccttgagcgcaccagagatggcctgttcaaccacttcgggagtggcggcgtggtagttgcaaagaacttttttgtggtcgtggggagggttctgctggagaatgtttccagtcttgacctagatggatgggtaggtgaaacaaaggtcagcgcaaaagatccgaagaaacgacggagagatggaaagaaggaacgagaagaagacgacgaacgggctttccgtcaatgacacaggggatttcaaaaggcatctgggactccatctcctcgagagcatcctgaagagcctttcgctctggggaccctgcagggtagtttccctgaagaggatgaaaagacataacagaacgaatcatcagtgagccggtcggcgatacgtatacatgcgcgcctagaaagagatggaacgatgggagaacgtctgaaagctgtgatgcactgaccatcggctcgttggcgatcttggggatagagaaagaagcaagagaagccattctgaacgtgatagacggttgggataggatggataggagaagggatgtgtactgtttgtgggagaaagaagaaaaagaagagaacgaggagaaaatgaaaaagatgtgctcgttttaagctgactagatggccagattaccgccgcgttctcttaccgcccgtccggatttaccgctcaagctcatcttctcttttttgaataaactgtggatgagatcaaacagatgcgctcggtgagggagaggcgatgtgaaaatagtccgagttaaatacttgatcagagatggacatatgaacatatgagcagaagacctgagaggaaaccaatggacgattgaaaagagacagagagaatcgatctggcatccgtatttccttctcctctccgtccaggttatctcttatgtggtttgttctgatgtttcatcttatcctccaaaattcagtcggaccaagttgttgcagctaggtgtgaccttaaaccaggaaggctacatgttcataggctggagcggcacacaggacggtggatggacagatgaaggacatagacctatcgtagcaacgatgtactcctgtagttagcgggtctatcccacagtcagccagcaccaaccctgaacggagccatagaccggtgcatgctgatcgatacatgtgagatagtacaattatcttcatcatccacgtcttccttccaccttcttctcaactctccgtccgattctttccagaggctgagtgtagcgccgagggcgggaaagacgataaactttgtcaccttcgcgcttaaccctaacacatcactctttgactcgacattccctcctcaccttcttctcgcactcagtcatccgttataccacaccatgcagggcttcaacaaataccatcccccggactatgatcccgcaaagcatccgactcttaacagctatcacaacaagcatgctctcggagatcgggccaggaagatcaatcagggtatcctcatcgttcggttcgagcttccgttcaatatctggtgcggaggttgtcaggctcacatcggtgcgggtgtaagatacaacgccgagaagaagacggtcggaaagtacctttccactccgatatatggcttcaggtgcaagtgtcatctgtgcgaccattggtttgagattcgaacggatccacagaacgcccagtacgtcgttcatgacggagccagaaagaaggacgaggactgggatccagagcagaacggtggctacgctattcaaggtggatatatctcctgctctttcttttgatcttgtgaaaatggttgtgtggttatccgtctcagtgttattgtcgactgacacgatatcttttctcgttctctcgcagataccgagaagccgtccaccgccgccccggacgcgttctcccagctcgaaaaaacgacgacccaactgtcgacgactcaacagcgagagcagcgtttgtttgagctatacagcctgtcctcccaaatgacctccgatccatatacactctccgccaagctccggtcgaccttccgagcggataagcgagtcagactcggaaagcaggctcaggacgatgcggtcaggtccaaatacgggctggccgatagagttaggctcacgatcgaacagggaggttcgatcgatcaggatacaagccaggtggaaggcatggacgcatggaaggcaggaagagacgagatccaaaagagagaagtcgaaagaggcagggacaaggccaagaggatatcgtcacaggacactcaatcaggggtcgagaggctcaagaaagtcgtggtggggaacacaaagaggcggttcgacccgttccaccgacctggttccacttcttctctgtcctctgtttcttcttcgaattcatccttagacgggtacacattcaaaacaggatcctcttcttcctcctcgttacggtcgaaaggtcgatcgatcaagctacctcctccgaaacggtcgacttctacatccgtctctatcccagtatctgcaccagatcaaaagtccggtgggcttgcgcttatagaagagtatcagagcgattgaacttggtgctccggggttcgaatgtttcttcccctatcctgctttcctctcagtttttacatctcgtgttttctttttcttttcttgcgttcatatccgtttgtattcttacattttcactgtatccatagccctattcatccacaatgaatctttccgctggatttctatcctctgtcaattgtgctagccgtgactctgatccgagttggccaggctgttcttgtctccgcattaccatgtaaagatcatacagacttctctagataggctgataggatccctcacccgtagcggttcgacttccgaccggtggtcggtttgaactcggtgcggatcccaatctctggccttgaccttgaccaaatggctgggtcggtgctgatccgggtccgggttgactatcgctcggaacgttgtagcctccggggatggctgcttccatgtcggaagcttgccagactatcgtgtttggtaagagacgagatcatgaacgtttgtcagagtaaacacctccgttcacttcgtcaaagcaaaccaagacaacggcataggcaaaaaatcgaacaagatagagtccttaccagtctgagtggaaccggtgttcaaattgattcctctggaagcaaggaaaggcacgtcaattccaggagcttgggcatacgtctcatctcccctctctcgaagcgtgactacagtcgaatagaacgtagggatctaagtttgttttcaaattcccatccattgcaacaaaagccataatcggaagcaaaggttttatttgagtaatccggatcccagcctacggaagaagaaaacgaaacgaataccttgagaagcatatggacgagcgtcaacgtccagatcaagaaagattgtcgatggccataccggatgagccagatcaggtcaaccgggaacaagctcagtccaaggaatccggcgaacaaccgaagcggctgatttgtcgtctgaagctcatttgcgatgattccgaacagaaacaattcgaggtctagcagatcgacagaagaaaggacaaagtgcgttagcgaaaatggttcacgatctaatgcatctacgttcaagagacgtactgtatcgaggcgttttgaaaggcgataggaagagcgccaaggactagcggaatggatcatttatcgatctcagtatgatgttcatcgaacgattgacttttgaaagaagaaccaagaaaacggctcaagtgtttccacagagatgtgcactaacggcttgagtggatagaagcttccgagtatcacttttgagtgagttttgtttattcatacaaaaaggttatgccaaacagggtcagaacaatcgaagacatcaaacaaggctagcaagcggtatgatcagcgtacaatgtgaaagacattgagaaggttgatggtaggagaacagagtagatctcagagatggccaagagatgcgctagagttggcgtccggtctcaccctggcacgtcctttctacgcgtctcgcttcgcacgcgtctcgcgcctgatttctcttcgtcttctactgtttctccctccctccgtgtctgtgttgcaaaaacggagactcttcatccatggacgacctatctgatctgtcggactctgactttccgactctcacacagttgatcaatgcagatgtatacagacgtcaggtcgattctctatcatcaccgtgctcctcgactatcaccacctctacaacaaaaccaagagggagaggcagattcagtcctgactcaaacaacatcaatctgcttcgctctcctctcactgcttccttgaaccatactggagtcaatgtatctgatatctcaccgagaagctcgacatctgtgtcgtccaatggacatatagctcggaaaggatactctggagggaaattcaaaatggacatgctgtctgattcagaggattatcgcgaggctagcagtccatccaccaaactgaattcaggtaagcgaatccctcctgttactttggtcgtggtcgactcttatcatattaataataataaactaaatccttaatcgacgattgtttcaaacaggctcaaagaattcgtcggtagcgtcctcatctgttacgcctaacgcgcaacctcttcaatcctccagaaaacggacgactcgacgacggagcggccggtgcaacgcaggcaacctatcaccacctccttccgtatcctctaaagatgaacaggctacggctgataatgatttcatatccgatccatcatcgtcttattccagtccaaagcgcctcccacaaggatcatctgaacgaaccacccagtcagacgggatatctcgtaaagattcgtgtgttcttctcgagaaaataacaagtccggcgatctctcacgaagtgatctcactactttcagaggacgaggaagaagacgcggatgaatctgaatctgaatttgaaagagacgcggtcgaacgattcgtaatgggttgggcagacaaggacgtgcccgagtcatccgctttgcctagtccaaacataacgaaagatagagaggagactcccaccaagcctggaaagagactttttgggaaaccaaaaggatacgaccggttgggtacaccctcccgttctccatctgaaccttctttcacagaaaacccaggcgctctcctatcgtcgtccagatcaatagattctcctgcgatcgtcatcgatgactgggggtttcaggggacggaagatgggtttctcgtatcgaatgaggatgacagtgttctcagatggagtcctcctccaaagcggcccagtcctatccgagggagccagcctgttcatgacttgccacgtctctcgcaaccctcaccgtcgagcgcgacgccctgtgaacctcgtccaagagcgaaaccgcgctcaaaggtagcggagtctcggtctgaaccgagcgccgtcgatcctactcagacggtgatgaaagtcaactcgaagcattggaaggcccgtcgggagactctagctttgggccttgtggacgagcttgatagaaaagtcttcaaacaagccatccgaccgtcactctgtagaaattccgaagcaaacgagcggaaagacacgtctgagttggaaggtttggtttggacagggaaactgaggacgacggctgggttgagtaggtggtgtcgaaaagaaggacctgatgggaaggatgatcgacatatatgtacggtcgaactaagtactaaggtgagaagcatatctgatgggaagacaaaaggggaacaagcaggcaacgagcggacgatgaaccactgactgttctgtatatcttaatgttcgctatctttctgcctacagattttggatacagaagaaaaagtgctgagcacgacagcgcacgaattagtgagctcttctctccaatatacgatcattatcctcgttcatcatctaagaagagctttctcctacactctcggacgaaaacagtgccacctggctacctggatattcgatggaaagaacactaaaccacacggaaaggaattcaaggcatgggctcgaaaagtcatggactatagaaccgatatctcaatcaccgttcgtcttcccttccctttccatccctctcttcgttctttcttgtctgtattacctctgtcttattgggactcatcggttaatatcggccttctttttgatgtgtgtctgtgtgcgcgcgatatagacaaaacatacgttcgagattgtccataaatacaaatggatctgcgaaggctgttccgctaggtgtgttctctcatcatcgtcatcatcatcaccccattcgtgtctgcttgaacttactcaaatatatacctatctcatccggccgcttcataaaccgaacaacaccatagttacgggagagacacgaaatctatagatccgagcaaacaatgttgtgggaaatgtaaaggtcgactggtccctcagttcaaatctcagaacacgaaccaagaccaagagcaagggctgaatggttcgaacgcgactgcctctgggtcgggatcgatgacgcctcggaaaccaaatgcttatcgaggttcgtcttcctctttctcccttcctccttcatcgttgtcgcttttcgaaaagaaaagaaaagagaaaactcgactgatctcctgaaggaccatctttctatgtgtgacccaacttggaaatgaagagttcgtgaaggagaattacaagacgacggcgagtccagggatgtctgctcctcaagtgatgaaactggtcgccgagaaatggcgagctcaacaatcggccataccgccatcacccttggcacaggccgaacccaattccagcgccgatatcaatggaggagctcgaggaaagacgagagtagaaagaggggagggacatttatccagtgttctgagggaattaagtatctgagaggacaaaattgcttaatgaaccgagtgcttgtccatccgcccattcggaatgtaatacttgtttccctctcctacccaaaacctttacacagggtgtttcttgcataacaatatgaaaaaaaaaggaaatggaagaaattctttatataatcaagatcgctatgtttactgctgcttgcatcttttgatgagaaggttgagaaattaagacgaggaaaaacacacaagcgagtcgaggtcaggatggagccgaaatatgacctcaggaggaaacacgaaagatacagaatgggggcttactcttgagggttctgggcaccggcggcgggagcagcatcgtcgtcctcatcttcatcctcatcatcctacatatcggtcggccggagaaagcgagaaggatgagcaccgaagagaaagaaaaaaagaacgatagaacataaaggaaagaagaaaggaatctcacgtcgtcctcatcgagctcatcgtagtcgtcgtcctcatcctcatcgttgtcatactccagagctttaccggtaaagtagtctgagggagttgattgaaaaagaattgaaagaaatataagtaccaatcaggccatgacaaagtacatctaaaggaaaggagaaggacaaaccgatggctcggggaatgattcgctccttgaggtcctctccgacctggtagtcgagctccaatcgctgatcgagagtctcaagctcagcctcgtcgatatctccgttctcgaggtcctccatgtttggcggggaaggagggctgaagaagctgaagaacgagtcggtgggcacggtcttcttaacgattcgagtcttgcccgtgctcttgtttcgctgcttcttggtctcgatcgtcttggtaaggtccttgtcggcgttccagttgatctcggttccctcggctcgctcgtagacaaagtctccctggtatccaacctcctcctggtagaagtaggtcttgacgagttcggtgttggtgaaatactcattcggggcaaacacaaaggtgagcttgaatccagggagatcatcctcaaggtaggaaagctggatatcggtcaacgccttgaaagcctggtaggtgatggggaacgaagcaaacaaatttgatgtttcagcacaaacaatcaaaaagacacttctcggcgcaaggaagagactaacctcctcatcagcctcggtgatcaacgaactgattccgttgtggttcctcaaagcggtcaaccagaactcgggaatacccttgacatcattgctcatgcccaagtcgacgttctcgggttcctcctcatcctcatcatcagaaccgtcggcagcctctccagcggcgacctcctcagaggtaggctcggccttaccggcgatgatgtttgatcgtcgctcgtacagaggagcgtagagtttggcaaactggaagtcgaggagtggcgatgagaatcggacggagggtttacgtatacacataaatgagaacataccttcttctcgagggcaagaatctcgagctggagcttgttctcaagcttggagtgctcaacctggatacctttcaaaccctcaactcgagttcggactgcaggaggaagactagaaagcggcagaggcgatcgacgagaggagaacggagaagatgaaggaaagacaagaacggttaataatctgttgagacaagaacaagcggattccaaggtatgttgactgcttacctgttgatgtatccggaagactttccaacgagatctccgagcttgccctggacgagcgacatgagagcggggttctgaaggtgatcatgtcgaattgttggacaggacacagaaagtcgagaatcccaaggtcagcgttctgaacagaagcaagtcgtctccaggctggggataatatcgtccaacatccgtctctggatgttcttttggggtaagtctcggtcgagaggcggccagagaagaacaaaagatggacgcatatatggctctggagacgaatgctaggagtagagaacaaagacaaggccaagacgagactcacgttggcgagcatctgctgggcggactgctcgtcctcctcctcgacgtcctcaacggtgggctttgttgagttgggagcgacgattcctccgccgacgaacgagttggcgggtgtgggagcaccgtcaacccgagaagagggaatgttcaagttggaagacatgatggtgtgggtgtgagtatgagcgtgagcgtgggtatgggcctgggtgtgggtatgagcggtggtggtgatggatggatgggtgggtggcgtggaggggtccgtgcggcaagatgttttctctgggtaggagcgttctgcattggggcaggagaaaaaatagtgtggttacgggagatcgtggttacatcaagccatcgtcactgtaaggctctgtaaggctcggttgttaagaaggtaaccaagtgtaatcacttggttcgcggggtgacacttaggctctggcgattaatatatctgaagcagaccaaactattaacaatatactttggataagaggtttcaacaagaatctcagcttgaggaaaactcttatccaagaaggcgcgagggcgtccccgttttatatcaggacccctcgcgcatttggtctgccactaaagatatacatatgacgagcctagagaggctcgagatcacgagaactaaaaagatgaagcatgaaccatgcaaactagagcatgatggaaaatgggcgaagaggcataagggatggagggaacgaatagcctgtaggggtaacccacgtaagagaacacgtgatacttaacccgtatccctgacagtcacggtgtttcttgagagtcagtaatgtccagctgtgacctcacgtgactaaacccgacacgtgtgcttcgaccgaggtgggacgatcttttttttggggggagaaaccgagtgggacgatagagaggactacggagaactgtagtgaattgtagtgcgctcactacggagagttctagttgagcaagcgatgtgattttcaatacaatcccggactacaagctctctaatagagctctataatagaaggacaaaagtcgtcccactcctatctcccgcgcgttttaatagagccgattgtttttttccctaatgttttattttctttccccgatcggctcatttttcttctctccgcgtattcttcacacaacgctccctccatcttttttcttcttgttcctgttcctcttcgtctccttccattgtcttctttccttccttccttccttcttgcctctagccagcttcaacagcgacgtctctctctctctgtgtggtgatctccgactgtagtgtctctctcggtcactttcacgaatcaacttcgtttcttttctgatcgatcggtcgtctttccctcaatccgtgcatacactcacacttacactcacacccacacactcaaacacgctaaataatcagatccgtctccccttcttgatctccttcggcttaggcaatggcttccttgttcggcctccggccggtcctcaaacgagcagccgcgctctcctctgctcatccaatcgaagtcatcctttctacctttgtcgtggtcaccttgacgtactttcagttgatgtacaccatcaagcacagtaatttgtacgtccgatcatctatttgtcgtgttctccttagtctctttctcttcctcctttgtctttcgcgtcagcgtggctggatttccgtctccatgtcatttcccttatttcctcttcctgtcatttgttcctctacttttctttctctacctcctttccctgtcgtttgctttccctcgccagttgaccgatcctcaggattcatggctaacatgcccaacacaaacttgcatatcatctctcttcgtccacagtctttctcagacgattagcacacaatctaccaccagctgggtcgtcgatgcgttcttctctttgggatccagataccttgacctcgcgaaggttagtcagttgaccctctcatgcttcttttctctcagtcttgtgtgtgcgcatatacccactcatagacatcttcgtacgctgcactttccctcccttagcaagcagactcggccgatatctttatggtcctcctcggttacgtccttatgcacggcacattcgtccgactgttcctcaactttcgtcggatgggcgcaaacttttggctgccaggcatggttcttgtctcgtcctcctttgccttcctcaccgccctcctcgccgcctcgatcctcaacgttccgatcgacccgatctgtctctcggaagcacttcccttcctcgtgctcaccgtcggatttgacaaggactttaccctcgcaaaatctgtgttcagctccccagaaatcgcacccgtcatgcttagacgaaagccggtgatccaaccaggagatgacgacgatctcgaacaggacgagcacagcagagtggccgccaacaaggttgacattcagtgggcccctccggtcgccgcctcccgtatcgtcattggctcggtcgagaagatcgggtcctcgatcgtcagagactttgccctcgaggtcgccgtcctccttctcggagccgccagcggcgtcggcggactcaaggagttttgtaagctcgccgcgttaattttggtggccgactgctgcttcacctttaccttctatgtcgccatcctcaccgtcatggtcgaggtaagccttttcttcaagtttcttgctgtcattttcctttcgacacgtatgctcatctttcgtttccgtctctctcacctttccaggttcaccgaatcaagatcatccggggcttccgaccggcccacaataaccgaacaccgaatactgtgccctctacccctactatcgacggtcaatctaccaacagatccggcatctcgtcagggcctccggcccgaccgaccgtgcccgtgtggaagaaagtctggaggaagctcatgggcccagagatcgattgggcgtccgaagctgaggctcgaaacccggttccaaagttgaagttgctcttagtaagtaaacttcctttgttcttctcatcattctttatctccgaatcctgacgtcggacccttctcgattcaaagatcttggcctttcttatccttcatatcctcaacctttgcacgcctctgaccgagaccacagctatcaagcgatcgtctagcatacaccagcccatttatgccgaccctgctcatccgatcgcacagacaaacacgacgctccatcgggcgcacagcctagtcatctttgatcagttccttagtgactggacgaccatcgtcggagatccaatcatgagcaagtggatcatcatcaccctgggcgtgtccatcctgctgaacgggttcctcctaaaagggatcgcttctggctctgctctcggacccggtcgtgccggaggaggaggagctgccgccgccgccgccgtcttgctcggagcgtgggaaatcgtcgattggaacaatgagacagagacctcaacgaacactccggctggtccacccggccacaagaaccagaatgtcaacctccgactcagtctcgagcgggatactggtctcctccgttaccagcgtgagcaggcctaccaggcccagtctcagatcctcgctcctatttcaccggtctctgtcgcgcccgtcgtctccaacggtaacggtaacgcatcgaaatcgattgagaaaccaatgcctcgtttggtggtccctaacggaccaagatccttgcctgaatcaccaccttcgacgacagaatcaaccccggtcaacaaggttatcatcggtggaccgtccgacaggcctgccctagacggactcgccaatggaaacggtgccgtcccccttgacaaacaaactgtgcttggcatgaggtcgatcgaagaatgcgaagaaattatgaagagtggtctcgggccttactcactcaacgacgaagaattgattttgttgactcaaaagggaaagattccgccgtactcgctggaaaaagcattgcagaactgtgagcgggcggtcaagattcgaagggcggttatctgtaggtctttttctcctttgaatttcaagccttggaggagaggaaagtgcttcggggtacaatacaggttgtgcaaacaaaccaagagaaactaaagaaaactttcttctcctctctctcccctcgacgtcagcccgagcatccgttactaagacgctggaaacctcggacttgcccatgaaggattacgactactcgaaagtgatgggcgcatgctgtgagaacgttgtcggatatatgcctctccctgtcggaatcgctggtccacttaacattgatggcgaggtcgtccccatcccgatggccaccaccgagggaactctcgtggcctcgacgtcgagaggttgcaaagcgctcaacgcgggtggcggagtgaccaccgtcatcacccaggatgcgatgacgagaggaccggtggtggatttcccttcggtctctcaggccgcacaggccaaacgatggttggattcggtcgaaggaatggaggttatggccgcttcgttcaactcgacttctagattcgccaggttgcagagcatcaagtgtggaatggccggccgatcgctatacatccgtttggcgaccagtaccggagatgcgatgggaatgaacatggctggtgagtgcgacgagttttctttgttcttcttgtgcggaccatgttttctcatccagccaattcattcttcattccttctcggtgtttggcaaccttttaggtaaaggaacggagaaagctttggaaaccctgtccgagtacttcccatccatgcagatccttgctctttctggtaactactgtatcgacaagaagccttctgccatcaactggattgagggccgtggaaagtccgtggtggccgagtcggtgatccctggagcgatcgtcaagtctgtcctcaagacaacggttgcggatctcgtcaacttgaacattaagaaaaacttgatcggaagtgccatggcaggcagcattggaggattcaacgcccacgcgtcgaatattttgactgtgcgtacttctctttccatattcgtcctcgtttaatttcttttctgtccagtcttatgacgtctgattggttcttcttttcacccacacacatacagtcaatcttcttggctacaggtcaggatcctgcacagaatgtggagtcctcaatgtgcatgacattgatggaggcgtacgttttttgttttgttttccttctttttccatatgtttctacttctactttcttcccgagtccgccaagctgatacctttatacggtccttctctttctcatgacgagtagtgtgaacgacggaaaagatctactcatcacctgctcgatgccggcgatcgagtgcggaacggtcggtggaggaactttcctccctccgcaaaacgcctgtttgcagatgctcggtgtcgcaggtgcccatccagattcgcccggtcacaatgctcgtcgactagcaagaatcatcgctgccagtgtgatggctggagagttgagtttgatgagtgctttggccgctggtcatttaatcaaggcccacatgagtaagtctgccaccttttgataatcaaaagggtcgtggtactggtgtcactgactggtgactcttcctgtcatgcagagcacaatcgatcgacaccttcgactcctctaccggtctcaccgttggcgacccgaccgaacacgccgtcccaccggtcgattggattgctcacaccgatgacgtcttccgcatcggtcgcctcgatgttctctgggttcggtagtccgtcgacgagctcgctcaagacggtaggtagcatggcttgcgtcagggaacgaggggacgagacgagtgtgaacgtggatgcctgaactggggactcccttttcttggtatcccttccgtttttctttcggcctttgaatcctgtattcttgtccgttttttcatcttctctttctggttctccttctctcgttcatctgcaaaaacaaaattcaatcgcatcggtctctggcattccatttgggtttcaaaatcaaatcaatctctatctactatctcaaatatctttttttcatcttttgattcatttctgttgaaaactgtcttgcccttctcctacttcttatctctgccttcttgccaaagttcaattcgttgtccatctgtgcactctgatctatcagtctgtatcaagtacgctcttaaatctgtaattggctctcggaggtgtctcgtcatctcacatatggctggcgatatgatgtgtcggtttcttcccctccaacaaaggcgacgtggctccttcatcaatctttggcgcaagctctcaaaattctccaaaacggctgactaagcaaggtttccaagtactctcaaaccgagcaaggccatccatcctcaaatcaacttgtgaaaccctttgtggatagaccgtccaaaccgagctcttcccaatcttcgcctccccttcttctctctgtttcccacccgttcgagtttgtttatttgagaatcagatggaagacgatatccctccggtagaggtagatgtagaggatccgtctggtgggtctagaaagaggaagcggccaggcccactaccaatggatcctatggctgttctcacttttgatcagctacaaaagaaattcgtaagagttccttctttcccttcttttgttgtacatagatagcaataaccgatgctgatggctggcgtctgcttctcttgattgatcgacgaggaaatcttcagtatcatttgaataaagcattactcacagctgctaagaaagcccaaaagttggagagtcaaaagttgatcaagagcaagtgagaatcctggtttctttctttccttctcgttcttgaccttcggtatcagaggaccgcctcttgagagatactcgagagaaagttttctgacgtcagcctgggtttgatgtcactttaattttcaacctgggactctttggattaaacagaaacaatcctaaagctacacaagaagaacagacagacttgagctctcagttggttgacgtcaaggttcgtttcttccctcttctttctcttttctccacggacatcaagcttgacataatgcttcgacgcagcttactaactctgctcatgcttgtttgattctctctgcggcaggctctatctctcgaaccgctgatcgcgttaaacttacacaaccgactgacgaaacttcatgtgattgaaaacaacccaatcatcgagcctcttgtgccccttcccggtctgccacacgacaacttaaaaagtaaagccgcgaaccgaatcttgagttccaaagctttcgcatcagagatgagttcggccgtcatcagggttaaaggatggttgtacccagagttcaaacaggcagagcgagcaaaggagagtgcagagaagagggctgccgccgctgctgccgccgccgagttcggcggtaaagaaggaagaggaggaggaggaaataataaggaaacagggctgtccagtcggtctaccggtggtcaactcgcttcctcatctgcgctaccacccccggcggttcgtcctcgatcaccctcgctcgtacctgaggtcgaccatgtggattacgatgatagcagaagcgaaggtggcgaatactctggatcagaggatgaagattccgattcggacaatgatggagctgcctcccgagcttcttcgtcctctggaacaggttcaggttcggattcagagaggcctaaacaagcactgaccaagaaagccaaggtggaaaagaaaccaaagaagccagagccggcaaagaagaagaaaatcgcaagctccacattcttgccttcactctccgcgggttacacgttcggtggatcggattcagagccggaagagctaagtgacgacggaggcgcaagaaagaacagacgaggacagcgagcgagaaaggcgtgagttttctctctctctttatccacaattctggtacacgagcgaaccactcatggcttccttaaaattcatgcttgtatatcaatcaaatttgggaacaaaaaaaaacaggatctgggaaaagaaatatggagcgaacgcgaaccatttgaaagcagctcgagccaacggagaggacaccagtctcgagtccaatgcgttcgtcggacgaggccgtggagggttcgctggtcgtggagggtcttccggtcgaggaggctcaacctcgtccactcgaggaggcagaagagatttctctgtgcctgcctcgacggacggaggctacaacactagtgcaggcggcaggggaggttcgttctcttctgccggtcggggcgggtcttcaatgggtggtggattctcgagcagagctggcgcgactggattctcttctggtccacctccaccgtcatcatcgtcagcaggagcgtctggcggaggccaaaaaaaggcagaaggagcgatgcacccgtcgtggatcgcgaaacaaaagatgaaggagagagaaaaggcgttgggcgatgtgagagctgcagtccaaccgaagaagattgttttcgattgatgatttcactatctctcttttctgttctttatcttcttgaagttgactagatatgagtgcaaacttaagtacaaatacagagctgagagatctgctcagagtggcctatcgcaattgagagtgtgtttacgaaattataaagtagagcgaatgccgaggttcatctgatttcgtgttatctttgactttgtcgtctctcttcgataaactatcacccaagccttcaacaggactgaatgaaaatcagctctgttctcacccaaactctgttttcgccttatcctacccgctctttttgtccctcgttccatacttggaaacatacagttgcttctcgttctatcctcgtttccgaaacccatcgcttcttccgtccgtcttgcttcggtcttgcccgatcatctcaccattctcacgtctctccttcaaccaacatacatcacatctccacaagagcgtttgcttcatctgtcgttgcaagtaagatgacgaagattgctgcttgtcagatcacatctactccggacgtagatcataatctaaagatctcggagacagtcatcagaggggctgtcaaagacggagccaaggtatgtatgatcgtgattttgtgctggcattcgccttttttaaaatacccttatgactgcagacgctctaatcgagagaagttatttggtttcgtaaggttatttttctacctgaagctgcagagtgcgtttctttgtttcgagttttgtcgttgtcggccagatgcgatggagattgtgatttctgatgttggtttgtcgacctcctgcatttcttcaagtttcatcaccgactcagcgcatgagtgcttcttattgtctgctccaatttcaaaccacacctatctagttcgtccagtctttatgaatacactcacagtcggaggaaaaagacggctgatcatacgccatatgttgagccattgatagaaaggaatccaatcattagcgaaagagttgcaagttacgatcctcgtagggatccatgatcttcccgagccaggatctgctgaggacaaggaggaagaagaagggagcgagcgagtgttcaacactcaagttgttgttggaacgcatggtcagatcgtagagatctatagaaaggttcgttagaaaattcaaactttcgattgtgcggcaggcggactcaaagtcttctcgttggctcgattcaatcaggtccatttgttcgatgttaaacttaaaggagataaaggagaaacctcaggaccaaacggaccatcagaggatacggatcaaccagaaaaaaggacaggagaaagtttgagaatccgaccaggtaaaaagatctgtgacccagtcagcacagttgctggcaaggtcgggcttgagatttgttatgatatccggtcagtcaattcattctttcttcttgtcagatctctcttattccattgtataggttctattctctcaccgtgaatttcactccttttcctttactggctcgttgaacgcttcaacacgggtagattcccagagattcattcgatcttgcgtgacaaaggagcagacatcatcgcgcttccatctgcgttcactctgaagacgggtaaagcccattgggctacgctacttaaatcaatcgccatcacataccaagtatttgttgtcgcagctgctcaagtgtaagggagtttctcgtgaactctggcaagatgcactcaagctctgtctgacccgactgtttttcttttctcttttcattttttccatctttctttcttcttctgattatatattgactgttctacagaggcgctcacacatcgagtcgatcttcatggggcgagacgttagtgttttctccatggggtactgaactcggtcggttgcgctcaatggacgacgtcccggaagacgaacggtcaaacccgttaaagccagagtttgtcatcgtcgatctaaacttgggcgaaatcgaggaggtacgaggcatgatccctgttgaaggtcaaagaagaatcgatgtctacaacgttccgcgagaggtctgtgtgattctataagcgatgcccctgttttttttttcatctgtacgggagattcgtccgctgactaccagaacaatgttctcttgtcacatcatcttggttgtgtcaggtctaggattacacacccatcttgattcgttgattcatgaatgatggacagtattgttgcatcatgtgtatccattgtgttatgtgttatgtgattggcctctctcgtgctcgtttcctgcgctctggatggcatagctttcgatcctctcagtcattttcttctatttgtccacctcgcaggacagtttgctcgaatgaaaagacgtctaaagctagaaaagaacgtattgttctagtctgatcctcgtctcttcaatgcctctctctaacgacctttgtgccgctcgcgttttgatgcaaagacaaagcctcacgtccttgtcctcatccttatcttgctcggcacgctcagaacgagcataattcccacctagtccaccgtttctatacaacatatgtgcacaaccacccagagttgacctaaatgaaggtcggcagaatgaacaatgtgttgttcatgagctgctagctgacgatcgaatgttgcgggatacatgattaagacggtttattcaaaaatcatttatttactttatttcatcccctctgtatcaactcttccccttccttgcaaacaccctccctcttctctttttcatccattcttttctccctctcgttaccttttctctcccggtcgtactgtgtgagggcttctgggtgtcgcatctgtctccctgtctctctctctttgttgttcttgtcttttttcccttcttcctggaccagtctcctagagtcccacagctagttcgcgaaagtcaagcctctctggcctgaaacaaccgcccggcatgcttcccaaaaacacaggttactcgtcccatcctttgcctcaacaaccatctcagtcctactcgcctacagagaataatcagccacccagacttccaaacgtgtctgctgtatcattcacagaacctgacggatcgaacctttctcgaggtccgaacgggccaaaccggccacaactctccacgacttacagctcgaaagggccccagaagagctatacgaatgacgatgggtcgatccaaatggacgaaccagtcgcaccgatcctgtatgctgatgcaggcgcgtatgctactggtggaggagcagacttcaagaagaaaaagagtctcatcaggccagacagagagagggtcgatccgggagatagattgtttcactacagacagcatgccaagtacgtgatttaactctcttcttcccatcttcacttcttttcccttgtttggctggtggtcgtggtctcgccctttcatctccctttgtctttctactttcgttctcgatctctttcaaatacataaaactgaacaactatctaaacacgtcggtatgatgttttccttcctcgcaggaatcagacggacgtgatggcttctggtacgtagctgtttgccccgactatatgtattcagatcttcatcaagattcgacacatccttcaatattggcacctccagtacttcttttacttacttgagctctcttgatttccatcttgatttctattttttagcaaccgggaatcttcccgatcccactgcggctcatgtcaatcgaggtatgcctcagcttcgtcgaggaaagtccatcctcgctcgagaagtcacgaatgtgtctacacgaacatctctcatagaagagactcccatcatcggctacgagaaaaaaagcgggttctgggataggattgctcctggaccggtggatggttggatgatctactgttggatcctgacatgctgggttcctccgtttatcatgcgggtagttttcggtaagactctcattcacgcattcgctatgccctgcatcttggacatttgcttacctcttatacgtgatttacgcccattaaggcaaacgaacccctgaagcccaacgtgcttggagggaaaagattggtctcatcagcatcattgcttgccttatggcagccgttggtttcttgactttcggattcactcagaccgtttgtggaactcctgcgaaccgataccatggaggccatatcgagaacggatcactgatcatgaatggttactcctacgatctttccaaatgggaccaccctgccggcggggtctttaacggatcacaaaaccctttatatatggatgcttggatggccggagggatggatgcaagtttcctattccaggatgtgaacagacactgtctcgacgtcatcaaacccaccaatgatactggcatcagcgttgactccaccaatcgaaacagaatgggatggtacttcccttgcaagcttcgaccccagaacggaactaacaccgtcgatgcttcaaacatcacctcttcatatacttgccatacatcctctgttgctcgggccaattacagttcgcttactccggctggccaggtttactacacgtgggcagatattaaaaatccccaaagaaatttggctgtgtaccagtcgtatgttggaatattcttccccgtctttcaaatatctctcaactcatctacctgaccgtactttcgcattgttcttattttgatattcaacacgatgtagtaacgttctcgatcttgaccttctcaactggttgcaatcttctcagaccacttggccacctctgttcgactatctgaaatccggaaacgcgacttacaagggtcttgatatcacaatggttggaatccgttctggtcatcaaacagagatgaattgcctgatggacgttatcacgatcggctttattgatactaagaccatcggatgtgttgcctcggacgttgttctctatgtttcgctcgtgtttattattggagttgttagcgcgaagtttgccatggccgtcatctttggttggttcctttcctggaaacttggaaatttcaagggagaaacatacgctcaaaggatggctaggtccgaggccatcgagaactggacggatgatatctaccgggccgccccgtcaaagtatcggccgaacgtcgcgtctggcaaaggaggcaagagcaaaggaaccacattcctgccctccacctctagattcagcaaggctgactcaatgatggtgactgcttctagacctaccaccgcatacggaggtggaggccctaacggaggttacacccgatctaataccactagttcctatggaaccaaaggtctcctcggcgccggtcggtacacccctcctggctctccgatgctgcactcatcccgaagttccaactcgcttcctttcggtggagattcatctaacgtgcatcagtcattctcggaggcttccctcgcccaggccagctgcccgttccctttcaaccccaacgtcattcctcagccctcaatcgactatgaaccgtttggcttcccgctgatccacaacattcttctcgtcaccgcatactccgagtcgatcgaagggcttcgaactacgattgactcgcttgccactacagattatccaaactcgcataaggttattcttgtcatcgcggatggaatggttcgaggatccggttcggccctcaagacacccgatatcgtactcggcatgatgaaggatttgatcatcccggccgatcaagtcgaggcacattcatacgtggccattgcagatggtcacaagaggcacaacatggcaaaggtatacgccgggttctatgattacgatgacgatacggtcgaagtatccaagcaacaacgggtcccgattgtacttgttgccaaggtcggaaaccctctggaggccaacgatgctaagcctggaaatcgaggaaagcgagactctcagattgtcctcatggctttccttcagaaagttatgtttgacgaacgaatgacgacgtttgagtacgaattcttcaattctttgtggcgagttacaggagtgtctcccgatcgatacgaaggtgttctctgtgtcgacgcagacacaaaggtcttcccggattccttgacaaggatgacggctgcattccagagtgacggagatatcatgggactttgcggagagacaaagatcgcgaacaagagtgaaacttgggtgacgatgattcaaggtttgtgtttcgataaaaatcttttcactggatcggttagtttcatatgttgactaattctctgttcgtaatccatggtcatcgccatcagttttcgaatactacatttctcatcaccaaaccaaggctttcgaggccgtctttggaggtgttacttgtttgcctggttgtttctcgatgtaccgtatcaaggctcccaagggtgattctggctactgggtaccgatcatggccaatccagatatcgtggagcattactctgaaaacgtggtcgatactttgcacaagagttcgttgttctttttttgttttatcatttgttcgtttcggtgtacctgtcacggcgtctaacataatgattgtctcttctttttaatatctcagagaacttgctgctgttgggagaagatcgatatctttcaactttgatgctgaagactttccctaagagaaagatggtgttcattcctcaagccgtttgcaagacggttgtgccggacactttccgggtcttgctcagtcaacgtcgtcgttggattagtaagtttttttccctggttatctggacggcttttctgatcaggcggttcttcttctactctatcttttctgcagactcgaccatccacaacttgtttgagcttctcttcgtcaatgatctctgcggaacgttctgcttctcgatgcaattcgttgtgtttatggagttagtcggaacactcgttctgcccgccgctatcgccttcaccttgtacatcatcattatcgccatcattcccagccaagtcactccaactctctcccttatccttctcgccattgtgctcggtcttcctggtctcttgattgtcatcacatccagaaagattgcttacgtcgggtggatgttgatctatctgttctctttgcccatctggaactttgtcttgccgagttacgcatactggcatttcgacgatttctcgtggggagagactcgaaaggtcgagtcggatggagccaagaaggaagaggttggacatggagacaaggacggagagttcgattcgtccaacatcgttatgaagcgatgggctgagtttgagcgtgagcgccgatggaagtcaggcaactcatcgcctcgtcgtctcgacactcgatattctattgcctcgacgatggaaaactacgaaaactaccattatcacggtggtcgaccctctgcttctcaggtgtctggcctgatggacggtctgatcacccccgggggtgcgtcatctgattcataccactctaacagcaccggacctttccaagatcaaacctcgcattcttcccatcattcggagttgacctcgccaggagagtacgacggtgaactaggtttcgacgagggctcgtctcggccaggcgttactttgcatgaccagggatacgctcctcaaccatctcagtcacaggacagggtcagacggattgcgagaaacgctcagaagcggcagagcggagggtacggaccgacagcgatgtcgaatgtggcggtacccccctcgtctgggcccaatggaggtggtggtgggtacgcccggtttgatagatctcagcaataaagagggctgagccaattcagctagtcatctatttggacgataatacaccttagctatacatcagaaggatgttcttttctctactttccgccttctttttgctttcacttgctctatctttcctcttcattatattcatacgatttgtctcatattctgggtcccttgaaggcctatcactgtgtcttttaatcttcaaacgtcgttcttttactactactgtgctctctccatcattttcattttctcgttctttcaatcactagtttctcctctcattcacgtgttctgttgttgaaacttatcgcagcttctccctctttttcgctgtctcttttgttccgtgggtttctgttctctctctattctctcacagacttttgtcacggtctttttcttctcgtctcaggctatttctctcgaacattatatccatcctgacctactctagccttctctttttttcctctcttttttttccaactcctggcgttgcgcccttctgtttatcttcttcagattctcttaggcgttacttggactttgtttgtctcatcgttctcagtgtctgtctcatcttctatccattgggccagatataagcatcgttcttatctttattctgacccttcagaagatcgttgagtgatcaaaacagacggggccgacagaaggaagaggaaaacaggagagagcatgtgccattatatctcttcagtcagaacggagctctcatcgttctctccgtatggccctctcggtactctttggcaagtcaagtatatggcccatccgttcgacctttgtcctcagatacctatccaactctacacttctcgtctccgatccaccaatcattccgacaccacctttacgagcgagccagtcttctttttctttcgctcggacttctgggtggaagacgcctcctagagatgtaccgagcgataaaggcgggggcgttccggcgagagagggcggtctcgttagagggaagccatcgggtttcgaatgagggtaagactcccaactcctaggaatcatcgacactcgttctttgattcggacaccttctgcttccaacccggccaccttgtccgggttgtttgtcatcaacctgatggtttctccctcgggaccgccgagtcccaagtctgccagaattccggccgcaaggtcgtacgttcgttcgtctgcaccgtgtccgagggcgagattggcagaaacggtatcatgacccatatcctgaaggttgtaagccagtaatttcgaaaggagaccgatacctcgaccttcttgacggagataaacgatgactcctcgaccgggtatccaatcggaagtcggatcattaggcctcgatcgagtaggaagcgagatcaaccggagggattcatcgagttgttctccgcaatcacaccgttgggaacccaaggtttcacctgtgaagcattccgagtgaatccttaccaacggtgcttgcacaggtgttggttcagcagcagtggtggtaccgttactagcgagattcgatcgggaaggtcgtaaagtaggtgtagaggtcgatgggttcgatggtttccctccaccttctctcaaacgaccaacataagctcctctgatcaatcgttccatatcggtctctcctccgtgccattgggcgtccaacgatttactccttatatgctccttgctttcctcctcgtcctccccttcaccttcggatcctccgtccggccccatctggagaggatcgaacacgatcgccaggtgttcttttgcgtcctggttggatttgtacaagtgaagaaacacgtgaccgtggggggttgggatccttgctctcgcatggcacttgatctcgaatggtctggaagaatgccggacaccattagaagcagcagaacgagaagtagtggtcgatagaggaggtgaaggaacaggtgtagggattgacgatgggaggatcaatgatgttcgtcggccggcgtgcttgccgtgttgatggtcggattgggaaggtgaaggtgaaggaggcgaaggaagaaagacgatcgtccctccaaagaaaggcatcggctgaggcgtctcgatcttgcctatttccgttattcccataaaaattcatgaccaccgtttgattcgtttccaaacagaggtagaaatgagaaccaacggatggaaaaagaagttgggcagatggctgtcaggacgtttttctctgatgtgaaatgtcaacgagcacgcttttctctttctgaagacatcaggaagagaattggacatcgagccgttcgagtagcaggaaaaacaaaagcttaccagacctattcagaggaacttttgtactagaagttgaagcaggagttgaggccgagaacgagttggaacacatcggtaatggacggacggggacgactctttccggcttgacaggctttgaagacgacatattcttgtttttcttttttggccaaggagatatgtatatgagttgtctagatgtgagagatgaatgagtgagcaagaaggtgagagagccagctttgtctctcctcttttgagtcctagaaagatcgattggttgccggttggacgtttggagcgaaacggaaaaaacccggctttgaagaatgatgaataatcaccgggcggacttgtcacacctcatgattcccaggtcggccgacctttctgtgggacatttgacaaaaacatatcttttctcacttcaaatggtgtatctctgattctcttttccgttcgagcaacaatcttgagtacattttacatgtaataacgaaacaaagaacccggtcttccacctctctcgtagccaaactagtcaaaagacagtttaagctcccttgacaaagtcgactcccttcttgatgttcttggcaagctcaggaactaaagagcgcaagacgcatcgaaaagaaccaaagaacgagcacaatcagtctgttgtcatagaagaaaaaaaggaaacagatcgagacgtaccacaggccttaaggagctcctgctcctcagacgaaagctctccaagaccgtggatctcggcaacaccgtcaggctttaggtttgaacagacatcgctctaaggattagtctctagcttctctgaatgtattcacaaatctggtcacttactccgagctcaacgttggtggagaagaaatcgagaccctcgttcttcatgatgggggactcaacaaaggtgggaatgacgatgttcttctcacccttgatggccttcatgagggcctcggcgaagacggcggcggctggtaatatttcgaatgaagatgattagtaacgaagcacgtgatgtaccatcgaccagaacaagtggatgaaacaaaccctgagccatagaaagggtggcagatccagctccgtccttggccttgacgacctcatcaccaccgaactgagttcggttgacaagagctaggaaattgaaacgtaaagaatttcagtcgaggcgcttccatcgagagtatgcagaggatgaacaaacccttgtaggcctctccagagatggacttggatccctcggtctgggagaagagggggacgatggtgggtccggagtgccctccgctgaatatacccaagcaagtttagtcagaatagctatccatcataagcacgtcttatcggctttctcttctttctctttgccatcgcttgcctctattcgactttgactaccgtgtgccctctcaaagacaataatctagaaaaggattagactcacacgacagtgatgtcaatgtccttggggttgcttccctggatctcagagacgaatcgcgaggctcggacgacgtcgagggtagtaacaccgaaaagtcgcttggggtcgtagacaccggcagccttgagaacctcagcggcgatggggacggtggagtttacagggcttgaaagatgaagaaaaaggagaaaatgacgatgagctgagataaggatgagaagggtggggatgagaatactcacttggagatgataccaatgaaggccttgggtgaagtctcggcgatggccttggtaaggtctcggacgatggaggcgttggtctagaacacggaaaagataaatataaagaagtttagagcagagaagaagatgagcatgttgatggtagatcgcgaatgtcttacgttgaaactggagaacaaagaggtcgtagtgtgtcagttaagctgctcaaagaaaacgttaaagagattagaaagataaacgaacagatcatctcgggtcattccgggctttcgggggacaccagcctatggcgcgaccagaaaaagaaggatgacaaaaaagatggaaagatagagcatgagactatgcgccaatatgta

SEQ ID NO: 1106 - DNA, 1914 bp, Xanthophyllomyces dendrorhous
  misc_feature (1662)..(1671): n is a, c, g, or t
  misc_feature (1782)..(1791): n is a, c, g, or t
cgccaatatgtatgtcaaataaatccatgagatgaagactggaatacgaacggggatgaggacaatctcggcaccggcaagggcctccttgagctgctcctgagggtatcccttaacctgtatttttttaatgatcgataatcgttgatcggaatcgagaacatcggagaaagaaaattgatgtgttcaaaaagggcgaagaaagcggacacgatgttagtgacagacacgcaagaagcaagacacgagaagcgtttacacggagaaccacaaggaaaagtatgtccagatagtgtccaggatggacaagcgaagaaaaaaaaggcacgaacggtagagttggtgttgatgtgtccgatatcggctcccactccaggagctcctcggatatcgtagagggaaagctcagtgacgtttgggttgagcttgagaagcaaagagaggggctgtccgattccacctggggagattgaacatcaaacggaattcagagtggcctaattagtcccagtagattggacaaatcagaagagagagtgacgggagatgaatagaaggaaaagaagaacaagtcttcatactgacctgcggctcccaacacggccaccttggtaaggttggcaggagtagtagagaacgaccgggcggcggagagagacttcttaagagcgaacatgatagatacaacgagatggatggtcaggaaagaagatgaaaggttgttcttttttctctgcgggtgaaaaaaagattggccgggaggaggaggcagggcggagggaatcgggagtggttacagctatggttacaaagatctatgacccagtgctgcttagtaagggtacacgtgcccgacgcgcagcggcacatgttgtcaggaaccagggttaggtaacatgtactcggcagtgtaaccatgctcacattccattattcatcatgccttccatttcgttatgccccttctcttcactttatgcgcttgataatccttctcagctatgttcccttgatttgtgataggattagtgatctgttgcttgataatctctggttgataatcctgtagtttagtaatcgagtggcaaccaggtggccacttcaccgaagctagaacccataaaaggatcgcttgcgcgctccttcaagaggggtttcttcaagttaggatccttgttaaataacctagtagttatcagttctattcaatcatgattcatcctctcttccctgagcctggaagcctaaacctccgcgccttgaacatccctagtcaactccagtaacccttcgtaaccctgtaacccagcttgtaaggctcggttgttaagaaggtaaccaagtgtaatcacttggttcgcggggtgacacttaggctctggcgattaatatatctgaagcagaccaaactattaacaatatactttggataagaggtttcaacaagaatctcagcttgaggaaaactctcatcaataaggcgcgagagcgtccccttatatgtcgggacgtctcgcgcatctggcccgcaagtaggtatatacatatgaagagactatatacattcgtgatcacgaggaccgcatagagtgaagaagaggagagatataaatgatggacagtagaaggaaacagcttgtggtagtaacacaagctgcgaannnnnnnnnnaagtaggtatatacatatgaagagactatatacattcgtgatcacgaggaccgcatagagtgaagaagaggagagatataaatgatggacagtagaaggaaacagcttgtnnnnnnnnnnacacgtgttacttaacccgcacccctgacattgtcagggatgtgacctgagtgttacacctcggtaaccttcttttggttctgttgtttctcctgcctcggtattccttatgctctctcatta

SEQ ID NO: 1107 - DNA, 6386 bp, Xanthophyllomyces dendrorhous
taccctctgaacccggaccccgacagacacagccccttacacatgtcacggtcaagtcacgtggccatggtcccggctcagcgccggtcgggcaaagggaaaactggtctgttggtcatctagcagttgatcacaaagaggaagcagagtgtgattccctccttctttcttgacagacaaggctagagggatcaagtgtacgctcaggtgagtacaaccggatgcggcctgatctaggtatatcagggagttgtgccgattagaggttggctcgggataaaaatctctgttacgcccagagacagcaagagaccaagcttgctttttctttctctttcccttctgcctctggttgtccagtacggatggtcttcagaaaggacataggaagacacagagaactatagagggtcagaacgataggacggcatagaaaggagaaaaacaggttggaacaaaagagatgggagagatgctcgttaggtataatgacatcagtcctctcttcccagagatcggccgctgccatctgttcctctgaacgtctctggctgttcctgatgacttcagaggtaaaccgacggctcttcccatctcatctccggctttatctagctatcttatacatccagcttatctcgttggctctgtgtctcctatcgcactcagtcactgacccgtttcttcctcatattcgggaataatgacaatcacgacaacctttcagccatccagcactcggtccgttcaggcaaccaaactatcggaaccaggtttgttccgttgactgagatacttacaatccgttctgttagatagatagtgtcggtctccccgaacatctttgttccccttcctttcgtgctttttcattattatctctcttactgatatctcatcctttggttctcctaagcccttaccggctccttcttattagtcttcgtctccaccgatagatctactacgcttgtaccctaatagaaacaatcaataatggaaactccacccgttcaacccacgacgtttaccgcgccagaaggcgcatacaccttgaccccgacccatttcccggctacattcttcccaaccctatttacctccaacggtcctccagccataccggccaaggtctgtaccgtcagcgtttggtacccgcccaaaaaggagggcggccttggtggtcttctaggtatcggtggtggaggcacaaaagaggcgtctggagattcgcccacttttacctctgccggggaggacgcttcaggaggacccggtggtagcagcactagcggtggagagaaggacagtttctacggaagctcagtctcgaccggagtttcctataaagcaacctccacaggaaacaccatcagctcggccggaggatttcttggcagatccatcactggcatgacttccaaccactcctccagccatccctcgggcagtctttatccgaacggcctctctggaagcggcggcaaggaaggtatcgctcatcacggattggccgcttacagcgctcatccgagaccgagaagtaacgtccgttcgacgagttcgagtttcgtcaccagagttcagacccttgagggaatcaccaagctcttggccgagcgggccaaaggtggagaggaagtccggtggatgttttggaacttgggcagagtatggggatgggtagaggtcggttgtaaagcaaaggtcggttcctcgttcctatcattgtgtcccctctacagatctctcacacgaacctatcgtcggctgtcggacgatcgactataggaacctctcacgcgtatcacgtttgccgcgaacatcacctgtcactcggttagtcactcgaccgccagaccggatctcgtagacgtctttatcgggttctctactggagatattgtgagtggttcctacctcaatgactgacttcgtcctttctatgaagcgcagtgcgttgtgtacttactcctgcacacggcatcaaccgatcgaatgaactcgataggtttggatagatccgactactggaagatactcgaggttgaatgtccgtgcaccctattctttgaatggtcgactcttgtgatcagatatcgatttactaacatcataccctattcactcatacagaaagcagggatcatccatcctcacccggttctacacttgatcccacatccagcgagcccctcccttctgtttgcagtccaccaggacgggtgtatctttgtgtactcgctcgatcgagaagatccagtatcatcatataccatcccgtgggatgcctcttcctccgttcctgttcctgggtccgacacggatcctctcggtggaagcagcggagggctatacgtgtggaagaatctaccgggcgggaaagaaggcgagaaagagaaggataaagagaaagcgaaattggtaggccgcaatccggtctgtctttggagaatcactggcgcttggtccgatggcctagacggcgacagggctcatcgaacaaacgggtcgagtggaggatcggcaagttgggaaggctctttggagtcattcgaggatggccagagtggaactcactcgaccggttcgactggttcacactcggcccgtccgtccggaaatatagggcttagctcacctgcctcgggtacgtccttccaaccgaacggaggaccgcctaagaagaaccaacgaaaaggtgggaccggatgggcgttccgagggaaaggcaaaggcaaaggagggatcacggctgctgctatcagtcctgatgggcgctcgatgggggtctgtgatgagagcgggttgctgagagtaatcgacgtttttggaaacaggtttttattaacatttcttgtccttcctcgtccttccttcatggcctgacggttattcaatgctgatgacaagcttccttacgcgttggctaaatagggtgaccgacgtgtatgccgcgtattttggttcgcttacctgtctggcctggtcgcccgactcgaggttcctccttatcggcggccaagacgacttgatctctgtgatatcgatctgggaagaacgtgtggtggcgagatgtcaaggtcattcgagctttgtcactggactgaattgggatccggatagatgcgagcccgcaaagggacgttaccgattcggaagcgttggtgaggacggcaaaatactcctttgggacttcactcctgctctcctccgaacccaccatcttcatcaccggaacgttgggtcgactgcctcgctcctctcgcccgacacgacaagagacggccgggatagcgagcgggtcaagttccatcacgcgccaaaaagaaacgacgtgccagtactacaggcggtctgtttgaaaatcatggaggcttgtacgctcacagagatccatttcgtgcgagacgcaatctgtctcgtctcccgagctgcatccatccgattcttcgcaagaccgcctgccaagcagaagagcgccaacccggtgagagggagacggaagcgggcgtcctcggcggcgacaacgacgtatggcagttatgttataccctccggctccagatctggtgaaaacggaaagaacatttctggcggagagatcagagttcattagatctctcgtgagctggttgcctccagttcctcgtcttccttccttttccttctcttccttcgatctgtttttttttgctttcattcttctcttgcacacctctttcttgcgttctcacctggttgtataatctttgatgttcagtctctttgcttctctctctcccgacgggtgggcgaatgaacccccaaatgaaatctctatataccttcccacgttccttgctacttccgctttgcctctctgtttcttatttatctttcagtttgtcactcgaaatagaagaaaaagattgttatttttttagacggaagaatcggtcgagaaaaggcgaatacaatattggacaaacgatgcaagcagacagaccatgcggagacatcaggggataaagcgaagcgaggaatagggataggttatcgtgaaggcttttaaaagaaataaaaaagaactgccttcttttccttccttcttgtaagcagagcaagaagaaggaaggaaagatctaggaggagaagcgatcacgttttatctagaagtaaaagttaagcaagaggaaagaaaacccgaacaaggaccaaggagtaagaaaaaaaacgaaagagaataataaacgaaaaatgatggaagagctggaaatatcctccaagttgcactctacgaggtgttctatctctctatttaatttgtttttaggtggaggtaacgttgatgtacgaagtggtagtcttactgttgtcggcgcacgtgaaggggctaccgacggagccagcggcgaaagcgttcttgatgttctcaaccgaggcgtaaagtccaagaacgaggagggcaaatccgacgaccatcatcatggcagaaatcatgtaaatgatcttgttcctcaaagttcgggatccgtttggcttctcgttgtggttatcgtacaaccacatgagtcccgggataaggatggagaacatggaggcaaagacggcaccaacgagtccgatgagctcgtcgaagaagggaacgacctcggcaatgacgaagcagaaggcaatgatagaaacaatcaacccaagccaggtaaaccagtggactgcggtagactcctggagatgtcgggtgcctctaaggattcgaacgaagcagaactttgtggaaaggtctgtatgaagagggaagtagggcgaggaaatacctatcgagttagttctcacacgctttaccaaagttcacagagcagacagcctacttacgagcgtagatgatgggtccggcgagcaatccaggaatggcaacaccgtaggcaatcttcttgatcagaggaccggcagaaccaagagcgggagaggcgatgtactgtccacagtagtaccaaagcacagaggcgacagagacgtagagcgcggtagagaaaagctggcaggtgaggacggcggaggtgtagcccttggggtttcgcatctcggagatgacgggaaggaaaccagcagacccagcgtaggcaaaaagaacgttgatgatagctccgagaccttcgaccaaagtgcagtcaccgatagctcggagtcgcttgtcgtaaggaccagcaggagcgttcggcggtcgatcggcaacaccgacggcgatcgttgcgatgaagatggcgggcaagatggagcagattccgacgtagccgagccaagagatctgtttgaacgtccttggactggctcccagaccgatgacaacagcggcaacaacaacaaagacgatggtgcatgttccgtgatcactgatggcgttcagggcgatggaggtggcgaggataccggaagcggcggagaaacatctgtgaagggcagagcgagaaaaggtgaaaccctattcggagatccggtcttgcacgcatgggttagaaagaaacagatacatactcaagaagccagaaaccccaaccaaagagctcccgaccgaagactccagcgatgatgaagcctacgtctcccattctacacagtacacagggaatcgaaggatgagctttgtcctgacttttccacagacgaagatgagaatgaacatacgtgtgaacaccagggtggttctgaccaaactttccaatgacgacacttccaaaggtggccatggcggcgataaagaggatgatgagcataccgggctggagtgcggcagagggaagtgagaaacttggttagtaaccgggaagagaaggcacgggaacaatcaagagaccccaagaataggattacttacaaccatgccgctgaaggaaaggagaagaaggggagagcggtaacgtttgtttagccagagagaagctgtattaaatgaacacatcatgtgcgcgatacttacagtgtgttcaacaccttgggcaacgagagaacaccgagtccaatctgttgcttcgtgagaaggacaacggctccgaaccaactgacaccactgtttgagataggaaaattaaaaaggaacacaacacaggctgagtgtccataatcggaggcgcttagctcttttcaacagggcaacttaccggaaatcaggtccagactcgttgacctcgaaaacatcgtgtgtgcgcacgtaggcggtgttcttttccgtacccttctcggtatccttcaacggggtgggagagactgagtcttcgtcgacgtcggcagcgtagacggtggaaggctcgacggccgagggtttgtcttcgaatgttgccttttccatatctagtgtatgggtatgtgtatgagtatatgtgtgtgtgtgtgtgtgtgtgtgtgtg

SEQ ID NO: 1108 - DNA, 61534 bp, Xanthophyllomyces dendrorhous
gtgtgtgtgtgtgtgtgtgtcgatcaaggaaagcaatgatgtggtgtgggaatgggtgactatgcactgtgggtgggtgacaagaagaaaagagaggaccgaaaagaagaagagagagagcaccgacgttcaaataagactcctttaacgggacggaaatcatatcgcaggcgacgggagaagagctgggcaggaaaacttgatgtgccaaaaagaaagaagaaaaggaaattgaaaaaatgatagtaaagaatttgttaagccgaaaaaagaaggaaaaaaattttctttttccgccggagcgtattgactcctggatgctttgttgattctcgcccgttcagtcaatgcttgtactaagtttgtctgcctatgtctgattgtctcccgaccgctttcggtgctctttatcttactctagctctttcctgtactgtccaatcctcacatgtatattccattcacacacaaacgtgttctcatgtatacccatggacacccgtatacactaatcatctcactaacgaaccctcattcattcactctcacacacattcactttctagcccacgatggctctgtcgtggtcacaacagtccaaagacgggcctgacccttgatcacaaacagcgtccctgactgagcctgaccacgacgaaacaagcgcgtgaattctaaacacggcctcgttggtcagaaactcaatcgaccaaccggagctccgaaacgagatctgagggatttctaaatgggataaacgctaaatgcaaatagagatcgattcttcaaatacattgagcggagtctccaaagaacggtcaatattcatttgatcatgcccacatttgatcttatccctcggcccgttcggtctagatacggcctaggcacggctgagtttcgctgctgcggatagtcttttttcaccctctttccagcaccgatcgttcagattcttggcttggaatattaacaacctacgggtgacgtcaccgacttggtcacacgtgaccttcagtttcacacccggatttccatgtccgttcgatccgttcagtcgccggttacgactttgcttacgagatctggttacgttcgatcctccaaagcgttacgcacccactcacccacatagacgctgccgtcatcactcccctcccactcgtctggccagctctcatccatctccattgcatctgcttcacctcctttgtatcttgatcaccttgccatcttcaagcttcatgaacactatgtcatcaccatcatcatcgtctacactaccatcaccaccatcaggtccacctatcaagaatgctaggcttacccctgaactcacacaaccctacatcgaagctgggctgatctcccagtcagacatcgacacgttcgcaaagggctttaaacgaacaatgacctagtggggtcctttccagtcgttctttccctattcttggctgtgttcgattgatctctcaactgatctctcgttatatgatatttttttcgtccttcttccccctcttattccctcgcatagctccaccatcgggttctgtatcggttctctcgcaccggctccgctgatatttacaaaactgaagacgacgttcctccagaggctcttgatcggaactgcaggaggtgtcggtggggctgtcaccgcgacctctctcggagcctggagaatgcatcaggatctcaaggctgcgtgagtgtctgtcccatccgttcatgtccttacacccggtgctggtgatgcttacctcctcttcttcttttgaattctccttccttaccacttacacctctacctcaggggaacacccaacattggtcaacggctaatggtgtaccaggggctgatccttcatcagaccgatccgatcaagtttcctcctcctccactggatctatccatgcccaatcggaacccacaacaaggcttgggaactggaaataaaccatttcctatgccaaaatatgacgatagagtagattcccaaggaagaccattccctcagcctcctcacattcagaatgagccgtccaagcctttctctcagacccgatcagaatttgagtccgatagtgacgacacccccgatctgagggagtttgaccgggaaaaggaaagagagaaagcgttaggtatcataggtggtggaagattaggcatggatgatggtgctgactatggaagtttcggtaggtcccttatattctcgtctcctttgccttctctcttcctcttgtttactttgacatcctcgcagatcgcgcgacaaaagagaaccccacatcctgggcccttttaagatctcgatcgtcccccggcacatcctcatccctgcccacccctctctcaacctcatctgctcctgtctcagccgagttttcgacctcttcccttcctcctccaaccattccctcctcctcgcttgacacgttttcgacggcttcttcttcaagagatcgaccgatgaccgatagggagcgagaacaagcagaattcgacaggatcgtcgaacgagaaagacatgcggtcgacaccggattttcctcagctagtccctctacgggatctagctggggtgagctcagggagggctctcaatcggccaacgcaggagcttcgagaggagagagtgtttggtaaaagatggatcaaatggcgttcggtggatttaattttcccatggcatccggtcgaatgcgccatgagtgtcaactaagaacatgagatgaatcaaacggactctgagagcgcgcgtgtgtgcactcacagagtacaaacagcatgccttagacgccagatcacatgactgggctgtgcaaccatgtttaaccctagccttggatcgctcacctcttatcttttcttggcctatagggatgctaagaataaggatttcaaccacgtttttgaaacacggtgaatttcatttcttggccttgtacacactagatgaggggtagaaggggaacgaacaaaatacgatcatgtgtaacagaaaagaggagaaagaggaaagaagagaaaaggaaaattaatcggacgatcaatactgattgatcgacttgtcttctcgtatagtcccaaggttctttttgtagttcatcgttccatcatccattcattcattatctattcggatcgtcaacacaatatggataacggtccttatacacggccgactgatgtagtgcgttcatcatcatccaactcttccacttcatcttcccaattatatccttcgccatcccaatcccaatctcagattgggactcagtcgggttttcggccgtcggcggtcaagaaacagagacaaccgggcgagaaaccggcactccgccgaaatcaagcatgtctaagcgtacgttctatacatactcggcacccattcggtttgaacccccttcacatgcatcgtctctgtcagtacagaatagagaaagatgtttacgcgttctacttttatcattattattattaaatattcttcttccaattcgaatatgaatggagagtagtgccggaagcggaaattgaaatgtgatgctgttagacctacgtgcggcacgtatgtccatactttccctgtgtttggtttctgtattctaggtctgacttgaaagaagcctctcctcttcggggaaggggatatgtctgctcggggatatttgtagatgtgtccgaagtcacaattatgcctttcgtgagtttccttcgtttcgcctggcgattcacccgactgtcgtttcggatggcacaacccggctgacgaacatgttgatgttctctcgaatactctccgacgggcaataccaaatagtacataacaagaacaaacagatcccttcagccatgcctagctgtatatacgaagaagaatcgagtgtgagcacgaacttcgagcccaactcttcagctctagcctctgcttctggttcaacctcgacatcggcgttggcgctggcgacgatcagtccgacggccggccattgtgtcaatcgggctgagtcactcataccaaccatctcagaattccaagggatacaacatcaatttcctggtatctcgagcgaaccttctatacgcgagcaaggagccaagaccgacgggtatgactatcgcgcgcagagtcctacgctcacgctcgggttgacagagccgatctcctccagttggacacaccccgttcatatcacagtaccaccaccaccaccaccgttattgtcatcgtctccatcgttcaagtctcttctgcgggatatcgatcaacgaccgttgtcggaagctaaacccgatacgtttttgttgaagaacccgtcggatcacctaccatatactgaaagacccaatatcaacgatccctctccttatgttcctcccatatatcaaaaacatatcggtgcggaccaaacagtaaacccacgagaacaggtcgcacctaaactggagcgagaatttatcgagggagaatccacggggacgtttcaagaacacatctggacttcgtcaacggctgacacaccaccaagatcagccaccttcggacagtcaaacaagattgaaacaggattgatatcgataaacaatccaagcgaggtactgaatgatcaaacgtatgatcgggaaaagataaacttatcagcgaatgaggaagcagagaaagcgaaccaggtgctgatgagcttgctgtaccctgggtgtgtctcgtggtctctcagctctcttccgactcgaccgccagctgatcgggcgaccttgctgacctgcttatgacctctagctggccgcctcatctccccaacccgatgatgcttgagcacatgttcgtttgtttttcttttctcttccaggcgtgcatctgccgtgtgttagccggcagacgtgtggcagacgaaccatacggaaacacaccgaaccataccaaaccataccaaaccatacggaaacataccaaaccatactgaacgatactgacctgcgaacgacattgcttcacacagcgtggagagcttcttccgctaccttgcctccgtcgccggcatcttcaacaatggccgcttcatggcccggctgactctggcgccgagccaccatgactttccacatcctgctgtgctccatgcgatctgcgctggtcagtgcgacagcgttctatctttgcggtgatcaccttgtatttttgcggcgcttaccttgtatcttttagtcgctctgacctctgatctgcggacccttccttcctgattgttcctcctggccgtttgccacgaaccgatgttcgacccttgcagtcacttctcggtttctcggtatcgtcagcagcacgccgccagcaaacacagcgttcgacggccggaaggtcgagaagccgtggtcgaggagtctgctgaacccggtggacccgaagccggtctgggatcgactgggcccgaagcctcctggtgtgctgggcgggttctttggccgggacggggactttggtcaggtccatttcagctggggaaagttgtacatccatgatgtgagctgtttatcttgtccggccatcggcgctctctttgtaggggttggtctgttctcgtttgactgctgaccggatgactatcttgcttgtctgaacgacagtcaaaaatgtttgcgtctgagtggattgcttgtattcaagctttagtcattctatcacactgtcagttgtccacgtttccatcgttcctgttgtttccatccttgccgtcgtttcttccctaggtcatctactaaaacatcatgaagacatcagattgctaccaagaagcccgttggatagaaggtaggtgctgaaagcgagcacggtcggaacaaacgtcgtccatgtgactcagcaacatgctcatcctctttcctccttctcgaacgttcactagcttggagcatgatcggagatgctgctcagatgacgagccctctaggattgcaaacccggaaatgtcataccttctcgacgaaccctaggaggggtccggtcagtttgctaccgcctcgtatgtgaaactcctccatctaactcagatcatgagatgataccgaaagctcacttctgatcttttatgactatcatgtctcctcatcgtcctcagccaaggacgaggtcgagatgaccgagcgacagaacctcttcatctgcctctttggactggacacgctcgccgcgtcaactagcggctgggcgcctgcgatcgacctgtccaacatggtgagtggcgtgtgagagggtggtgtctctctcttttgctcacccatgctcatccatgcttgtctttgccgtcctggttgcatctacttctcctcgttctcctcgttcccgtctgcgctccgccctgaccatcagacaagctggattctgaccgcactcgcgaccgtcgacccgacacaccagccgtcgtgccaggacttccagtcggtcgacctgttttcctctcatccggcagagacgactgcgtactcgctgctagtgaagagcacgatcctggtccggcgggtgaacgactatgtgcgtctggctgcggagcgagacgtcgatgaaccgacggagacggtggagttcaagcagctagaccgatggacgactgacttcaggtgcgttgttgatgacttgcagtcgaatgacgaaagtagtgggtcaactgaagtatctttcttctccttcttgttgtctcttgggtggatcggacgctgctctgtgttttccgacgcaggtctacttttccgcctgctctccgtgacccattcagaccgcccgctacaggcgatgacggaagatcggtggacgaaactctgttgagtgctcacactaatagcctgttgtgagtttgacttgtcgtacgctgtgtttggtggagatttagttgacggttctttctttggatgttcatgaatcctgtgccgacgcttctcttgcttactggcagagctatcatacaacttcacgatccatacgtaaacaattcctcgccgacggatgggtcgagaacacgtattcaggaggctgttgaatatctgctcatgatgatccatcagttacatgcaacgagtttcgatctctcgacgatgcaccctcgttcgtacagattctcataccagggcatgctcatcttctctcatacgcaggttgttatcgagagaaacttattgagattttgaatttttgatctgagatgtctcattcggtttacctgtcgcgtctcgaactaggtatgtgtttcacgtaagtcgggtttctcgccaaatcgctttctgatattcgtacaagacttatctcatgctttttcttatcactaaaatatgattcattcgatggcgatattagatggttcatcgccgcccgttgtcttgctcggctcatcagcactagtgatccctcgcctgaggtctatcgaatctctctacggaatagtatctcagtactgctgtgagagcttctttcccatctctttttttcttctcgtttttcgttctctctctttttttgccaattcaaaataaagttaacccacatgtccatgatgctgaattgtttatcttatcaacctttactctatctattctgtgttccgggtcaaatcacggtctgtagatcgacatcaacaagcataggtactcgcttgcctgtcggattgagacataaatggatcattgaccgacttgtcgctgattttgaaggacgcatgtaattgagcgacagagacgtgccattgttaagaagaactcgggcaagaagtcacagggttgaaggaggcatgggtcttgtcttgccaatgatttttatatgggtaatctgctttttattgtcactttcatccaggtttgctataagttcatgccactcattacgtagaagtcatgaagataagatgcagaagaaataacacaacaacgaatagagtgataacatgtcaagtcatgttctattcaccacgcgaaatgacgcaactattgaggcagggtgctcactaagaggttgttacatgatccaacaaacgagatagacgagcttagtagctgcgaagaacgtacacgtacaatcattttgccaaccataatgatccctatcagacttacttctcccaggctttgaccgatctgggctataatttctcctagaacccatctcgtttccgcccccgctatcaactgagcttgtcttcgatcttcctttgaactgacttcttgctggatccgctctgagcgctaatcttcgttgatggctcagcactacctgctgatggtgttgttgttgcttgttttgagaagcaggaagcctactgaagtctgagtcatcgttcatcgtcttgaaggggtgtgtgccagacgaagtcgatcggtgtggcgatgggccagattccggtagaaatcctacagaattattgagcttgggattgaaactaggactagtatcggaagggtttatgttgatcggcgttcgaatgttctgaattggtatagtgatggttgagtcgtcagatgtatgtcatcctttcaatgaagccaaaactggacttgagctctcacacgtgaagaggataatcccatctcgacagaagattccatagcagttcgaccttgttgcctgaacgaatttgttcgtggaagacgaccttgttcagaaacggattgaatatttgaatcattaaagacgttttctccggaccctacgagaaatgttctgcgcttaagctgtcgacacgaacagaccgatagaggcgaaggttagttgatcctgacgatctaacaatcttggtagatgatgcagagatcacgcatcgtaccttgtcataattattctagattgatcgtcaagtttgtgtacaaaaattctcagcatgataacgaggactaaaagtaggaagttacttaccttaagctttccatattccctttccttctccctggactgttcaagtacgtctcgaaccttgcgcctttctgtattcagatctcgttcgaagactttgggggagacctgttaagatttgtttttttaacgaccgaggaatgaacagaaactcaactgcgaagcttgtttgaaagcacttaagacgactcaaatcagcatgctactcacaatctacgaatgacattgagccgaaaggacaagaaaggctcactttgaatctctcctttagctgcgccagatcaagaaagggagacaacacataactcgttattaagagggatatatgctctcgaatgactcaaagacgcaagacaacgtacatattgcgatctccctttctagggccaatcctctatcttggcttttatgcaacatcatggcctgatacgctctgttcgaacatgagagtacggtcccgattagttatatgcgtaagtacaactgatacatgtatttgtttgacaaacgcttcctgcgtgatttgatattgccagaagctgagggctctattcaatagaaaataagaaatctcagcaggacacgcgtttgaaatttgagttgaaagttggaagagattacttaccgactacatatttccatgatgattgaaggtctaaccagataagaaaatagctcaagtaattatcaacagcccatgacgtccatatgtgcgcttcgaataaagactcacgacaatccactcaagacagacgttctgtagtcattgcttggattgagactgcaaattaccacatcatctggttccgagagttgggattcgcctacagataaccataataagagctcacgccgctaaaaaactcgtatccatagattccgtgtgcaaagacagataagtacttacaggctggacacagccgagaggacttgaaaagacgttccgcgcattcgactatatgcagccattttaagaatataggaggtttagagatgaattggtggatcagacggcgaggttacaaagtacacttactacaaaatatgtctgcatcaggtgttttcaacatacaacaaggcaattggtcgacccgaaatcttccgtagtgatgaactcatgaaaaagtgggcttacgagagcactatatgcgcaatttcagtgggatcaaaagcgtcagttagatatgttcgacaatgattgtcgatgacaagcacgtacagtggttactacggctctgccttgttcagcaaggagctttcgacaggagcttcgatagggagaagatcgaaggggtggaaggtcaagaacaacagagcagctagtgagttgatatcgaactggaggcaaatagttgaacgtgccagcaaccatcttgacctaccgtagattgttacatctcaattcgttctctgctgacattataattgagcaaaatgaatccgaggtcagaaagacacaaaggatacacaagatgatgagtgacagttaagagaaagaaattgatggatgatattggaaagctaggaacaggccaaagtggtgaagcagggttgacagcgttttcaaagcgactggctgttcttgcctaacttcatcagtttttcatctctcagaaggctttttgaatcttttcagactttcattctgattgttagtttgtcagttcagcaatctcaacgtcgtgttagtctgaacgagcgatcatcagaaacaattgtaacgagcttgcttggattcaatagagaaacgtcgagagattgacaaaacacgacgagatccagttgtccctaaggtggtcacgtgacgacttgaaaagcaacgtctcaacagaccttcaatcattctaaccatcacaaccataacaaccaaagcgttcattcggtcagatatggaccgaggtcttctccaagcatatgcgtccacaatatcccttgcgattcttccgtgggttagctatctcgcctattctactgttttgctcttcaattaaacaagctgatgttttgcgtttgataaatacatgatagaatcgtgatggggtctttcggatctctaaaggttagtctgtgccattctttataatgattatagtgatgaccagaaatgcgcagagaataccacctgatacaaaggttttcattgatccatgttgattttgtatgtttagacatccaaacgatcaaagcgccttcttcgtgagcggtccccaagacgatcgaaatccaaaaccgacgaagaccctggatcggatgatgaggatgaggacgatgaatacgaaggtgacgtcgaccggatttcgttcagtgatgcatggatgtttccaatccttggcagttgcatgctcggcggtctctacctgttgttcaaagtaagctcattcaggtcaatatcaatgagcgtcactgatgtctttgatgtttgcatttataatagtatgtagataaaatttggatcaattggttcgtaggatggtatttcactcttgcaggggtcgttgcagtctttgaggttcgttctttcttcactttcgtgtgatcttgcgtcctcagactcagagttttccatctactgcaatacacgaatagaccagttccactgtcttgaaatggattacccctggcgccgtatctacccgactaccggagtacaagatcgatatcgctgaaaactccaagagtgagtttgtttgtttgtttgatctatatgatagagacttatccacttacctccaatgtgtctaataatatgtcttatcagagtttttctcggctactttgcctttggtttccttggcttcaattccactttctctggctattccatacgtgtatgcaactcaacagaagccttggtgggccaataacgtgtaagcagatcattttcttggcgtaacgaagggagaaaattctcgagatgatcctcaaaacgtttacttctctttacggcagtctcggattttcgttcgcccacaccgccatccaacttatgaagctagactcattcatcacgggtgcgactcttctcggcggtctgttcttctacgacattttctgggtctttggaaccgaagttatggtgtctgtagccaaagggttggatgcaccggtcaagctagtctttcccaaggatccagggatgaccggtgcccaaggatactccatgttgggactgggagacatcgttatcccaggttcgtctgcaactgtattctcttgtttcctttgtatgaattttacttatgctaagctgggtaacccaacctcatacaacacaggtatctttattgctcttgctttgcgatacgatttctctctagcctctcgtcgatgcctaccgaagcctctgcgagcatcggcctcatttcccaaaccatacttcttggctacaatggtcgcctacgtgctcggtctcgtcactaccatcggggtaatgcataccttccgagctgcccaaccggcgctcttgtacttgagtcctgcgtgcggtaagctccagctgctccgtttagtaaagttcacagaatatgatccgtcatgctgactgtatatgtccgaaactctattcagttggcgcggtcgcgctagtcgctcttgtgaagggtgaatttgccttgctctggaagtggggagacggcgatgatgatgcggaagaggtcgagcgggccaagaaactcaagaaagagaatcaaaaagatgtggaggttgagagtgatagagagagcaaggttgagggaaatgaagaaaatacagaagaaaaggtggatttgttaggaagtgcattaagcgaaggacttggaacagagggaatgcggctgagaagtctgaactgatgtaaacatacaattcggtggactttgcttgcatcttgatttgctttgcgttgattcaagaatgaatcgatgattagatcaatgaaaataaagtcgtgtgtggtcggttgacaaaaacgcaacgatgatcgaatcgattacgtgtgcagtcggaataagaaaagagaaaaacaaccactaggacgacagacacctagtccaaatcgccaaactccttcttcctggcttggtcgtcctcccatctcgacgtcatccactctattcacccggatcatcaaccgattatttgaaaggctgaaagacttccaaggtaagatcctttccaaaggttttctctcttcattcagaattcgaatctctagccgtatgtatcttcgtcggcggtgcccggctaaacatttaccgtttctgctcgacaatgatatcgtccgttctatccatctgttcaactcatgtcagattgaaactttagtagtacgtacactctctcctggtcttccacatacattcacattcggtggatcaatagaggaagccaagatcgttgaccttatgtcggtttttgaaactcctctgacagacccttacatccaagttctttacgccccgatctatcctgcatctcttccctccagacactctgggctacctctaactctcaaaacaactatcatgtctgacgtcctgacatccgcatctccacccatatcaaggtttctgctgatttctgctcctgtagtagctggcgcccgaaagggcttagagatccttctctggagggatcctgagagaggctggagttggggagttatcctcgcatggtgggtcgtgtgcttaggtggaacggagattttgaagtttgtctatctcatttatttctatcaaagaactctactcgttcttcagatagctcttcactgttttctcaaaaagagtttagatgactgattattcatctgtttatactttccagatacttccttccgccactagtgttgttaggatatctatatccgtccctccctaggctttacgatgttctcctctttcgattcaacaaaagctcttcacttcgctacttgacccctcgtccagcatctctcttgtcgaaacccgccacgtctcagacgatcctacaggcggtctcaaactactcggctgttcacgctttgctcgcccagacctggccgcctcgctggctcagtcattcgaaagaagagtgggagaatggacactggaaaagagtcttgagaagattgattgggatttgggctgtctgggtattggcaggactgatactggggccaagagtagtaagtaaaacatatgcaccttcagtacgttggcgtcgcaaactgatgcgactttccaattctcgcaagactttgggaactgtgggagcagtcattctctttctcccgtctccatatgtacatcccatccagactgcttttcaatcatcatatcacctcaatcgcctgttcctctttctttcacttctcgtcttgggaccgtcagctagcacaccaccatcatctgaaacccagctgttcgcatgggcgtggtcggcttcagccacacaggctcttttgggttcggacagtggaagaggaaggactttaggtgtaaagtccctgctaatgggtcttaggcgaagtaccaggactacgggaaacacggacggcaagaatggaggcaccgtagaatcgacaaaggaagaagaggaagagaaagaatgggaggaggaaccggtcgtgtttaggttcgaggtgatcgaaaaccagagatggtggttagctttggattggacggcgaccttagcacccggggaccggcctgtttggtatgtgtagctcaacctgttcctcttaaagcctgtatgttgacctgttgatctcccggacggatttatgtcaggtgcgacacatacttaaatccaacccccgcacccccttctttcaccctccctctggcgcacacagtgactgtgcccagcactacccggccaaactacgatgaagtccgaacggcatcctggcgatgggcagaggacgaatggtcggtcctacgtaacatcgaaggccaattcaagtcatcttttgtgcctcctaagctgtcagaaagtccaacaaacgcccatcacccacttcccgctactagtggtcaaccttccagaaaccctggtagctcaaatggtgtttccagtggaaactcaagtggatccatcacgatatcgaataggatgtctttgggcgaacaagcgctttctcgtggtctcgaaaggctcaaagcagccacaacatcagctggtccttctgcagctcatcctcctaatggatcgtcgggctcaacttctacgggcatagtcggatcgctcagcttctctaatcttaccggtgtcactcatccggggggcacaagccaaagcccgacttcccaaccgaaacgatcgagctcaatctcttccgcgctttccatccccagttcaagttcggtagatggagagcgcaaaacattgttcgcgatgagcctccagggtggaggcgaggtcttagctggagaggcgaagaacgtcgtcggaggacatgggggggcattgggattaggaatggtcgaatgcgaagatctggaggcgaggactgatgaaatcggttggagctatggcgggaacaaatgggagggcatgactgccaaaggaggcttaggaaagttcacccgtcgtcgaagatggactcgtaaagcaatttgtaccgaacacgtcgtccttgttccgtcatcctacaaaatacccgaagcacccgcccgaccgtcgatctcttcagtcgacacaaccgttccatcagcagcacccatacttgtttcccatgatccttttttgacttccgcggttacgacctcatcggtgtcgattcactctgcaacggcggcagggacgatgacgacgacagaagccggtaacaaagaagcgatggcaacgactacggctgtgaaagagcctgtcggagtggctgtgccaagaccgagggcaggatcggaaacaggtggaggaggaatcaaaggagaggtcacgaatgcaggtgcatcagcaggtgacgcactaaaacttcgactgaaaagacttgtttgatatgctcatcaagtcctcaaaagaaaagggctttcttcacataaataaaatgacaagtatgctcattatgggcactttgtattcgatatcatgattcatctcatattttgatggacaaattctctactttctgaaccaactctgcatccttcttctcctgcaccctatgcgtctgttcgtcattcgcgccgccctcctcctccctcttctccgagctctctgccactgcggcggcagcagcttcctccatatcaccttgtttgccctccgctctccggggtttgaaaagtccagcttgacgaacatcagaaacgatatcaaggaccctgttcctcgtttgagtttcttgctgcggtgtgaatgggagtcttcttcgacctttgtagagagaagaataggggtggttcatcggagagtaaggttaaagacgattaactatataggatgaacgcaagatgaatagagaacataccaatgatcgcccatgatcgagtagacgggattcttaaagcctctcgttcccattcccagccgcatgaccagcccaagctgcggtgatgcgaaaaggtcgagttttattcagagtcagcgagacctgggatgagaaaaagagaaaaggaatagaaaagagaaggagctagcgcacccagccagccaagctagataagctccatatcgaccggcagaggcctgtcctaagcttctctctacgtccaattgggatcgaccaggcgggacggtcgcttgtggaattgtgtacttcatctgggtgaacttattgctcagagtgtgcctgaagggaggatgagtagaacaacgagacatgacgttaacagaagagagaagatatgtatatcagtagaattagaggagacttgcagacaacaggggatattgatgaaaccggattcgggcgttaacgcagcaatgacagggatccaaggctatcatcggaaagcaccaacatattgagttacaaacgaatcaaggaagacggtgtcaaaaagagagaagagtaaaatcaacctactgtcatctcatcagcgtgatttccgatgaaaaacgagcccttctcgaacggcccgaagttctcatcttgacagctctcaagcaacgccgtcggattaactgcgtgtttcttcagacgatcttgggtggttgatgggtatgctgaccatgtctttctaggtcgaagctcgagaccttgtccgacgtatccttccgaggacaggatatgaaccaactgtcatgatcacagagatattcctgacttgagaccaaatatacaacgcatgggtgcgatgaaagcaggaagtacgaactagaccatttccgcagccaacatctacgaagccaccaggaggagccccccagctagctcggatatcatctttgcccttctcttcgggcaatatgagcgcctgtcgaggagttgagacagccgggtatgtatccttccagaggaggatcaaaaacgtcgcaatggcaacatcctgtgcggccaagggacgcgcgcaagtacaaaagatgagacaggttgaatagaagagatgatccagagcaaaaccgaataagaagagggagaacgtactttccagacatgtctatcatgagaaggtacgcaacttcgtcagcatctttggttattagagggagaaaaggcagtctgacgttgacaaagactgaaattgaagagaaagaaacactggaaaacaacgaaatcaagaaagaacgacgccgatcaaactaacctcttaacgtcttcctttccggctttcgattccgagatgactctagactccagatgagcgtatttctctttcaactctaggtacaagtcttggtaactgtttcgttcgacgaccgtctgcaaaacccgcatgcgcgcaaagaaagtcaattcgtcttcttgtagattttgcagacgactatcgtgaagcctctgtgaaacgcacatcgtgttgaactcttttttcatagccttcctgaacgccacgtccgtttctataagtcaaacctgtgattatgaacaaagtttgatcagaacatgaaaggaccagcgccagatcaagacacagacaagcgagagagcaagaagagactcacgaagcaaatttaggcatgtccggtagattttatgattctcgtcaatcttctttgagtcaaacagctcgacggagatcacaaggcgtcctaacgtcgactgatccggctcgtcatccttggcggcgaggtaggtaaacctgacttttttaacggctgggtgatagaacggtatatcctgctctttattgaccagacaaacatactcgaccacgccatgttgcccttgatactcatcttgactgggttctgatcgatggaacactacgagttggttgagagctttgtctcgcttgggctgccgaggaaggagccgacggacgacctgtctgaagggtttataggacagtatttgcgcatgattgggcaaggcaggaaaggaggctgggtctgagagaagagaagactcggagagaatggttgttctcagaataagagtcgaatgatgttccgggtgaaggacaaagagcgagagagtttgaaaaaactggcagagttagaggccaagagaataagcaccggtcgaagcgagtagaaatagataggacacaagagacaaacgaacgacagggagagggtaagggaccgggcacgagatgatttctacatttctcccaaccggttcatccaaggacgaggcgagcaaactggaaggcgcaaacttgtgaggctctggcagatgatcctctgtatgttcagcagccatgatgaagaaggctgatgagatttccagattctttggtcgagcaacagtaaagtgtaggaatcagaaatagctgggtatcgtgcgtaggctgcttagtcatatatacacagcaagtttcacgtgacctcctgtaaacgtcatcaggtcgcgtggcggtcggcgcgtggagagagcgagcgcgtgcaagcccgaacttaaactccttcctcttcggcgcgtccgatggagggcagagagacctgctcaaactctatgtgaccgggtcctgttcttgctcacctttctgctttgttttcaacacgtttggatctagttgagcatcagattgaatactgggtcgttagaataaccttgaagaagcttatttgataagaatcacactcgtacaacgaaagaaaggccgctctgatccgatgtattgcttgtctcgttcgatcgggaatgacgcccagggatttgacaatctttcatatgattaggctccatcgagttggggattgtgccctgtacagttccgaccagcatcgtcccttctcttcaggccttcttcctttccttccgttcaccacctatcgctgtcgttcaacgttgtcgccaccacactcataccctcctctgcccgtatcgatagctcgatacgctcgacttccttctcgagacatgtctgcttcttactcgcttcctgtcacagactctctcgctcatgatcggaactttacaagcactactcactcgtccgtaccgaccgaggagcaaagactgatcaaactatcgtctgccacagatgataagaacatcctggttgatggccgggatcaacttgagactggatccgatcctgaactcctccgaatgctccaggtcagcgatgatgagctggtaggcgatctcacgtacgagcagctcagcctgtatgaaaagaagagtgttttggtcagttgcgccctgataccgatctgttcgatacacccgtgcctgttgctgaatgtacttgtcgtatcggcctcgattcctttgaaaccagattaaccgagaactcgataagatgaatacttttggttctgctgggctaggccgctatcaggtagctcagaccacccttgctatttctcgaacgcattagagcttctgaccaatctggctgtttcccgcttccgcttgtagtggtgcatctttttactctgcgggtgagacccgtttctttcacaaccctcactccgtttctgtcttagaatattcttatctaaaatctgtacctttcccaacttcaggttcggctactttctggatcttgcttgggcccaggcatttggactcatttcaggtgccatccaacaagaacttggcattgctgattccaaaatcggagacatcttcgtagccttctcggcaggtctcactgtcggtgctttcttttggggaattgcagccgatgtaattggccgaaagtggtgttcgttcttcaatctttatcatctttgagataatattcttgacgatcctgattgtgttctttgatcactgccacaaaaaggcttcaatattacctgtgctatctcatcgtacgtactatgtcagttgcagattgatcacgtactgcgcctatatctagaaatcttctttcctttcattttctctctatccatcagtgttgctggcttgctctttgcagccccttcaaattttggcgctctatgctttctcatctccgttgtaggattgggtgttggagggtaagtcttcaactcgtgaacagactctctgggttgaattctcatcagatttatctgcatatatcaagaaatatcccactagactcggccatcgtccttgaattccttccgacaaatcgccgattccttctcgccgtgctatccaccttccagccgataggtgtggttgtttcatgtggagtcgcctatggactcgtaccaaagtactcctgtgatacatcgttaccatcctgccaaggtggcgagactccatgttgcaccaaatcatctaacatgggttggagatacttcaccatcacccttggggtcattaccttcctcatcttcgttgccagattcgttttgtttgactttcaagagtcgcccaagtcagtaactgtcctcgtcttgtttgagctttgtcttgatgttcaaaacaattcaaaatacaacttttttcaccgcttcattcagatttttactttccaaaggacgagacgaggaggccttgcgcgtgctctacaatatcgccgaatttaacaaagctcctgtaccagatctcacgctcgaggatttccatgccctggacaaggcagccggcgtacaaaatatcgagactcacgacaatacgcagactggagtcaaaacaattctcctaaagggcctggtaagtttagccattcatcatcactcatagttgtgcgcaatgtctaaatgtgtgggagctggtaatcttgcctgaatttttttttcattcagaacaacttttcacacctgaaaggattcttcagttcaaagcgcatgagtcagtgcttcttccttattttctttgcaatttatagctgcccttgttcatccgttttctttttctttttctcatcccctcaatttactctgcacatctagtctggttgactgtttctttatggatcgcctacgtacgcgtgaacaacaaacgatcttgaaatgacattcaaacaaggctgacggaacgtatatggctttttcacttcagatgtctttattcttctctttctccattgctggaggatatcttccattaatccttagacagaaaggaatcgatacttcgacgtcaatatcgtgagtttcaaggcatcataactttactgaagctctttggctgactcgtgtgttatttgtttatgctgatatcagtgtaacttaccgaaactatattatagtctgtgagtacgtttgtgttttgtctcgaattgcttctgtaagactgattggaccatgacttccatttttcgtgaacagaccttccaggaacaatcgctactattcttgcaggagtgctcatggaaatcaaatggctaggccgaaagtgggccatggctcttggaggtatgttaattatttgattgttctctcctcttcccctttattcgagtgattatacatggattttgactcatcgaactccatcgatttcattttagctggattgatgggagcatcgttgttcttgttctcggcggtcagtagcgtggctggtttcgtcggctttaacttgatggagtactttttccagtcgttgtactgtgccttgctctatgctttcactcctggtatgatttattgtttcttcaaacatcgttttctcactttcatctcttgctgatcgatccaatgggtttcttcctatttacgtcttgcgcagaggcattccctgctccgtatagaggaaccgctagcggaatagcttccactttgggccgactagcatccaccgttgctccctttgcggctggatcgatctttaaccctcgatccaatggagtgctgtatatggctggaggagtaagtaattttcgatgtctagttcctgctcgtagatatgctctcatcgatataggtccctaatcgggtgttgtcatctatgcttctctgcaacaggctgcatttgtatcgatgctctctgtggctacgcttccttgtgagttaatttctgattaaattgctcgaaagagaagtccgtctcacctgatttcttctttatttcctatcataaccattttttagtcgagactcgaggcaaacatagtttctagtagcattagctatataggcccaaagttttttttttcaataccatatatagtgccatctttcgaagaaaattacacatctcatttctacacgtatttcagtgactattcgcttgcaaagacgtgttcttatctctgtatccccttgtcgattgcattgcgtctttctgggttgacctttgtatataaatatatatttgtgagaaatcagatttattttcggcagcccgctcgtcatgcatatcaccggtctttccttcttcgttgaagcgcgtattagatcaagttccaaggcttgagacagagaattcggatgacttgaatgaagtagggtgcaaagatcgagggaggcaagcaaagagagtagagcgaaagagtttgaaggaatgagaatatgattcatttttggaagaaagttcaatgtccaaatgagagtcgagagagaggaaaaagaaaaggaatatgtctattgatcgtagagtggttcgtacattgattattggaaagaaaagaaaaaacgtgatgaaagaaagataatgaagtatgaggggggtgggttcattagtcggacaactcatacctaaatcaaccgatcgacaccagggcagaagacgatgacaccaagcatgagtgagaaagaatctcaaacgatagaaaggagcaagaaaacaaggaacctacgggcaaacaatgttactgatgtcgaccgagctagtcgatgaaccaaccactcctgtcgctttagagaccaagatcaaccgaagatatagcgtaggtcttgtagtggcgccagtagagtctattgcggcacaggcatcatgccatcgtacccctttgaatttagaagacaagggtcaaattcaaagggaatcattgattcagtctgattatatttctatcgttgaagaagaagaaaatgacgaaaacatacaagtagtctcagtagaattgacggcctgatacgagatctcaagaggcatctcaaacgtcttgagggttttagcaggaaaagtatctttccatgatcctttcccaactttcttgtctgtcgaaacatcgtacactgtcgcttgaagcgatgttacatgaacaggtaagtacgtgcctgctgtgtcggctatttgattattttcgattcggtgagaagaaaaaggaggacaacaagaaagcgaatcaagaaggacggtcagggagagcgcacatagaacatcagcaaagcggagaagaactgagggtgaaccttggagttgtactgagagaggcatcgagaaattagcaggaagggtcgagaattcgatcgaatcgtttgtagcatcggagggcatcgtgaaaggctgtgtaaccgtgaatgcatatgatggcaaacgagggattaagaaatagagcgtgatacccaagctgagagatgttgttttgttttgtttttaaacgcgaattcgatcatccagaacgagttggcggtcatgatcagcttatatagcagggagactcaacggaggggagaggaagacttaccaaatgaggaatatgaaagtaaagaagattaagaatatatgaagtcgaaccctcatacagacccgatggccgttctgcttcctatgcagaccccatggcatcttttctttcttttctctgttgaccaacaaaccaccgaatacatgtgtacatatatgaaaatctctttagcttgatcctgtcagagattcttcggccaagaaggacgacggagttacgaaccgattcagcagcatcggagctgtatcgtaccctgctgagagcctgtctttagctgaagcatcactaagttctcgataagtcgaatctcttttccactcgggagcgattggaggaggaggaggggatgttgatacaggaggaagaaacggttgaccgtcacgttccgagtacctcggtcctgcattgttgaagtctagatacatacccatacatacgagccagaacatgaaccggagcccgttagctgattctatatcgatgaaagatgatcgtgtgctgcatgttgaaccagcaagacaacgaaacgagtataaaatactactcgaacgtaccagcaaacacgtcccagctctctgccgggcgatcctcttcgtacctctccctttctgccgactgaccgccgaccaaacctgaggaagaggcggcaaacttatcaaaatcctgagaatgacgagcctcgaacgactggagcggtatcgaagcatacggttgtgaggacgacatggggctgcttgatggacggtcagataaggtgaggtggacgtttgtgaatgcgtgtggcagcgcaaaaggagtaagcgactgcggtgttgattcaggaaactcaagaaagattagataacgcatgaacaaccttctgtctagccatcattggaaagtaagttcattaaagagcggtcgttgtgtttggtacagtgagagtatgcagatatgaataactgatgagaaagcagaagaaacagtgtcctattgtacaaaaatggtggacttcaaggagaaatgaatcggtttcgcagatagtgagatagtgaaattaggcctcgtcaactgccactccccttctccatctatcgaccttcaactgagagggcatgtttccacccatcatgcccggcatttgtccctgctgctgctgatgccctccaccagggaacccttgcattcccatcatccctggccctcccattggcatgcccattcccattagattcagactcatcatcgactgtcgggccatcatcatctgttgctgttgctgcaattgggcttgttgttgataatactgctgttggagatgttgagcctgagtaactccaagtggaaggtcatcgtcctcctctcctgttcttcctcctcccgcaccgccatagccaggttgaacaagccgcagcgcaagaggcgcatcatcatcgtcatcgtcgccatcgtccctcggagcaggcaacgacgcgctccctcttttgggatggctcaagtccgaagttaactctttcttctccttcaatcgagctagaggctcttcatctgaagaatcatcttcctccctgttctgcacaagctgagaagactggatggatttggaatacggtttcggttgtattcctttcgccaccagctgactcaacgggacttcctcatcagacgaatcgtcgttgtctgatgcgggaatggatcgaacagacgaagcgacaggtttccgtacccggctggaccgcccaggttcatcctcatcgctactcagatgccaatctgccgagcgcatccgattacgttgagtgctacccgtttgaacccttgatcgagcctgcggggtggtcccttgagtggcctcttcattaccgtcgtccagatccgaatccccttgaagaatgccctgaatgtcgtccgaggtcgcgaaatccccgacaaagttatccatcggaagctgagcgattggtctggatcgaacgacaggaagcctcacgctctcggccttcgtaggggactctggcaagggagttacaatcgctttctcttggacgagatcgacctcctgagttgctgcagataactccgactcgaacgaagggttgttcacgtccaacatgggcaaagaatcagatcgtttcccaccgaagcgtttctttcgtttttgctctttaagctgattcttcaacctctcttcttcttctctgatcgaggtttcctcccgttctatcctatcggctatctctcgctcccttgattccttctcccagagagcatccacaccaaagactgatcttgttttccgttcaaggcctccagggcgggagggaggatgaagagctccctgtggatcggtatcagcggcgtcatccaggccggttcgatagctaggaaaggtaggattaaggtgaacggtttctggtcgaatagaaacaagcgtgttggacgtttgggatcgagtgaacatggcaggtcgagagtctcctcggaatactctatggggacgtcaacaagtttgaaccaaacgtcagcttcatgagcccttcatcgagaagagtgctgcataaaatgagaagagaagagagacaaaaactcaccgctgtttagatttcaaagctgcctttctctcttccaaaacttcaatcaagctccgtccgtagagctgaccgggcgccctgtagtcatcctcctgtctagccatccactgtttcgccaatatatcctcttccgtttcatctgtgtcctccggtctgagagaggccttctctccctcctccagcgcacctcccaagaaacttgccggacgctttccgtcaacgaccaacgatgctcgaaatgtcttttgagcgagagaaagtctgttgtttggaattgctaaagccgctgctgaactgacgaatgaggttgctctccctaattgacgaggtctcgtgaaatctgctgggaagggcttctcctcaacttgaacaaaccccggtctagagtccacagagactcgggccgcagaattggggtctagcggagcaggcatgatcaacatggctgggagatgaatggatgaggttgcagtagtcgccaaccgacgagtgtttgaaaaatgagccaaagacgagggcctggtctttggttttcccggtcgtcgttgttgacgagtgtctatttcttccggtgggtgattattctcggatgaattttgaagaacagagtctgccgaagatttgataagctgagattttggatcaaaccgagaggctcgtccgcttgtgggaggtggcaaccagctctccctctccctttcattctcgtcggcgtcgtactcatcctcctccaatcgagcggcttcagtctcagctcctgactttcccttcaagttggacgatcgagtccgagctctctgtctggcttgggcgatctcagcttcatcacctacatgggatgatgacagcagatccggcgtcatcagtccgatctcgtccatcagactcatcctcgacggcgctctctcctcgttctctcgatcttgaccttcctgctccgtcggcgatacgtccaggagttcctccttgttgtcagagtggtaggaagacaatctaaccctggagtcgagcgaagcgcgagacgatcgctctcggttgtgtatgtggtctcctgtcaagctcatccgttcagaatccagagtagacaggtccgtttgcacaggaacaggttgagtttgagacgtcctggcgagcatgttgagttccgaatttgaaccgcctgagagaggtcgacgtgagatcttttccagaggagatgtgattccagaaagagaaacttgctcccagttaggagacataccccgctcttggaatttagagagactcgagtcgtacgaggtccgggaagataaagtaggaatcgtttgagaagtcggttgccgagatcggttaaagtctatctcatcgctggttgagggggtgaggaactcgagagaatcgctctctttgttctcagcgggttctccaataaaaacagcatcaggattcaagctcgacacaggtggtagttggggagaagagacagaaggtgtccgagtgctctctcttgtctcagccctggtagtggattgattattatcgagccgcaggacacccatctcgttctggttgagcgaatggccctcattgaaaacgaaagcctcccaatcacccatacttcccgtccgagatttaggatgagcacccattcggcgattcatcgaaggcggatctccacccaatgatcttgggagcattgatatggactctctcatcaaggcagcctgcgtaggtgacatcggcgcttgagacgatggaggaagggcttctttttctcctgaaacaccaaacaggaacgaagaacgtcgtcgtttcgccttcgtcttggatttcgtatttatgattgactcatcaaatacgggcacgttgaaaggagaagtataccgttcgggcaaaggaacactacctggtcggtcagaagcaagatagttgagcgggatagatgtcatggaaagcgcagactcagacccttgtcgatttgactgatccaagaatgttggagaatgcacgggagctatgtgagatagggcttgagaagaatgtggtctggaagggaccatgactgatggtggcgaaactatttcgaccaagttctcattcgtcgactgttggtgttgatcctctgttgacacaatatcggtctcgatgttccgtccccaggacccaaggagagtagacttcggtcgagtaggtttcggctgttgaacgatctgagtgatgggttctttcctcggtgtcgtggcagtagatgacggctgctgtaacgggttggacggagcgtaagacgttgtgcgcgaacgggatggggttgaaggtgagccctctcttgctaatgcttcagccataaagggagaggccgaccggcgaaaatccataggagtcgaaggtgtaggggatgtttgagactgtctctgatgaacatgcacatggagtattagtcaaatttagagaatcatatggagaacgttcgtctctcgcgcattcattgactacgctcgcacgacagtgcacgtatcttccatccgaagacaggccggacgctacaagggaacttgaaatgaactcacttgttcattctctatctttcttctttcttcctccgcctgatattctcgtattctgtactctcgctcctcgttctctttccattctctctccagttgatcttgctcccaggccatgctcttccgcttgtattcagcggtgagatccttcgggggttcctgtggggcatttcccctgatgatggctgattgagaggcatgtttgagctctgttgtgtatgggttatcgttgtcgtattctaaaccgatgacacaagacgacaggatgagaagaacagattaggaggaataaggagagatcaggaacggaaagaacatggagtaaaatgccccaagttagtttctatatcaccaagcttgagccgtccccaaaaagatcaaggatgtgccaagaaaggacgacgtttgagggctcgaaagagaagaagatggcagaagaggacaaacctataagtgctgctgccagctgcactctggacagaggaggggccatagtcgattgatgtttgtctctgaaggaacgagaacttggtggctagaggaaggaagaccaagtgttgagctcaatcgagatgggtaagatgttgcccggcagatacgcattccgcagtcgatacacctttgcctgctctgtttggtgaatcacttgcaacatcgcccggttgagttggctggctgggtggcttgcttggtcctctgaccccattcccaacggctgcgctgtacatccgagaggtcctttaatatatacatgtacggaggaaggaatgcgtttcctagccaacacacttgatggaagaaggcgtgtagatgttcattcgaatcaacaccaactggtgacgatagttagggttacaggcttgagtgtgtcccatcaacagattcgtttcagcatgacgagaacgacaaggacaatcgatcttaacttacagaggacaagatgatggatgttcgtctccattgtctcaagcttctattcatcctccatgcttgtccgtgtctctattcgtcctttctttggacactgctctgatctgagtgtctgagcagtatcattctgtactgttcattggcacaacgttctgatagatatttctccttggaccaccaaaccaacatgcctggcgaacaggccgttgtattgaacatgctcaaacgccatcgcaagtactatatacgaacatgtgcgcataatgttcccatcgatctgactggcttgagaagcaaataggtgtgagcaacctaggcataccttaagtaaaccatatacacatatacgaatgtacagttatcatctattatgatgtcaccatttttcctatcatttgcttggactttggtcggtcgactgagcaataccatcatcccatctcagtttgctaccttgccttctatccctgatctagagtgtatcggattgcattcagtgtgaggatatcgaggacagaacgacagaacatacacctagagactcgtttcggcagtaggtgtctttattttttctttcttctctcgcttgttcgcttgctttcatcattctccgaagcttaccttctgggttgactgcgtgtgatgttcttgtcgcgaacagatacacaccctccttcgtcatgtccaacccatctggatacggagatttagctttgggagcccctttggcaactcctctgataaggaaagacgaacatccggatttctttcctgctcaagccccacttctgcaatccacaaccgtttctaccgtcgcggacgtccccaatctgaccagcgagcctgctgctgctgctgcgacgacgacgatgacgacgactgatatcaagaccaccactacagagatcatctcagtcgatgcctcatcttctttcttagatcgaacctcacttgctacaaatggtcacggtgttgatggtccgctttcctcggtgaccactaatctccaaccatcctccggccactcgacagccgatcacattgaacatcaagcgctcgctaccgaaaacacagacgaggctgctgttccgtctttgacctggaacttgcatccatcggctgggtccatagccgctgatcatgtcgaacaccaagtggaacacacagatcctgagcccgcgccttcacttctgactcgtcttgcgccttccgctctgctgccttcttttgcttccgcctcctccaccgaccaaatctcactcgatcagaagctagcactcaagccggatgggcattcaagttcgatcaagacaaactcctctcgggataccgatagtagttgggtcccttcccttactacccatcttgcaccttcttctagccctctggctttcgatagcatcgagcatcaggcagagacgacaggacccgtctcgtccgaagacgccagactcatcccttctctcaccactcatcttgcaccttcttctagccctctggctttcgatagcatcgagcatcaggcaaattctcagggtgggggtttgggggatggctcttacttgcgtgatcgggtatctacccagacaattgaacctcccatcgttgccattgtccctttcagaaaagaaatctcaacccaggatcctactgcttttcaatcaagagggccattcgttgaacaagaggcggccgttcccaccagagattctaccccttcttcctctctcaacgtagtacaaagagagaaagagtttgtctctgttactcccgtctcaaccgttccgcctcgtcaagctccggcctttagcaacgctccccccaacaacaccgccttcgtatctcagccagatgtcgtggtcgtgcctactcctgtagtatccagaccgaagaccccagaggcgtttgccgctatggagcctcgagaacgggtcttaaccaagcctaacgtgatcgaacaggctaacattcccgaagacgaacgaactcctcatactcctgaacctgaagagacgttgcttgagaaactctctgcctatttgcccaagccgaccctgtcggagttgaatctgaccgctgctccgcctcctaccaccttcccacctccgcacgagcagtcggatatcgataggctgcatcctaaggaggcgttgcccgctgtgaggccagacgtggtgactcctgttaacgcagaggagagagatagagagctcgagaaggtcaaagccgcgaagagagagcttgagggtcacagcccccagggaacggtcgtgatggggttggaggacgaccagctgtggtcaatgcttagaagatttgatcgagttcgtctgctcttcccttctttcctatttttgagctttgttcatatatcgttgacgctagtttcaatcgttttccaaacttgttcttttgactctgggaattaaagcaagtcaatcatgctctttcccctcctcatcatcttccagagggccagcctgatatgcgacggtccgttctgccgacggtgccctacaactctgatctggtcaagagcaacttggaaagatgctacgggaccgctggagtcagcggtatccgatttttcagggagatggctcgccttatgagttgggcacctggagagcagaagagaaccggtgcattctgtgctgtgagttaatcggtcattctgatgattatatactaagcgcaaaaactgatgttcacttgctcttatcaaaaggcttactttaccgcctggatcttccatcaaacgactcccctcattcttctcctattgatgactctcgttctctatcctccttctagagcatacctcttcccacccttacctcccccttcaggccaacctctgtctgctacagatccaacgaatcggcggggagatgaatctctggtcgatgtctcacatcctcagaaacatcgatcgaagcacgagcagatcgagcagcaaagtttggagtttacgaaaagcatcgagaaacttggtattcgagttcttctcggaagcaagcacaagccatcccaggctcagatggaccaggctgagaagatgaagaaggagggaaatgccgaaggggacatgtatggcattggtgatgaagacggcgagaacgagaacgattcgaacaagtcgggtcaggtccagaacgggaagggaaatggtgagagcgagaggaacagggtcttgaaagcaggaggcacgttgaaagagtcgaaccagaaggagggagagaaggcaaaaggagaacgagacgcgcagatcggactcgcagcaaaagcattccaagatgcgttgggtgatttcgcagatgtcatggagatgttcaccatcgctctttctcccctcaaggtctaccctcccaatcatgctcggttcaagatcgccttcctcatactcttccctgctctgataatcactgctgtggtcccatctcggatcttcgcccacgctggctcgtttgctcttggttttggattctttggtcagccattggtcaagaggggaatctcgacgtttgtctcgcttgtacctgactggaaagaagagctagatctccgaaagtgagttatttgtaattcattctatatcctttattgctcatcatcttgttcgggcgaatcggtatacggattctcagtttactgacgagggtcataccatctggttcgattctgatgtacttagctcgatcctatctggcgtgccaacaaacgttcagctcactatgtacctccttcgacaacgagagctcgcccgaaacccactcccccgacctcctcaccctgtcacttcacctgaagcgcaaaagcagctcaacgatacgtcccttatctctgaagcgcatgaagaaaattcggtttcttctgtcggatcaggtaccgaaacccacctggttggtgatggtaagcacgacgaaaaccagagcgagagaggaaagaagatgaagagtaaggttgtcgaggtcggtcagaagatctcggccaaggcagctcttttcagaggacacggtaaggtcgctgtccttcccgatggtgagattccaggctcgaagtcctccgatgaggaaaagaaatctttgaggactcggctgtctaaattcttggttgatcgggatacgctcaaggacgaagggagcatctgggcctaccctgcttcctacaacaagacgaacggccacttgatcatcgaatctaccgatgagactccgacgacggacgcgacgatcatctttgttcccaaccggtctcagaaaccgacagtgactttcccgatcgctgacgtggctgaaatcaagaagggcggggttggtttacctcgatcgatccttggttgggcggccggcatggaccttggaggtactggcttagagtttagagtcaaaaagcacgaggcaatataccaaggaaaggagatcgcaccaggcgtgtatgtcgacaatgtttatttcgaagatgaggctgagagtgagatggatggtgaggtctatcagtttgaaaaggttggacgaagagatcagtacgttccctcccttcgtcttgcagacgatatgcgccttgctaacgcctttcaatttcttttcgcctttcgctcttgttttgtttcgttttgttttactttgataacatctgaacagaatcttcatccgaattctcagtttggccgaacagaactgggagaccctttaagacgacggagacgacatcactgtcatttcctccaaacgatttgaatctcaaacacgcttcattcattcagtttagttcccttcgaatgaatacattcgaatatttttgttttactttattttgatatctgatcaactagtatatatccctagttgtcactattcttctacccttccttttgtgtcaacagtcttgtcttcctacctttgtgattttatgagcatctttgttgagccctgttgaatctcatcttcgtcgtatctatacgttatgggcattttgaacatcgtatcgtacatttaatagagcacgaccttagtcgaatgactcttgatatacgcgcacagactcgtataccgactatctcatttgaaatgtctctgtgaatgtatctaactagacatcatatgaagctcaagacatgtagaacaagctacgatgcattcgatgttgagattgcagcgtgaagagcgaagacgatgatggtattattatcataaatctgatcagacactaccatctcatttagatcacgcctctcacctctgctctccctccttctgtccatatcctttctccgtcgatctgtctaggatggacaatactcttccacccgcttcttcagacgagactacgagtgatccaacccgatcggcaccccattcagggaaagcaaattcgccgacacgacctagtctcatcaagtcctcttatccatccaaccctgctatcccttcaccctctccacgctcgcccattcagatgactaaaggtctacccaatccccctgggtctaacaagaacacccagtcctatcctataaatgtcacacctcctcttcctgctcctcaacatcactcttccaaatcgacttctccgatcggttcaccagcaaactcgttcctgacgccttcaaatccaccagtgacgaatcctcttgcaggaggagctccggtggggatgtctacatctccagaaagtgtgtctgtacctccaacaaaaccaaaggtagatatcaagagataattctcatactaggcaacagatataaaaactcgaagctgatgaccaaatcgttggacgtattatcgtggggattctgggtcgaataatcgcggtgtttctttgcgtttattgtagcctgttcaatatgactttcgttatgaagactcagatacgctgatggctgagctccaggagttcttcagctatcaggaggttcctcaattcgagtcgaagctagtggcgtttgacgacctatttaaggaaggttcgtgaatactgctctcagttctatcggtcgatggaatgggattcatgggagtagtactgatgatcttgctatatcgctctcttcatagattggctagagagctcgatagagaacaggcgcgacttcgttcgagagatcttggctgggttgagtgatggcgaagacgagtctcaactaaatcgtgctcgttgtctggcgtatatcattgaaggtttgtgtcaaccgtcgtctgtctgattcaacacagaaggttgtcatcgtcttatcatgtatttgattcattgttcgaataatactcttttaggaactttcaaggaaacaacaagtccagagcatcatcttcatatcatcctggagaatgtgaaacttgtccgtgaggttgggggcctacaaaaactatacaatcggctcaaggacgtttcggatctgcaagcggaactcatgtatcttctgtccttctcttgatatttatatagccagcctcgaaagcaattgcctgacctttttcacacctctgttccttacatcaaatttacagttcgttaccagatagcgcgcctggtagaggatcgagagggccatcacctgaagtaccagaagatatgtcggctttgaatgtcaaaattgggctttaccttgaaatcatgtacttcctcgtcgaggtcacccgaggagacgaagagctcgctgaggaattgagtgagttgtccttcttttctctgcattgattcagagtaacagaatttcatgttgacaccagcttctacatctgctaatggtagtggctttggatcccccacttccggtcttttgtcttcagctgcttggtagactgaaagatcagaatttgagagaaaggcacccgaccggctaccctatgagaaaggttcgattctatactccattgtctcatagtattttctgaggcatgcacttatgatctttttgtgaattgatgcgtgctgtcctgattttagctactccttcttacttggaaaagcattctgacttgcatgggaggcttgcgggatgctcagaaggctgctgcgctagcaagagatctcgctggccttcccccacccaaagatgactgttcgttgatgtctctcgcacttcatgaggtagacaacactctcaagtcactcatcatctttgttttgttccgtattgcgccaagcacagggctggggtttactaaagcaacacccactgaccttcttcaattccggcgggagacgtccatcaaatacccaactttctctcctgaacaataccgtgaaggttcctccacggcaaccgccgagaaattggccgaagcccttagacccatccctacccgacctcactaccatgctcccttacgagatgttagagcggatgattgcttttcctcccttggccgtctagacatcacccatccaccttataccccatatacagtgccgaacatgactgcagcctccaacggaacaactgccacgcctgctcctactcctccgcccagtccgaaacccaaaaaacaacagtggcaaactgaccagctcaaaccgttcattttccccttctcgctctctgcccatggtgaccaagttctcgttccctcggctgtgaatgaagccgacaagctttacaaggaacatatatatatccctctggggctccaccaactctggaaagaaagagaagaatacatcaaggaggacattggactcggtgagaacgggatccttgggtttggagtagaaaaccggacggtagaggaagaagatgaggaaaaagaggaggatgagaagattgcaggggatgcaattatcaaacagtttagagagaaagagagagagctcaagaaagaagaagaacgggcggagaaagcaggagatatcaaagctttgaagaaagttcgggagaagaggttggcttggaaaaggctggatagagtcgagatgatttacgtttgttccctcgtatcttacttttgctagtgttgcacgtggtagcattaacactgaccatacacgcacttgaccgatgacaactttttctataatatagagaggtgtacttgccacagccttaccaagcaccgtcgttgtcctcctgaagcaaattttggcttcactacctcctcaacctgcagctcccccactaaatggctatggcaatccggccgtgtctcctggcgcaccggacggagattatgattctcgtaagtctcaaacttgacgaaatagttagactttcacaatactcacatttaaattggttatctgctcttttctggttgtgtttctgtgttatttagctacaaatgcagagcctaaacctccaccaacgttggcagagatcgatgcaaatagggagcgagaaatcttgtcgaaatcggtttcagccatcattttactactgctcaaatggttcaaatgctcacgttagtaatcctctagaaatctttcaattcatctcgtttgtactgacatgagtattgttcaatgtgatgatatagacgtgttgaaatttcagcatctaagtcagttattgttcgagatgaactgccccctaattattgttaagactttcctactgcaagattctggagatatggtgcaagccaagaacgaagacgaggaacacaagtaaatccgtttcacaacctcatggtttggttgaacctttttttatccgagactgactcaattcgtttctttctattactgtcatggagcttcttcaactactgccatcaaaacttttcccaacacgtccagccttctcagaccagcaacatttcctctaatgaatctggtccacgacgcgtcactactcgaattggacagactactgctaataaacatccgggggcgccaatggaagaggaagtcgaacttctctcaaattactcttggagaaatttctttggatctatcaatcgaatcaaaatcattcaaaaacttctaaaaggccgaacacagcaaatccaccaattcaatcagtacaagacatatgtaagtcttcagagtctccattaatgagctgtttgacgctgacattcatgttcggggtatcatttatcaataagggaaccttcaaacgagccctcaaagtccagcacccaatgttccaacttcaggtgttaaagatcattaaagcgcagatccctcattatggtaaaaaatggaagcagcgtcagtattcatcttcccctgtcatactgattcagccctaatgaaatgttactcaaatccataacggatctacgtggtaattcgcagaaaacatgaagatcgtaacagctatatacctcaactgccggccggatctgagggacgaatggctggtcaatgttttagaacaggatgagctggactggtctgctgttagttttcctgacttgtctctccgaattcttgtcttctcttcctctgactaacaccactgtcctggatgaccgacaattctgacatgattaggctcaagaagcggctcttcggtctcttgcccgcttctatcaccacaagcattactcacatataataactgccgcttcaggtggatccataggcgctcacaaaggcccttctgtcaaccaccccgtacatatcaattcggatcccaatggtcctccgttctcctctgattttcagatatatcggcgagtatcctcctctgctggccaaggaggtgacggtgaacttttcccacctaaccgaagtcgaagatcgagcgctggaacgatgccgatgagtccttctaaaagcccagaagacttcctgaatacgtggaaacatgagtacgaggacgttctggaagatgtgtttggagagggagatggtttcggaagaggaagtccatctgagggtaaccgagcttggggattaggcggtgggtggggtccgctaggaggagccatcagtcatctagatttaggcgagagctggagatctggggaagacggttggagcgatggagagagtagtgtgggcactatcggagatctgggagaaagagccaggttggatgatggagagggaagccagagtagcgagagagaaagagatgatgatgaggtggatggagaagaagatggaaagggtgaggaaggagacttgattgatgagaacaggaacaattgggaggttagtgtttgcgttctctgcccaagactctggcactgaggctttatgtcgaacgccttgctcatacgtttttcgttctcctcaattgcaacctcattatcgcagcacttgtcctctcaaactctgtccgcaatgccaaagtcacctatccatcacccacgacgacgatcttcgggaggctcgcctctcaggcctgtcatcaaaggaaatggtatcgatggaccagaactcagggacgatgaagaagaagaagaggaagagttgggccctgctccaaaaggtcctggtggaatgggtgatggaggtagtgttgatgaagtcgaggtatgtatctaacaatcttcttaacctctcttgcttgatgaactttcctcattattacggctgattgacacaattccatcttgttatgatgaactagtttatgtatggagaatgattaacctagaaagatatcacgacgtgctctgttcttgtagagcaattcaactgacataagttcattaaactccaagtgtttttgatttactattgtattcatgacacctttcaaacgaagaaatcatttaaaatcatcacagaagacattcatctgagaattgggaaatgattcaccaaccattcaaaatgactcatatctataatctacagtttggttacaggggcagagctagtttctgcgctgatctcctcggagatgacttcagatgggggctgatcttccgcctgcatttccatatcttccatttcaccgctatcctcttcttcagcaacaacttcggtagttgacccctcaccgttcccgttctgagcaccccggaacttttgatcatcactcttcgccgtcaagagtgattgaaagccagcgctcgtctctgttttcgtgacctccctcagagccatagtagcataagaactcgttccgatcttgagtctaatttgcaaagcaagaaacttgttggttccctcgccttcagcattctcagcagcagtaggaggaggatctcgctcgaggatttgatcctcatcagattgagcaagattgacatcagggtctgtgtagggaattcgggaccacgaaagatctgcaggcagagctaaaatctttcggtaagaaccggccaagtggtaatccctataagagacggaagaaaagaaacatgatatcggacgaacgccaaaacagttagtcgagatgctgtatgtcaagaaaagagtcagggaggaagcttacttttgctttttccagcattctgtctcatctagtccatcagccctaaggtaatcaacaaacatgtctctcaactttcctcccgggagatcaacttcaaatccaggaataggcatgataacgtcgaatatcgtccagggatgtccttcgatgaggtcctcggcggtgagagttttgatgtttccatctcgggtcgttttccagtccattcgacgcccacctctggttcgtttgattgaagcagaatctgtgtacatgaatttgaaaggaaagtcaaccaacaagaaagaagaatgagcgatgaagttgaagcaactatgcttcgattaacaagcgcatatggagaagaacagaccagcgtcgttctgcgtcgcttcctcagcgagcggagtatcttcctcctcagccaccacttcttcgtctggaaccatgactagatcaccaacaacgggttgatccgccccaaactcacgaattcgctccgaaacaatgatgttccagaggaacgattgataggcgtgcacgtagatgagtcgaaggttccgaggaatctaatgaatagtcggaccagatcagaaagtttgaagacgaagtacgatgacaacagcaacatcatcgagaacagaagaatgaacgtagatcaaacgtacggcaagtagagcctgatggtaatccctctcagtgacaccatcctgctcctccttcttgaaatactccaacaatgctctctcggccacacacctcttggggaatagcgccaaagccttatcagcgtccttcagtccgttccagatattccttgcagcttctgcatctgggtgttctcctggtcgtaccctgaggaggaggtcgacagcgagggcataatcctcttggagcatagcgagaccaacagagtgagtagggatatgtgacgttccgaatcgttgcataccatagtagttgatgaaccctttgtttttgatcgaagtcaatgcgttatcgatcgtggagggttcgtccacttgaacgtttctgttgagggaagacgaggtcaatcaagacatatgaaaaagacatcaaagtgagcatacatagaaagaactgagagacgcgtgtacataccgaagggtgatcaagaattcgtttcccttgagcatacctaattcaaggtactttggctcgtagcagactgaatgcgaaacgtatttacgtcatcagtttttgcgcataaaaaagaagaagcctatgacacgataagaacttacaatctccgactcggacacctctgtctcctctctccttcaaaacatctctcatacttcgatcaccatccctaccgactccattgattgctcgccatacatcaagcatggatcttcttcctcgcttgaggcagactcgttgagtagtgacacctcgtttgtcttttgtacccgcgacggtgagatcggatgagttgcactgaagcgttcgggccatgtgagcgagcgcatcttgggtatctcgattggttttatgcaaagtaaagtggatgaactgaggatgggatggtttgcggactacaaagttcaaagaacgatagacggaaagaaaacaagatattgaacaggtttgtcaatgacctatgcatcataccaagtcaagcgagataagaggacaaatgaatatacgaaagaaaaaaaccaacctcctcggtaatcactggtgctgcgacctgagctgcctttggagaacttgataatgatcggaattccttcgacagcttcattagccttttcttcttcggtcttgtccttctcctctttcacttttgtttcaagtgctccagaaaagacggttcggattgtttgatggatagcggttcgggcggccttgtctaaaataggaagtgtaatcactaatctgggatcttctgggccccagttgttccagcctccattctgtccgttctgatctcttcctccaccggacccaccgccgcccctgccgcctcttcctccacctctaccgcctcgccctcttgcaccgcctcggccgccgccacttcgacctcttccccgacctccacggttgttatcccttcctgagcctccccttaatcgaagcgcctcttcttcgtttggctcattggcaacagcaggcgcaggagcaggggtattgataggcctatccgcggaaggcgcactctctggcacgaccacagtatcgatcagatcttgagaaggaagactgttcgcaacttcagtctgtccggatcctgccgaagcgatagatgcgctgaccgcagttgatccctcaccgtcgttgttggcttcttcctcctggtccttcttggggccccatccgctgtccgactggccaacaaatgaggtctcgcctccgtacccattgggcttggttcttccggccgcatcagactttttgaaagtaagctttccctctagccagagatctctcacttccgttgtcttttctactccgagtaaaggaataaggatttgagaaaacgtggcgggccacttggagttctcctcgaacggacagacaatatccttcgatgctggaggaagctcagcgaggtaccctttttcctcaagtgtaggaggaggagggagaggaggttcgtggggctgagtgatatctttcaaatgaatcgtctggccgtcctgtcctatctcgtagacgaggaaatcagtgaacctgccatgtgggatatagcgtcgaatttaagccagggttgttagtgctactgccgaacaaacgtttggtacgattgaaatcgatagaaccaaacttacctttgcttaatgataccctgaaaaggcttaatatctctgcctacatactcgagaataccaacatcagtctccataggtggccgcaaggtagtatcgattgacctgtcccctctgtgaaggaaagttgaaggtggtaggagggatttgagcccatcagcctcgatctttgccttcttgtttgtctcctgaacttctggagtatccgagggcgagagcgacctctttggtgttgcctgtgtagagtccatggtgggtgttgttgtatatgtgtcttgctctgagggagcgctaaagatgatgggtgtcgagagaatttcgagagtcgcttacgtaaccgtcaccaaaacccatatactctccttctcgtccgtcactctttccaccgtcctcaccatcaccccaagagcttctcagacatcgtcccgtcggccaggcttacacgctagcaatgcttcatctaccaaagccatcggcatcatcagtctcacaccaaactccgctggaatcgcttcaccggacacacacatcgtcatcctctcaacgatctccttcgccgccttcgtccgttgccgcatccaccaatccaacttcacccgcttcctcctgggccgttcttccgaatggagcaaacagacagggcgctttatcatacatgcctggcgcagtgcatcgggaacgaacaaatgcaacaccaaggccaaagcgaaaggaactcaaggttgagcgtatgagtgtacaggtgtgtgaccgtctgcttcttgagcattttggtctgcttaaaagttagaagaggctgatgacgatctctcccgtacatttatcaggagcttcaatcgacctgggagcgaaataagacagtcctggaagataggttaggcttttttgtgatgcatactgatggcctggatatacccacctatctataaacttggcaactgtcactgaccgtttcatactctgtgacatccctatattcctacttcaaaagatctatctttcccccactctcttcctcaagtcccccagatccgtttcaaagtaaactgcttgctatacaatcttcacttgagcaccggatttccctccttaccacccaagaacagttttccaactccaccttgtcccccatcacatcatccgaacttacgtcacaagatccaatgtcgtctccgtcctcttcgtcgaacccagcgttaacggcatctacccctgtcgtctcgacatcatatggcgcacgtcgtcagtcgatccaccggtcccctctgtcgttcgtccttccgtcttgttactcatccttccatctcttgactgacattcatccttctgtccctcgtgacagcccggtcacttgtgcttcgaaacgaggcttggttgatccgatttcgatgtccgaatcaatcgcgcttcaatcagacctattcaaacgtgaaaaggcccgagaagttgcccgagcggccgaaatggaacgtaaagaggccgagagattggccataaatctagctaacgcgccaggtagatcggggaacaagctgatggatgaattggaaagaatcagagggcaggctcggatgagagctttcatgtttgttttttccttccttccttgtagtcttagtcttttctgctcctattctgcttgctaattcgttctcatctttgatcggagctctttcttcatctatacaggaacccaccgattccactttctcgagaaccattctacgcagatgactctgattgtgaagtatccgacggcctgacactcgaattcgagaatgattctgacgaggcattcgatgaaggggagggataccctgactatgctgatgcagacgacgggacagatgggaacgggcaaggaatcatagtgatctcccaggaagagatcgcccagaattgggcaacagggaatgaaggtcgttgatctccttgatgaactctatcttacctcttttctttttgtttattcgtttcttctctatcgcttctctggttcttctgacatcatttcgattttctgtcttcttttggttgatgctgcatccacatcaaactctcccctcccttgtctcttctgtcatcttttccccttgcactcttattcgaggtctcgttcaattctatttcttcttgatccatctctccaaactgaaccgttgttgcttcatgtatttctatcatgttctgatttgtcctgtcctctcgtcttctggtcttatctgccgtccaggcttcaccatggcgtgtattctcaataatgacgcatactcgagtacagaaaagaccagtcgtcaactgagatcaacataaaaagaaacgaacgaaagagaatctacaagaaaaagccgagcgtgtgtcatgttgttaaatcacggacatgcactatccttcctcctcctgttctttcacacgttccgtccccattaacatcctttgaccccaaccagtgaagactgaaagcgcaaggttgaacccttagatcaagtaagggaagattgctttcctaccaggcgggcactctttgccaaattccttcttgtagttcttcttcttcttgatggcccagatgaccatctgaccgaccgaaacagccgtaaagattccgcctagagttgaggaaaatacaacagacatcaggttggttcatgaggatgagtagaaggaggaaagacagaggatttatcaaaaacaaaaaagagcactacgtacaagcgaccgagccagtcatgatggttgttccaatccaaacgagggattcaaaaaggtaattggcgctataaacgaggtcaaatccgtaaccagttgggatggatcgtttcttggttccggccggtcggagcgatcgaagggtcaaatgagtgtacaagttggacgcttgagcccactgtgatagatcagattaatttgcagtcggaaaaagattgcaatgtcagacccgaacgtgaatagtgttgatgtttggaaagaagcgaacgaaccatgatgaacacagaccaagcggtgagccagaaatccgagtttcgagtagcaccagctagcttgtaagctgagttccaaggaccgtaaaggccaagggagagcaaaagtccagaaaggaggtgataatgggccgagctgtgtttaacaacatagtaatcagtgtcatctagacgatcggggaaaggtagggttatatcagaaccaactttttgaagacgttaaagaaaggcatggtggcattggagaaccgatgaacactgcaatggaaacattccaaatttgtgtagagaagaaaattcagctcgcatttcagtcgactaggacatgcctaaagctgtatagaaatccaaaagacatacaagagcgtctctagttctctcttgatgtagtgaagcataatcaagcagaaagcagtcctatcatcaagaccaaaggtcatacagttagatcaagcttccgactgagacaaacgtagataacagaaataagaagacctacttctgcatcgcgctatgttcataaggcacaatctgttccccaagaatggaaaagatcgttccaaaaatctgtcgtccgtagaagaagaagagtgggtgaattacgagaggaccagcctggagcaagaggaaaaccgaaaataaacgcatcaaacttgcgaatcagaaaacatttggagacggaaggacattgtaggcaatcacggatgacacttacatattcaatcaggaacactgtcttccacgagatctgtcggcctaggtccttgagctggagcacatcatcctcggtcacgccgtaagaaccgatggacttgtcatcatccgtcagaacgacgtcagatgtggttgtcaatctttgtcttgtcaggccaagctgaccgtgtgatgtgtaaaaacgaaatccatcagcaagaaagctagagaaagaatcaaggtatcaaggtaccaaaagagcaagaaaggagagagagtaactgtcaaaaggatgagaacaaaccttggggaactttgcctggatggacttcttgacctccttcacagttattttgtcagaatgccttccaggaaaatctatcatgattgccggcttgggagccgaggtagatttcttagaaggacgagattggacggtgatcttgaccatctagttttcgttaacaaaagaggtattttaggtttgcttttggtaagtttcttctctcggatagtgtgatgttcgacacagcgagttccatacgacaaaaacaacaggaggggcactcggtattctgggaggagaatgtaagaccgaagacacttacagctaggtgttgagattggggtggggtgtgatgaatggttgaacctagagggcgagcagagcaagagaagatgaaaggtcgcttgacaagacgcgtcattgggatcaatatcatttaataaatcaaatttcttagataatctctgcgcattgtccacaaacgaccacagagatttctcgcacgaaacacacaagggatgaatgaacatatatagaataggaagtcgacaaacagctgcgctcatatatataagagttcatgtcacagcgagagagaggaagggagatgtaaggaaaaaagtcagaaatgaagcgcttggataggcgacgatggaagcgaagcctgcaaggtatggccacagaaaatagagggaataaacagagcaatgaacagagggacatgcaaaaagtctaaaaagcgaaaactccaagaacacctaggagagcggaaccgactgccaaggatagtccaacaatgaatcctgaggatatgagagttttactactatgactagttacataaagtagcgtgccattcccggccgtgccagtcggaagaggagctccactcaaagtggttgcgaaagcaacagaatcttcaagagcatcgttaacggtaatggtcggaccagctgcagtggctacggtggtggtggcggtggctgtatgaggacaatgaaaagttcaacaattctgaagacacacatagattctggaaagtgatatacttgattagacataccgttggaggcaatcgtgaactgggaagaggttgcgaaaatcttgatatgacacaagcgctgatgtcaacactaagcgcacgcgtgtctcctagggtgcaacgagacaaaaagaagaatcaagaaaggaaataactcactcctccttgccaagtatcaccaaacgtgagtctaaaaccactacctgttggtacatcgtctccaagcacgatagcaatcgaactgagtgtcggatcaacccgggtggcaatgtagatattttcttgctgagaatctgtcacaggacgatgcagctagagggaagaagaggcggcttcagtttacgttgttctttgatctgaatcagaaactcagcaactgcttacgatcacgtcaaacgaaggagcgacattgtcactatcggtttcccatccggtctgaacgcatgagaagaggattagtagagaaaaagatagtaagtaccaagcattccatccaggccaagactatataaggtcttacctcccaagacaacaagttggtctgtccgatgacccagacttctgattcagcgggtgaggtgatagctgtcgacgagataaagattggaatgagcttaacttgaacattcgtctattagaacttaaacaatgtcaagaatgatgcttacgaaaaaagccctgaacactccaagctgcgaaagaaaggcaaaagctgaatgaggcacaatccaattctacaaaactcaagaaagccgaactcaccggcagcgaatggagccaaagagagcacgaaagcccagacgagaggaagcatgaacgagcgtatgtatggatatcctagagtggcagatggaacggagagaggagtaagatgttgccagtctgggtcaaaagaagagctaccgaagatgaaaacatcaagaatcgtctgaagcggtgtcttaacgctgagcagagaatcttcagtgacagacggatcgtcatatttcttccagttgctgcgccgccagttaagttagacttagtcagaccttagccagacctgacctgatccatcttgaatcagggttcatgggtacacacagacaaaagagaactccaagttaacgaaagactcattagcaggatatctagtgatgggcagcgggaatcaatcaaagtggaccagggtcatgagagaagtatcagctgagcgacacatatcggaagccaacaaggtcggatgcgcttgaaagtctacttgtgcccaaaaagagtttgacggattatgaaaagaagaaggaagagggactggaagaagagatactgggatggatgtccaggaggaattggactccactcttaaagcatcagtaaatacgcatatagaggccgtgggcaaagaggagataccccgatcaacagagctcgggacgctacttgcttatttgcatggtggctttaccccgttactcgggaaggagtcaattgctcactcgcttgttccgattttcatagatgagacgttaaattgaaatggtcgaacttcaactcagacaatcttgacagattccgtctttcgatatctgctgcttgaaagacgcgtgtcaggacaaacgggaaatagacgtgtctattcaaccatatatgagtattcatagtccatattttgacaacattacagcgcctcgactcttctaagcaactacgagatgatattagaacgtgacaaaaaccctgatataatctccctcctgaccgagattctctgtgatttacaatcctcatcggccttccttctagttgggaggagagatgagggctctttgaagatcccatcgaacacgatcagctccaatgtcttgataaagaatacaaaaatgttgatgtctcacttaatgattcccttcccatccttccctttgccaatttttgtgtcgttgaaggcgtcgacggcagaagcaaagtcgtatcggtgagtagcgagtggcttgagatcaactcgaccctgaccaacgagagcaatggccatcggctgagattttcattcgacagtgcagcagatcaatcagaatgagcggtccgtacaagagtcagctttgatgattaagataagaacgtgatatatatgttcagagaaggggaacttgcgtagtcaccggctccgtatcggaaagatcctttgaaagtggcctgcttcaccgagaaagcggtcatagggatctggatactaggggctcccataccgacctgaacaaacacacctggaaggacataaagagaaggagaaggagaagaccattcgttgttcacagcatcagatcaaaccgagacgtttaaagtgcctccgagcgaaccaggcagacttaccagcctccttgaccaaaaacattcccgactgaatgcaaacttctgcacccgaagcctcaataacgatgtcgaccgctccgaaacccttttccgggattccgagagatttccgtatgtcctccgtgattcgcttagaataatccattctagcctcagctttgtctgtcggaacgggaggcaggtagacatcggtggcggcgtatgacttggcaaagttcagccgatcctgattgatatcaatagcaatcactcgagatgctcccagggctgattcacaatgaatagaaacattaaacctcgaagcatataacggaaaaggaccagaaaaagtaacgcgcgcagaacgaacctttagcaacggcggagcaaagcaagccaacaggtccctgtccgtatacagcgacgacctggcctgccttcatgttcgacaacgtggagagagcatgaacagctaccgacagaggttcgatcattgctccatcttccattgacatcgagtctgggattttatgagcaatgtctgaagggagagcgtagtatcttcccagtgttcctcctgtgaatggaggagtggcagcgaagaccatatccgggcaaagctacaatatacatcggaatagagacaatatctagctcagttcaggaatcttcccgattatccagagcattctgaaacaccaaaatgagaacgaacctcgtaggtaccggacttgcaagcatcgcaagttctgcagctcactcccggctccagagcgactcggtctccgaccttgtgagtcttcacggccgaaccgaccttgacgacaattccggaggattcatgtccgaggaccatcggctcgttcagaacaaaatctccaattcgagcgtgttcgtggtagtgtacatcctgtatagaaagttcaaagagtgctcgttgcggttatacatcaagtttgaaaaaacagagcatcagaatgcgaagagagcatggcactcacggaaccgcagatacctaacaaaccatcaagaaattagtttagttacagaaaaatggaggtgggaaggccaaaattgaatagaatgtccttagtctgaaacaagtcatccggaggaacaagggagattggacctaccggtctttttaatctcgatcaatacgtccttgggtccgacgtcaggaataggtctttgctcaaagacggtatcatgaatcctaacagcaggcgatcgaaggacaagtattctccagtcaacatacagacacgtcttgcacacacacactcgaaaacgtgattcaagcaaaaacaaagaagatgacacaccctttgagaacgaaacttgggttatcccgaagtttcgtcgagaacgtttctcctttggatgtagtggccaagccttgtgcttcttgtgtggaggcctcataagtgttggaagcagtgagttctgagtgatctacgcacatgatagcgataagagtaagtgctgaagatatggatgatgtcggagagggtgatgttcaagagtagaaagaaagaaagaacgaaagaagaagggaaagaaataccccaagatggaatcaaggagatccagaacaagcgcggcttaagtagaagatgagagttgagtgtgactaccgcggagaaaacctgcgcggccgggccgaccggagatgtttgcccaaacaggaaatactctttcgtctgccaccttagcaaagcatgtatcgtattctgaaatcacatcatcataatcaacggaaagaaagattctacaagcaacatatatgatgatcatcggaacatttctcattcagtcttcccgaagacctacgagaaatttcagaaaataaagaaggtgtcaacacatctcgaataagaatcgaaagacagaccatcactgcttaccttgactcgatcctcgatgggcgcaaaagtcttagtcttggcaggcgcgacgatccctccgaacggcatcctatcatatgagaaatgaagaaacaagcaacaattgaacatgaatggttgttctttctcctttcgacgattgcagttcaccacttaaagacgagtgaaactcactgagatttgagaagccacgactcaggcaacgaccactcggccgtcacgttctctgaaatcaagttggtgtagtgctgcaacgaagctccgacgttgtacgtcgagagactcgtccacacattaccctgcaggataccagacgattgctgtgcattaaagaagaaaaaaacggtgagcgaacggatggcatatcaatctggatgagcacgccgggtgcatcgagaagacgtacatcactccagattgggaagttggccgcatacgccgggaacctatcctccatattatgtacagactctgtatcacatatgaaacaatgtgtgaatgtcagtcattgtagtgagaacaatcaaattggaataaacacgactggactgacgttggtcttcgaagaacaagatcgtgcctgcgcctgctccaaaagagtcaactttcgatttggtcgcgttcttcgtctcctctacatattgatgttctccagatacaaaagcggtttcccaattaaactacgctgcagtaaaacttctagtcgaaagaaagataagtaggacgaaccatcttggaagcctttcttggccagcgcagtccacacaaatttccacagcttgtcatgttgcgaaccaaacaagacgaccgcccttccactctgactgttgaacgtagtaggagtttgtaaacttcgagtgaagaatgaacaaacagatgagtaatagagggtcagagtcggtgattggtccaaatttccttcagagcaaagaaagaaagctcacgtagcatcctcgacaactttctggattgtttcttgagaaacaccttggggaaggacgttgttgatcgcgtagattgaccgccttccttgaatagcggctaggtaggcggcgggcgaagctttggtaatcgatcctagagtcatgtctcctttatctaaattttcggtctgggtctgattgttgacaacgccggtgaaagtgagaagcgattggacgagaagggttgaaattgaaggaatgtgcatcttgatgcctcagtctgtgttgctgttttatactcaatcgagaagaaccaaggtctacgttctagtaagatgaagaagacaaagacgagatgagtgatgatttgagaaagattgataatgcgaggaagaaatagcttatctgatttctctcatacacgtcaaatatcgtcatgatggtcgaatccgacagcgggatttcttctcgccggacatttcaccggtcatacgtaagcatcacggatacgttttaatagctcaactctcagtgtctctcgtaagagtaggtcaaacaggatgcccatgatgaatcagctatactttccatcaaagtctctcggtgtgctcgacgtccaattctaatcgtcttatcatatagaaacaatacaaacaacgtctctacaaagaagattccacaatcaactttttcatccacactattcagaacgctttgaaatcgtgagcctcacaatgaagaagcttgattctttagatcttgcttgccccaccgtcaacttcttttccaaacccgatcaccttctttttcgcccaggcgctggtaagaacaccggcgatggcagtcgcaggaggtagcctaaaaggaatcgacgacgaagctgtcggaagctgatgtttcttttcggcctgattgatcgataggaaaggatgttatagacggtcatggatgagagattgaacaactgaggcacaagacgtagattgaacaagaaaaaaaaacttgcatcaaagtagctttgctcagttcggtttatgaccgttccattcggatctgcaagtatagtcagtagttcttgcctcgagaaccaacgggcgtcttcgagctcgttatcgagatctagtcggatcgtttgattctcatcagcccaaccaaaacagcccaccctattatgtgcgtttacagtcaaaaaaaaaaagagaaaggattgtcggttgagccatgggagcagatcattcgaccttccacaacaagactcacatgagattggctattcacgtggatatgaatgaagagtagtaagagaaaagatcagtctaacgcctccataggagtatcggttgaatgtatgtcccacctggataaggccagggctggctcgaatgatctatgtaatcgggcacaatccatcatccttcagctttagcgctaattgagacatggcgatacactgatacgtacacatgacctcgttgacgaccacaccgctctcctcatagacctcacgtctgacggcctcctcgaacgactctcctggctcaaggaacccagcaaggcaggagtacatcccctttggccaagccttctgtctacccaataggatcttatcgccatcgagcgagatgatcgccatgatgactgcacaatcagtacgctgatagacgactaactagttagtcgttacattcgtctcttgaaggcaaagcagacaaagatgaagacaaaccggatagcagtgattggtcaaactttttaaagacgggcatgccgatgaattctcaggcgtggcctccaacgctgtcgagcacgagagtttccagccaccccatgtggaatactgtgagatttatacagaataagaaacgaaagtactggtggaagggagaccaggaaagtgaaagggcacggggggactgaccacctcgtttccacagcctgcacaaaacttatttcgactgttccaatctaccatcgatctcgccaacgcgaacacgcctgcttcccatggcgcgaaatgaacggctgccgccctgctatcaacccactttcgttcgccttgtttgaggaagatgcgatccatcaaactcggcccgtcctctccgagttcttgctcaagtccggtgacgtcgagtgcaaagatcggagggttttctttgttaagcgtcggatccatctcctttgtcatcaacgtctttgagtgttcactctgattcttttcatccgtccccaagaaaatcaattttggggcttttctacctgaaggtaagatctgagcaccttgtagatgtttgatagttccggcagagtcatctttatagaacgggccgtctccgaggatcggtcggacgtcctgccaagaaagaaaggtgatggactgggtggattgggtgataagtggctgaagaccatggaagggaagaaacttagtgagagggttttgaaggtgttgactgagcagggaggatgagtgtctttggaagctgagcctgttgagcgggggtgcacctgcgtaaaagttgatgtgattttcgcccactatgggaagatagtgatatgagaaaacaggatgcgagttatgttcaattcaactcgagccgacctcattatagacaaagaagaagctagacacggactgtaagataaatgaagattggaagatgtagggctcgttttcttgagttgctgtccgaaagaaaccaaactagatctcatcggttttcgggagcgtggatgtttaagagcaaacgacgagtttgagcatccaatcatccacacgtcattgtcgttgaagcccatgaccgcccacacccgatagcatgtataatagcaagtacggtagcacattcagccctggtcgacctcagcatcagcatcagtatcaacatcaacatcaacctcccttggcaaaaagacccaagagtcacattgcttacgatacgctcctccaaatcgcccggacgccaaacctgaaagtgttcgacgtcggatgtggccgttagtcaggtcgcatcgatgatcatttgcgtttgatcggatgcagcctttaacgaagaaggatgtctcatgttgtttttttgtttctcgtttcgtgattttatagccggtggagatttgattgagttgttgacaatgggagctcgaccgagtgatctcatcggaatcgacctcgagcctcaagtgagttgggcgttgtgtctttgtttggctttggctctgacttctctgcagacctagtcaagttctcattcataacacacagttctcaaagttagcttgcagtcttgctgaagcaagaagtctaccggtccctccgttcgagtttgttcaggcagatgttggtggattgttgccatatccggctctctccggaaggacgttcacgcctggcaccatgagcggaatcatatgttatgttcgtgtgtttcttctcaatccttcacatgcacccattctgcatataatcatcctcattgtccattcatttgacatttgctcttggttgtcggaacagcggttttttcacttgcatcctccagaaactcaggaagctctacttcgctggctattaagtcttctttcggtcccctcatcgtcttccaatctttcgggatgtcctaccccttctatattgctcggtctacagagatcattaccggctagagcagcttccggatggatacccatctctgactcttccccttcctctgcttcttcctcaagcgacaaggagatccactgggtttactcgtctagcgactggcacaatcttgtggaatccagcgtggatgaattttcctctcagatcagtcagtcagggcgcaaagtctcgtttgggacagaattttttcctgggctcgaaggagagagaagaggggcgatggagtggtgggtgagagtagatgttgggtagttgataacttcgttcatcttggacatctgtttcgatctctggttcttccaggtttagcatgggtcgatctagatgggctctccagtccaatcctaggcctgaaaagtcagactcagccacagttgatataatatacgtagttacatagattggagatgaacaagaatgtaaaaggaataaagctgagaacaaaacactggaaagaaggagtaaagtaaagcaaagacagatgagagagaggagaaagagtcaagaacgaacatgcaaaagagaggaaagaaaagattcgtccatctcgactttctttctattttgtttgtaacctttgtcagagaacgcgctccaaaaatataaagaaggaagataaataacgatcgtatatggtgaatgaaaaggaatgctcgaagagacagatttcgattacatcggactacgtgtcacataacgatcagcccgtttggtcttgtgtatgcgctcgaagaggagaaagaaaccgagacttacaccatggcagagaacgagctgatctggtaggtgattttcctcagcgagttatagtgctctcctaatccatatagtcgactatatccaagataaaagacaaaacaatcgggcccagttagataaattggtcagaaacaagacgcaagaaaaggatgagatctaaccgatggtaactgatcctaacggctttgatcttcctggccgacttagaatccaaagtggcttttgcttttggatctggcgagtgagcgacgatctttggatggttggattggatgacatggatagggatttggtagtacctcgagagcgccaagatctaaagaacgatcgagagcccggtccgtcaggagcagccaactttgaacaaaaaaaatgcaggaaaccctaccactcacctcgggctcaccaccccactctgtcgaactacggacccttgcacaatacttttcgaatcctttcgcggtcatcatcccatcgtccgtcgcgcccttatcgtcgtctgtttcctctggatcaacaacgccgatgagaaaaggcatgaatgaatccggatgggcgagcatgtagtctgctgctgctgctcgggtggtccgaggctgaatacgatacaacgaggcctccgaggtcaaaactgtcctacagagtttgaacacgatatagatctactcacgttgttctcatcgtccttgatctttttaagttgatatagctgaagttggacaaatcagaaaagacgagctagttgtaagccggaacgtctataacgagaagagaaccaaagggacaaacttgatcggcgattgctccgtaaagacagtttccgtctggggcgatctacggaaaaagaagaatgagacagggatcagttatccaagcacagcatctctggacggaagtcggaacatacatcgtagatctctactccgagctccatacagatctgcagaaggtgtgctcgctctgcctgtttcgctctatcgatcttcgcttgtggagaaagttctggagcaggtattggcggaggaagcgaagctaaggctagggcgccttctgcctttggctatcgagagtcatgaagagaggaaaagcaagatttgtcagattgactatgcagagaggagggaaaagggaagagttttgtcttgaacaaagcacacacatctttgaattttcgactcagaccgctcataaatccaccacctgttttaccgttaatgaaacgcttcttgccaaccccgttcccattggcaatggtggcaacatcagcgattccactcaacgtggctgctctaatcgggggataatctggcgcgggtggcgagtgagtatgcccttccgatcgatggacgtgatgatgatggtgttttgagatcgggtgcaccgagtcgccgttatatgagccgggagcaggttgtatggttggtgaatggacatcagaaggagccagattctgtagtgccgctgctataggcgcctccacctctaccgtgactggtggtgtcgacgatggagttccaaatggattattttttcgagccaaaggcatgacctcaggtggggtgtctaccagaatgataggggttgaatggggcgcaaccagagggatgggtatcggagattcgatcatcgacggtgggaacgaggatgtgacagcctggacgggtttgtcaagcgctccaaccgaatctttttcctctgcttgtttcagaagatcatccccatcgggcagggagtgtgacacgttcggatgtccatttgattgagggatcgctgaaagtgcgctgctcaagcgggcggccggagccgctcgctcactctccgaaggctcaatgtcgatcaattgatcattttgttcctttcctgttcctgattcccttggtgctactcccactctcggtctgtctttaatggaagaagcggcggacgaggtcgcggtgtttccaaacaaaggcacccgaatctctctctctccgtgatcgtgatcccaggggtcgtgtggatcggcatgaccgttctcgttttggtctcggttccgctctcgctccaagcttgacgacgtcgagacagacgagaatgaggagacggaagagttgtcgaacgacggcctggcgcttgagattccgggaagggtgttgactctgaagagtgagggcatgatcggggatgaggtgtttttagcattcccttcaaccgggctgactgacgatcttgcgattgtttgagagggggagggtgacaacttttgactccctcctcccatgcctgtcctggagcttgcttgtcgaactctcgagaggaagcctccagaggtcggtggagatgaagatccgacgggaggtgactgtgacgaagcgtggactggactgggcccatccccattagatgccgaagaggtgggtgtatttgaaccagatgtcttcctcagatatgatgctcttttgaacatgattgggaatatagatgggaatgtgggagtggatgcaagtatggatgtgaatatgaacaggaaagagcagaactgaacaacgaaacacgataggtattaatcaagtttctacggccagaccggggagatgaaaggttgcaaggtctgatggggtttctctcttgatgttttcggtaatgttcggtcctgttagatggaaagacaccggtacctctggaagacacagtcaggcaaaattccaaagatgaacctggatgtaatccgtcgaccaaaagagacggagaagggcctatgggacagtaacgtgtgaggaggtgacctataggcaagagcagagagtacaaccgacaacaagaggatacacaaagaaaaaaagaagaaaaaaaaa
